(19) United States
(12) Patent Application Publication
(10) Pub. No.: US 2012/0023611 A1
(43) Pub. Date: Jan. 26, 2012

(54) Isolated Novel Nucleic Acid and Protein Molecules from Corn and Methods of Using Thereof

(76) Inventors: Yongwei Cao, Chesterfield, MO (US); Jeffrey M. Staub, Wildwood, MO (US); Bo-Xing Qiu, Chesterfiel, MO (US); James A. Morrell, St. Louis, MO (US); Wei Wu, Chesterfield, MO (US)

(21) Appl. No.: 13/202,619

(22) PCT Filed: Feb. 23, 2010
(86) PCT No.: PCT/US10/24996

§ 371 Date: Sep. 29, 2011

(30) Foreign Application Priority Data
Feb. 27, 2009 (US) 61155927

(51) Int. Cl. A01H 1/02; C12N 5/10; C12N 15/82; C07H 21/04; C12N 15/29; A01H 1/00; A01H 5/00; A01H 5/10; C12N 5/04; C40B 40/06

(52) U.S. Cl. 800/275; 435/410; 435/419; 435/320.1; 506/16; 536/23.6; 800/278; 800/289; 800/298; 800/312; 800/314; 800/320.1; 800/320.2; 800/320.3

(57) ABSTRACT

This disclosure provides purified nucleic acids and polypeptides and various uses of these sequences such as transcript profiling. Also provided are transgenic plants, seeds, and plant cells containing DNA for expression of the proteins that are useful for imparting enhanced agronomic trait(s) to transgenic crop plants, methods of making such plants and methods of making agricultural commodity including seeds and hybrid seeds from such plants.

### CROSS REFERENCE TO RELATED APPLICATIONS

[0001] This application claims benefit under 35 USC §119(e) of U.S. provisional application Ser. No. 61/155,927 filed on Feb. 27, 2009 which is incorporated herein by reference in its entirety.

### TECHNICAL FIELD OF THE INVENTION

[0002] Disclosed herein are inventions in the field of plant genetics and developmental biology. More specifically, this invention provides novel compositions of corn DNA and peptide molecules. Also disclosed are plants comprising recombinant DNA providing one or more enhanced traits in a transgenic plant, including cells, seed, and pollen derived from such a plant, as well as methods of making and using such plant.

### INCORPORATION-BY-REFERENCE OF MATERIALS FILED ON COMPACT DISC

[0003] A sequence listing having the file name “38-21(56613)A_PCT_SeqListing.txt” was created on Feb. 8, 2010 and has 22507 sequences is enclosed herewith in computer readable format and is herein incorporated by reference in its entirety.

### SUMMARY OF THE INVENTION

[0004] Certain embodiments of the disclosed invention provide recombinant DNA constructs having polynucleotides characterized by reference to SEQ ID NO:1-8104 and the cognate proteins with amino acid sequences having reference to SEQ ID NO:8105-14403. Furthermore, SEQ ID NO:14404-22507 provides probeset nucleic acid sequences that represents complete and/or fragments of SEQ ID NO:1-8104. The recombinant DNA constructs are used in aspects of the various embodiments of the invention to provide enhanced traits when stably integrated into the chromosomes and expressed in the nuclei of transgenic plants cells. In many aspects of these embodiments, the recombinant DNA constructs, when expressed in a plant cell, provide for expression of cognate proteins. In particular aspects of the invention the recombinant DNA constructs for expressing cognate proteins are characterized by cognate amino acid sequence that have at least 95% identity over at least 95% of the length of a reference sequence selected from the group consisting of SEQ ID NOs: 8105-14403 when the amino acid sequence is aligned to the reference sequence. In some aspects of the invention, the recombinant DNA constructs are characterized as being constructed with sense-oriented and/or anti-sense-oriented polynucleotides from the group consisting of SEQ ID NOs: 1-8104 which, when expressed in a plant cell, provide for the suppression of cognate proteins having amino acid sequences that have at least 95% identity over at least 95% of the length of a reference sequence selected from the group consisting of SEQ ID NOs: 8105-14403.

[0005] In some aspects of the invention, the recombinant DNA constructs are characterized as being constructed with sense-oriented and/or anti-sense-oriented polynucleotides from the group consisting of SEQ ID NOs: 14404-22507.

[0006] In certain aspects of this invention the recombinant DNA constructs of the invention are stably integrated into the chromosome of a plant cell nucleus.

[0007] Certain aspects of this embodiment of the invention provide transgenic plant cells having stably integrated recombinant DNA constructs, transgenic plants and seeds comprising a plurality of such transgenic plant cells and transgenic pollen of such plants. Such transgenic plants can be selected from a population of transgenic plants regenerated from plant cells transformed with recombinant DNA constructs by screening transgenic plants for an enhanced trait as compared to control plants. The enhanced trait provided may include, but is not limited to, enhanced water use efficiency, enhanced cold tolerance, increased yield, enhanced nitrogen use efficiency, altered seed protein composition, altered seed oil composition, or any combinations thereof.

[0008] Other embodiments of the invention provide for plant cells, plants, seeds, and pollen that can further comprise DNA expressing a protein that provides tolerance from exposure to an herbicide applied at levels that are lethal to a wild type plant cell.

[0009] Embodiments of the invention also provide methods for manufacturing non-natural, transgenic seed that can be used to produce a crop of transgenic plants with an enhanced trait resulting from expression of a stably-integrated recombinant DNA construct. The methods may comprise one or more of the following steps: (a) screening a population of plants for an enhanced trait and a recombinant DNA construct, where individual plants in the population can exhibit the trait at a level less than, essentially the same as or greater than the level that the trait is exhibited in control plants, (b) selecting from the population one or more plants that exhibit the trait at a level greater than the level that said trait is exhibited in control plants, (c) collecting seed from a selected plant, (d) verifying that the recombinant DNA is stably integrated in said selected plants, (e) analyzing tissue of a selected plant to determine the production or suppression of a protein having the function of a protein encoded by nucleotides in at least one sequence selected from SEQ ID NOs:1-8104 or their complete complement thereof. In certain embodiments of the invention, the plants in the population further include DNA expressing a protein that provides tolerance to exposure to a herbicide applied at levels that are lethal to wild type plant cells and the selecting is affected by treating the population with the herbicide, e.g. a glyphosate, dicamba, or glufosinate compound. In another embodiment of the invention, the plants are selected by identifying plants with the enhanced trait. The methods can be used for the manufacturing corn, soybean, cotton, canola, alfalfa, wheat, rice, sugarcane or sugar beet seed. In other embodiments of the present invention, the methods can also be used for manufacture transgenic plants including, but are not limited to, millet, barley, peanut, pigeon pea, sorghum, vegetables (including but not limited to Broccoli, Cauliflower, Cabbage, Radish, Chinese cabbage, Melons, Watermelons, Cucumber, Gourds, Pumpkin, Squash, Pepper, Tomato, Eggplant, Onion, Carrot, Garden Bean, Sweet Corn, Pea, Dry Bean, Okra, Spinach, Leek, Lettuce, and Fennel), grape, berries (including blue, black, raspberry, mullberry, boisenberry, etc), cherry and related fruit trees (including but not limited to plum, peach, apricot, kiwi, pomegranate, mango, fig), fruit trees (including but not limited to orange, lemon, lime, blood orange, grapefruit, and the like), and nut trees (including but not limited to coconut, walnut (English and black), pecan, almond, hazelnut, brazil nut, hickory nut, acorn, and the like) and sunflower, other oilseed producing plants or any combinations thereof.

[0010] Other embodiments of the invention provide a methods for producing hybrid corn seed by acquiring hybrid corn seed from a herbicide tolerant corn plant which also has stably-integrated, recombinant DNA construct having a promoter that is (a) functional in plant cells and (b) is operably linked to DNA that encodes or suppresses a protein having the function of a protein encoded by nucleotides in at least one sequence selected from the group consisting of SEQ ID NOs:1-8104. The methods of these embodiments may further include producing corn plants from said hybrid corn seed, wherein a fraction of the plants produced from said hybrid corn seed is homozygous for said recombinant DNA, a fraction of the plants produced from said hybrid corn seed is hemizygous for said recombinant DNA, and a fraction of the plants produced from said hybrid corn seed has none of said recombinant DNA; selecting corn plants which are homozygous and hemizygous for said recombinant DNA by treating with an herbicide; collecting seed from herbicide-treated-surviving corn plants and planting said seed to produce further progeny corn plants; repeating the selecting and collecting steps at least once to produce an inbred corn line; and crossing the inbred corn line with a second corn line to produce hybrid seed.

[0011] Other embodiments of the invention provide methods for selecting a plant comprising plant cells of the invention by using an immunoreactive antibody to detect the presence or absence of protein expressed or suppressed by recombinant DNA in seed or plant tissue. Another embodiment of the invention provides anti-counterfeit milled seed having, as an indication of origin, plant cells of this invention.

[0012] Yet another embodiment of this invention includes nucleotides disclosed in SEQ ID NO: 1-8104, SEQ ID 14404-22507 or fragments thereof and their uses in transcript profiling.

[0013] Still other embodiments of this invention provide for transgenic plants with enhanced water use efficiency or enhanced nitrogen use efficiency. For example, this invention provides methods of growing a corn, cotton, soybean, or canola crop without irrigation water by planting seed having plant cells of the invention which are selected for enhanced water use efficiency. Alternatively embodiments of these methods include applying reduced irrigation water, e.g. providing up to 300 millimeters of ground water during the production of a corn crop. This invention also provides methods of growing a corn, cotton, soybean or canola crop without added nitrogen fertilizer by planting seed having plant cells of the invention which are selected for enhanced nitrogen use efficiency.

[0014] Other embodiments of the invention provide mixtures comprising plants cells and an antibody to a protein produced in the cells where the protein has an amino acid sequence that has at least 90% identity over at least 90% of the length of a reference sequence selected from the group consisting of SEQ ID NO: 8105-14403 when the sequence is aligned to the reference sequence.

[0015] In another aspect, the present invention includes a mixture having plant cells, and an antibody to a protein produced in said cells wherein said protein has an amino acid sequence that has at least 95% identity over at least 95% of the length of a reference sequence selected from the group consisting of SEQ ID NO: 8105-14403 when said amino acid sequence is aligned to said reference sequence.

[0016] In another aspect, the present invention includes a mixture having plant cells, and an antibody to a protein produced in said cells wherein said protein has an amino acid sequence that has at least 98% identity over at least 98% of the length of a reference sequence selected from the group consisting of SEQ ID NO: 8105-14403 when said amino acid sequence is aligned to said reference sequence.

[0017] In another aspect, the present invention includes a mixture having plant cells, and an antibody to a protein produced in said cells wherein said protein has an amino acid sequence that has at least 99% identity over at least 99% of the length of a reference sequence selected from the group consisting of SEQ ID NO: 8105-14403 when said amino acid sequence is aligned to said reference sequence.

[0018] In another aspect, the present invention includes a mixture having plant cells, and an antibody to a protein produced in said cells wherein said protein has an amino acid sequence that has at least 99.5% identity over at least 99.5% of the length of a reference sequence selected from the group consisting of SEQ ID NO: 8105-14403 when said amino acid sequence is aligned to said reference sequence.

[0019] Yet another aspect of the present invention includes a transgenic plant cell with stably integrated, recombinant DNA comprising a promoter that is functional in plant cells and that is operably linked to DNA from a plant, bacteria or yeast that encodes a protein having at least 90% sequence identity selected from the group consisting of SEQ ID NO: 8105-14403; wherein said plant cell is selected from a population of plant with said recombinant DNA by screening plants that are regenerated from plant cells in said population and that express said protein for an enhanced trait as compared to control plants that do not have said recombinant DNA; and wherein said enhanced trait includes, but are not limited to, enhanced water use efficiency, enhanced cold tolerance, increased yield, enhanced nitrogen use efficiency, enhanced seed protein or enhanced seed oil.

### ILLUSTRATIVE EMBODIMENTS OF THE INVENTION

[0020] While the making and using of various embodiments of the present invention are discussed in detail below, it should be appreciated that the present invention provides many applicable inventive concepts that can be embodied in a wide variety of specific contexts. The specific embodiments discussed herein are merely illustrative of specific ways to make and use the invention and do not delimit the scope of the invention.

[0021] To facilitate the understanding of this invention, a number of terms are defined below. Terms defined herein have meanings as commonly understood by a person of ordinary skill in the areas relevant to the present invention. Terms such as “a”, “an” and “the” are not intended to refer to only a singular entity, but include the general class of which a specific example may be used for illustration. The terminology herein is used to describe specific embodiments of the invention, but their usage does not delimit the invention, except as outlined in the claims.

[0022] In the attached sequence listing, SEQ ID NO:1-8104 are nucleotide sequences of the coding strand of DNA for “genes” used in the recombinant DNA imparting an enhanced trait in plant cells, e.g. each comprises a coding sequence for a protein; SEQ ID NO: 8105-14403 are amino acid sequences of the cognate protein of the “genes” with nucleotide coding sequences provided by SEQ ID NO: 1-8104; and SEQ ID NO:14404-22507 are full-length sequences or fragments of SEQ ID NO:1-8104.

[0023] As used herein, a “plant cell” means a plant cell that is transformed with stably-integrated, non-natural, recombinant DNA, e.g. by Agrobacterium-mediated transformation or by bombardment using microparticles coated with recombinant DNA or other means. A plant cell of this invention can be an originally-transformed plant cell that exists as a microorganism or as a progeny plant cell that is duplicated by regeneration into differentiated tissue, e.g. into a transgenic plant with stably-integrated, non-natural recombinant DNA, or seed or pollen derived from a progeny transgenic plant.

[0024] As used herein, a “transgenic plant” means a plant whose genome has been altered by the stable integration of recombinant DNA. A transgenic plant includes a plant regenerated from an originally-transformed plant cell and progeny transgenic plants from later generations or crosses of a transformed plant.

[0025] A “consensus amino acid sequence” means an artificial, amino acid sequence indicating conserved amino acids in the sequence of homologous proteins as determined by statistical analysis of an optimal alignment, e.g. CLUSTALW, of amino acid sequence of homolog proteins. The consensus sequences listed in the sequence listing were created by identifying the most frequent amino acid at each position in a set of aligned protein sequences. When there was 100% identity in an alignment the amino acid is indicated by a capital letter. When the occurrence of an amino acid is at least about 70% in an alignment, the amino acid is indicated by a lower case letter. When there is no amino acid occurrence of at least about 70%, e.g. due to diversity or gaps, the amino acid is indicated by an “x”. When used to defined embodiments of the invention, a consensus amino acid sequence will be aligned with a query protein amino acid sequence in an optimal alignment, e.g. CLUSTALW. An embodiment of the invention will have identity to the conserved amino acids indicated in the consensus amino acid sequence.

[0026] As used herein, “control plant” means a plant that does not contain the recombinant DNA that expressed a protein which imparts an enhanced trait. A control plant is to identify and select a transgenic plant that has an enhance trait. A suitable control plant can be a non-transgenic plant of the parental line used to generate a transgenic plant, e.g., devoid of recombinant DNA. A suitable control plant can in some cases be a progeny of a hemizygous transgenic plant line that is does not contain the recombinant DNA, known as a negative segregant.

[0027] As used herein, an “enhanced trait” means a characteristic of a transgenic plant that includes, but is not limited to, an enhance agronomic trait characterized by enhanced plant morphology, physiology, growth and development, yield, nutritional enhancement, disease or pest resistance, or environmental or chemical tolerance. In more specific aspects of this invention enhanced trait is selected from group of enhanced traits consisting of enhanced water use efficiency, enhanced cold tolerance, increased yield, enhanced nitrogen use efficiency, enhanced seed protein and enhanced seed oil. In an important aspect of the invention the enhanced trait is enhanced yield including increased yield under non-stress conditions and increased yield under environmental stress conditions. Stress conditions can include, for example, drought, shade, fungal disease, viral disease, bacterial disease, insect infestation, nematode infestation, cold temperature exposure, heat exposure, osmotic stress, reduced nitrogen nutrient availability, reduced phosphorus nutrient availability and high plant density. “Yield” can be affected by many properties including without limitation, plant height, pod number, pod position on the plant, number of internodes, incidence of pod shatter, grain size, efficiency of nodulation and nitrogen fixation, efficiency of nutrient assimilation, resistance to biotic and abiotic stress, carbon assimilation, plant architecture, resistance to lodging, percent seed germination, seedling vigor, and juvenile traits. Yield can also be affected by efficiency of germination (including germination in stressed conditions), growth rate (including growth rate in stressed conditions), ear number, seed number per ear, seed size, composition of seed (starch, oil, protein) and characteristics of seed fill.

[0028] Increased yield of a transgenic plant of the present invention can be measured in a number of ways, including test weight, seed number per plant, seed weight, seed number per unit area (e.g., seeds, or weight of seeds, per acre), bushels per acre, tonnes per acre, tons per acre, kilo per hectare. For example, maize yield can be measured as production of shelled corn kernels per unit of production area in bushels per acre or metric tons per hectare, often reported on a moisture adjusted basis at about 15.5 percent moisture. Increased yield can result from improved utilization of key biochemical compounds such as nitrogen, phosphorous and carbohydrate, or from improved responses to environmental stresses, such as cold, heat, drought, salt, and attack by pests or pathogens. Recombinant DNA used in this invention can also be used to provide plants having improved growth and development, and ultimately increased yield, as the result of modified expression of plant growth regulators or modification of cell cycle or photosynthesis pathways. Also of interest is the generation of transgenic plants that demonstrate enhanced yield with respect to a seed component that can correspond to an increase in overall plant yield. Such properties include enhancements in seed oil, seed molecules such as tocopherol, protein and starch, or oil, particular oil components as can be manifest by alterations in the ratios of seed components.

[0029] Seed according to the present invention may be planted, grown and harvested to produce a crop or terminal crop. As used herein, a “crop” is a plant or plant product that is grown and harvested, such plant or plant product including but not limited to plants or plant parts such as leaf, root, shoot, fruit, seed, grain, or the like. A “terminal crop” is a crop grown for uses other than for use as planting seed to produce subsequent generations of plants. In some crop plants, such as grain produced from hybrid corn, the crop is not very suitable for planting because it does not breed true and the crop can then be conveniently referred to as “hybrid grain.” In other crop plants, where the crop does breed true, such as soybean, whether a crop is planting seed or a terminal crop will depend on the uses and marketing channels of the crop. If used or marketed for planting, it will be a crop of planting seed; if used or marketed for other purposes it will be a terminal crop.

[0030] As used herein, “exogenous promoter region” refers to a sequence, capable of promoting mRNA transcription, that does not naturally occur in the plant at the same site and/or linked to the nucleic acids. The promoter can be from a different plant species or it can be from the same plant species, but naturally found in a different location in a non-genetically modified plant. Moreover, the promoter region can be found in the same genetic locus as is present a native plant, but linked to different sequence(s), than are native.

[0031] As used herein, “promoter” means regulatory DNA for initializing transcription. A “plant promoter” is a promoter capable of initiating transcription in plant cells whether or not its origin is a plant cell, e.g. is it well known that Agrobacterium promoters are functional in plant cells. Thus, plant promoters include promoter DNA obtained from plants, plant viruses and bacteria such as Agrobacterium and Bradyrhizobium bacteria. Examples of promoters under developmental control include promoters that preferentially initiate transcription in certain tissues, such as leaves, roots, or seeds. Such promoters are referred to as “tissue preferred”. Promoters that initiate transcription only in certain tissues are referred to as “tissue specific”. A “cell type” specific promoter primarily drives expression in certain cell types in one or more organs, for example, vascular cells in roots or leaves. An “inducible” or “repressible” promoter is a promoter which is under environmental control. Examples of environmental conditions that can effect transcription by inducible promoters include anaerobic conditions, or certain chemicals, or the presence of light. Tissue specific, tissue preferred, cell-type specific, and inducible promoters constitute the class of “non-constitutive” promoters. A “constitutive” promoter is a promoter which is active under most conditions.

[0032] As used herein, a “functional fragment” refers to a portion of a polypeptide provided herein which retains full or partial molecular, physiological or biochemical function of the full length polypeptide. A functional fragment often contains the domain(s), such as Pfam domain, identified in the polypeptide provided in the sequence listing. In some embodiment, a function fragment includes at least 1, 2, 3, 4, 5 or more starting coding codons and at least 1, 2, 3, 4, 5 or more stop codons.

[0033] Embodiments of the invention provide molecules of that include “fragments” of the disclosed recombinant DNA molecules; including oligonucleotides of at least 15, at least 16 or 17, at least 18 or 19, and at least 20, 21, 22, 23, 24, 25, 26, 27, 28, 29, 30, 31, 32, 33, 34, 35, 36, 37, 38, 39, 40, 41, 42, 43, 44, 45, 46, 47, 48, 49, 50, 51, 52, 53, 54, 55, 56, 57, 58, 59, 60, 61, 62, 63, 64, 65, 66, 67, 68, 69, 70, 71, 72, 73, 74, 75, 76, 77, 78, 79, 80, 81, 82, 83, 84, 85, 86, 87, 88, 89, 90, 91, 92, 93, 94, 95, 96, 97, 98, 99, 100 or more, consecutive nucleotides of any of the sequences provided. Such oligonucleotides are fragments of the larger molecules having a sequence selected from the group consisting of SEQ ID NO: 1 through SEQ ID NO: 8104 or SEQ ID NO:14404-22507 and find use, for example as probes and primers for detection of the polynucleotides of the present invention. Alternatively, these fragments can be used as RNAi for gene suppression purposes. In some embodiments, a fragment can contain one or more coding region. In another embodiment, a fragment can include non-coding regions only.

[0034] Aspects of the various embodiments of the invention also provide for nucleic acid fragments of SEQ ID NO: 1 through SEQ ID NO: 8104 that are at least about 125, 150, 175, 200, 225, 250, 300, 325, 350, 375, 400, 425, 450, 475, 500, 525, 550, 575, 600, 625, 650, 675, 700, 725, 750, 775, 800, 825, 850, 875, 900, 925, 950, 975, 1000, 1050, 1100, 1150, 1200, 1250, 1300, 1350, 1400, 1450, 1500, 1550, 1600, 1650, 1700, 1750, 1800, 1850, 1900, 1950, 2000, 2050, 2100, 2150, 2200, 2250, 2300, 2350, 2400, 2450, 2500, 2550, 2600, 2650, 2700, 2750, 2800, 2850, 2900, 2950, 3000 or more nucleotides in length. Some aspects of these embodiments provide for nucleic acid fragment molecules that encode functional fragment of any of the polypeptide sequences provided in SEQ ID NO: 8105 to SEQ ID NO: 14403.

[0035] In other embodiments, oligonucleotides are fragments of the larger molecules having a sequence selected from the group consisting of SEQ ID NO: 1 through SEQ ID NO: 8104, or SEQ ID NO: 14404-22507 and use, for example as probes and primers for detection of the polynucleotides of the present invention.

[0036] Other embodiments of the present invention provide for one or more polypeptides having at least about 10 contiguous peptide residues of one or more of the peptide sequences provided in SEQ ID NO: 8105 to SEQ ID NO: 14403. In other aspects of these embodiment, the polypeptide(s) comprises at least 15, 20, 25, 30, 35, 40, 45, 50, 55, 60, 65, 70, 75, 80, 85, 90, 95, 100, 105, 110, 115, 120, 125, 130, 135, 140, 145, 150, 155, 160, 165, 170, 175, 180, 185, 190, 195, 200, 205, 210, 215, 220, 225, 230, 235, 240, 245, 250, 255, 260, 265, 270, 275, 280, 285, 290, 295, 300, 305, 310, 315, 320, 325, 330, 335, 340, 345, 350, 355, 360, 365, 370, 375, 380, 385, 390, 395, 400, 405, 410, 415, 420, 425, 430, 435, 440, 445, 450, 455, 460, 465, 470, 475, 480, 485, 490, 495, 500, 525, 550, 575, 600, 625, 650, 675, 700, 750, 800, 850, 900, 950, 1000 or more contiguous peptide residues from one or more of the sequences provided in SEQ ID NO: 8105 to SEQ ID NO: 14403. In particularly aspects, these embodiments the poly peptide includes a functional fragment of one or more of the polypeptides provided in the Sequence Listing.

[0037] As used herein, “expressed” means produced, e.g. a protein is expressed in a plant cell when its cognate DNA is transcribed to mRNA that is translated to the protein.

[0038] As used herein, an “expression cassette of a DNA construct” is capable of integrating in a plant genome, expressing a functional polypeptide and providing a transgenic plant expressing polypeptides of the invention.

[0039] As used herein, “suppressed” means decreased, e.g. a protein is suppressed in a plant cell when there is a decrease in the amount and/or activity of the protein in the plant cell. The presence or activity of the protein can be decreased by any amount up to and including a total loss of protein expression and/or activity.

[0040] As used herein, a “functional fragment” refers to a portion of a polypeptide provided herein which retains full or partial molecular, physiological or biochemical function of the full length polypeptide. A functional fragment often contains the domain(s), such as Pfam domain, identified in the polypeptide provided in the sequence listing.

[0041] As used herein, a “homolog” means a protein in a group of proteins that perform the same biological function, e.g. proteins that belong to the same Pfam protein family and that provide a common enhanced trait in transgenic plants of this invention. Homologs are expressed by homologous genes. With reference to homologous genes, homologs include orthologs, e.g., genes expressed in different species that evolved from a common ancestral genes by speciation and encode proteins retain the same function, but do not include paralogs, e.g., genes that are related by duplication but have evolved to encode proteins with different functions. Homologous genes include naturally occurring alleles and artificially-created variants. Degeneracy of the genetic code provides the possibility to substitute at least one base of the protein encoding sequence of a gene with a different base without causing the amino acid sequence of the polypeptide produced from the gene to be changed. When optimally aligned, homolog proteins have typically at least about 60% identity, in some instances at least about 70%, at least about 75%, at least about bout 80%, about 85%, at least about 90%, at least about bout 92%, at least about bout 94%, at least about bout 95%, at least about 96%, at least about 97%, at least about 98%, at least about 99%, and even at least about 99.5% identity over the full length of a protein identified as being associated with imparting an enhanced trait when expressed in plant cells. In one aspect of the invention homolog proteins have an amino acid sequence that has at least about 80%, at least about 85%, at least about 90%, at least about 92.5%, at least about 95%, at least about 96%, at least about 97%, at least about 98%, at least about 99%, and at least about 99.5% identity to a consensus amino acid sequence of proteins and homologs that can be build from sequences disclosed herein.

[0042] Homologs can be identified by comparison of amino acid sequence, e.g. manually or by use of a computer-based tool using known homology-based search algorithms such as those commonly known and referred to as BLAST, FASTA, and Smith-Waterman. A local sequence alignment program, e.g. BLAST, can be used to search a database of sequences to find similar sequences, and the summary Expectation value (E-value) used to measure the sequence base similarity. Because a protein hit with the best E-value for a particular organism may not necessarily be an ortholog, e.g., have the same function, or be the only ortholog, a reciprocal query is used to filter hit sequences with significant E-values for ortholog identification. The reciprocal query entails search of the significant hits against a database of amino acid sequences from the base organism that are similar to the sequence of the query protein. A hit can be identified as an ortholog, when the reciprocal query's best hit is the query protein itself or a protein encoded by a duplicated gene after speciation. A further aspect of the homologs encoded by DNA useful in the transgenic plants of the invention are those proteins that differ from a disclosed protein as the result of deletion or insertion of one or more amino acids in a native sequence.

[0043] Other functional homolog proteins differ in one or more amino acids from those of a trait-improving protein disclosed herein as the result of one or more of the well-known conservative amino acid substitutions, e.g., valine is a conservative substitute for alanine and threonine is a conservative substitute for serine. Conservative substitutions for an amino acid within the native sequence can be selected from other members of a class to which the naturally occurring amino acid belongs. Representative amino acids within these various classes include, but are not limited to: (1) acidic (negatively charged) amino acids such as aspartic acid and glutamic acid; (2) basic (positively charged) amino acids such as arginine, histidine, and lysine; (3) neutral polar amino acids such as glycine, serine, threonine, cysteine, tyrosine, asparagine, and glutamine; and (4) neutral nonpolar (hydrophobic) amino acids such as alanine, leucine, isoleucine, valine, proline, phenylalanine, tryptophan, and methionine. Conserved substitutes for an amino acid within a native amino acid sequence can be selected from other members of the group to which the naturally occurring amino acid belongs. For example, a group of amino acids having aliphatic side chains is glycine, alanine, valine, leucine, and isoleucine; a group of amino acids having aliphatic-hydroxyl side chains is serine and threonine; a group of amino acids having amide-containing side chains is asparagine and glutamine; a group of amino acids having aromatic side chains is phenylalanine, tyrosine, and tryptophan; a group of amino acids having basic side chains is lysine, arginine, and histidine; and a group of amino acids having sulfur-containing side chains is cysteine and methionine. Naturally conservative amino acids substitution groups are: valine-leucine, valine-isoleucine, phenylalanine-tyrosine, lysine-arginine, alanine-valine, aspartic acid-glutamic acid, and asparagine-glutamine. A further aspect of the invention includes proteins that differ in one or more amino acids from those of a described protein sequence as the result of deletion or insertion of one or more amino acids in a native sequence.

[0044] Genes that are homologous to each other can be grouped into families and included in multiple sequence alignments. Then a consensus sequence for each group can be derived. This analysis enables the derivation of conserved and class- (family) specific residues or motifs that are functionally important. These conserved residues and motifs can be further validated with 3D protein structure if available. The consensus sequence can be used to define the full scope of the invention, e.g., to identify proteins with a homolog relationship. Thus, the present invention contemplates that protein homologs include proteins with an amino acid sequence that has at least 90% identity to such a consensus amino acid sequence sequences.

[0045] As used herein, “operably linked” refers to the association of two or more nucleic acid elements in a recombinant DNA construct, e.g. as when a promoter is operably linked with DNA that is transcribed to RNA whether for expressing or suppressing a protein. Recombinant DNA constructs can be designed to express a protein which can be an endogenous protein, an exogenous homologue of an endogenous protein or an exogenous protein with no native homologue. Alternatively, recombinant DNA constructs can be designed to suppress the level of an endogenous protein, e.g. by suppression of the native gene. Such gene suppression can be effectively employed through a native RNA interference (RNAi) mechanism in which recombinant DNA comprises both sense and anti-sense oriented DNA matched to the gene targeted for suppression where the recombinant DNA is transcribed into RNA that can form a double-strand to initiate an RNAi mechanism. Gene suppression can also be effected by recombinant DNA that comprises anti-sense oriented DNA matched to the gene targeted for suppression. Gene suppression can also be effected by recombinant DNA that comprises DNA that is transcribed to a microRNA matched to the gene targeted for suppression. In the examples illustrating the invention recombinant DNA for effecting gene suppression that imparts is identified by the term “antisense”. It will be understood by a person of ordinary skill in the art that any of the ways of effecting gene suppression are contemplated and enabled by a showing of one approach to gene suppression.

[0046] As used herein, “percent identity” means the extent to which two optimally aligned DNA or protein segments are invariant throughout a window of alignment of components, for example nucleotide sequence or amino acid sequence. An “identity fraction” for aligned segments of a test sequence and a reference sequence is the number of identical components that are shared by sequences of the two aligned segments divided by the total number of sequence components in the reference segment over a window of alignment which is the smaller of the full test sequence or the full reference sequence. “Percent identity” (“% identity”) is the identity fraction times 100. Such optimal alignment is understood to be deemed as local alignment of DNA sequences. For protein alignment, a local alignment of protein sequences should allow introduction of gaps to achieve optimal alignment. Percent identity is calculated over the aligned length not including the gaps introduced by the alignment per se.

[0047] As used herein, a “plant by-product” includes any product that is made from a plant or plant product, for example, by dehulling, crushing, milling, extraction, hydrogenation, and other processes. A plant by-products in accordance with the invention, therefore, will include such as, for example, dehulled soybeans, crushed corn, soybean meal, soy milk, paper made from corn stalks, and a wide range of other useful products of processing based on plant vitamins, minerals, lipids, proteins and carbohydrates and their constituents that can be characterized as being produced from crops or terminal crops in accordance with the invention.

[0048] As used herein, a “plant cell” means a plant cell that is transformed with stably-integrated, recombinant DNA, e.g. by Agrobacterium-mediated transformation or by bombardment using microparticles coated with recombinant DNA or other means. A plant cell of this invention can be an originally-transformed plant cell that exists as a microorganism or as a progeny plant cell that is regenerated into differentiated tissue, e.g. into a transgenic plant with stably-integrated, non-natural recombinant DNA, or seed or pollen derived from a progeny transgenic plant.

[0049] As used herein, the term “polypeptide” or “polypeptide molecule” means a chain of amino acids. Polypeptide is also commonly referred as “protein”.

[0050] As used herein, “polyadenylated ribonucleotides” refers to the series of adenosines at the 3′ end of a polyribonucleotide commonly referred to as a “poly-A tail”.

[0051] As used herein, “recombinant DNA” means DNA which has been a genetically engineered and constructed outside of a cell including DNA containing naturally occurring DNA or cDNA or synthetic DNA.

[0052] As used herein, the term “structural nucleic acid molecule” refers to a molecule having sequence that encodes a protein, functional peptide fragment, or any other molecule that has biological activity (including, but not limited to, mRNA and bioactive RNA molecules, including antisense RNA).

[0053] As used herein, the term “substantially purified nucleic acid” or polypeptide means nucleic acid or protein separated from substantially all other molecules normally associated with it in its native state. A substantially purified nucleic acid can be greater than about 60% free from the other molecules (exclusive of solvent) present in the natural mixture. The term “substantially purified” is not intended to encompass molecules present in their native state.

[0054] “Pfam” database is a large collection of multiple sequence alignments and hidden Markov models covering many common protein families, e.g. Pfam version 19.0 (December 2005) contains alignments and models for 8183 protein families and is based on the Swissprot 47.0 and SP-TrEMBL 30.0 protein sequence databases. See S. R. Eddy, “Profile Hidden Markov Models”, Bioinformatics 14:755-763, 1998. The Pfam database is currently maintained and updated by the Pfam Consortium. The alignments represent some evolutionary conserved structure that has implications for the protein's function. Profile hidden Markov models (profile HMMs) built from the protein family alignments are useful for automatically recognizing that a new protein belongs to an existing protein family even if the homology by alignment appears to be low.

[0055] “Transcript profiling” or “gene expression profiling” refers to a method where the expression of many genes is monitored in parallel using a microarray. Gene sequences, usually in the form of cDNA sequences or EST (Expressed Sequence Tag) sequences, or oligonucleotide probe sequences (typically 25 nucleotides in length for microarrays) can be designed to be complementary to the expressed mRNA and are immobilized on either glass or nylon membranes (Schena, et al. Science 270: 467-470, 1995; Drmanac, et al., Genomics 37: 29-40, 1996). Labeled total RNA or mRNA isolated from a particular tissue or tissues are used to hybridize with the immobilized cDNA or oligonucleotides probes. Because a large number of cDNAs or DNA probes or probesets can be immobilized on the arrays, the hybridization allows for the determination of parallel gene expression studies (Ramsay, Nature Biotechnology 16 (1) 40-44, 1998). The identification of tissue specific genes can be accomplished by hybridization to the microarray of mRNAs that have been isolated from a specific library or libraries (Ruan, et al., The Plant Journal 15 (6): 821-833, 1998). Analysis of the results can uncover genes that are highly expressed in the desired tissue but are not detected or detected at low levels in undesired tissues. The term “gene” refers to chromosomal DNA, plasmid DNA, cDNA, synthetic DNA, or other DNA that encodes a peptide, polypeptide, protein, or RNA molecule, and regions flanking the coding sequence involved in the regulation of expression. Some genes can be transcribed into mRNA and translated into polypeptides (structural genes); other genes can be transcribed into RNA (e.g., rRNA, tRNA); and other types of genes function as regulators of expression (regulator genes).

[0056] Nucleic acid hybridization is a technique well known to those of skill in the art of DNA manipulation. The hybridization properties of a given pair of nucleic acids are an indication of their similarity or identity and can be under low or high stringency conditions. Non-limiting example include selecting nucleic acid sequences with lower sequence identities to a target nucleic acid sequence with low stringency conditions. High stringency conditions can be used to select for nucleic acid sequences with higher degrees of identity to the disclosed nucleic acid sequences.

[0057] As used herein, an “ESTs” or “Expressed Sequence Tags” are sequences of selected clones from a cDNA (or complementary DNA) library that are representative of the cDNA inserts of these selected clones (McCombie et al., Nature Genetics, 1: 124, 1992; Kurata et al., Nature Genetics, 8: 365, 1994; Okubo et al., Nature Genetics, 2: 173, 1992).

[0058] As used herein, “probe” or “probes” can be 10, 11, 12, 13, 14, 15, 16, 17, 18, 19, 20, 21, 22, 23, 24, 25, 26, 27, 28, 29, 30 nucleotides or longer that are fragments of an EST template sequence. An example of the EST template, or target sequence can be found in the sequence listing e.g., in SEQ ID NO:1-8104. Approximately 10-16 unique probes can typically be created for each given template sequence. In some embodiments, 10, 11, 12, 13, 14, 15, 16, 17, 18, 19 or 20 unique probes can be created for each given template sequence. Each probe may or may not have sequence overlap with one another.

[0059] As used herein, “probeset” is a collection of unique probes from a given template sequence, e.g., nucleic acid sequences denoted in SEQ ID NO:14404-22507.

[0060] A fragment of a nucleic acid as used herein is a portion of the nucleic acid that is less than full-length. For example, for the present invention any length of nucleotide sequence that is less than the disclosed nucleotide sequences of SEQ ID NOs: 1-8104 is considered to be a fragment, e.g., as disclosed in SEQ ID NO:14404-22507. A fragment can also comprise at least a minimum length capable of hybridizing specifically with a native nucleic acid under stringent hybridization—conditions as defined above. The length of such a minimal fragment can be at least 8 nucleotides, at least 10 nucleotides, at least 15 nucleotides, at least 20 nucleotides, at least 25 nucleotides, or at least 30 nucleotides or more of a native nucleic acid sequence.

[0061] As used herein, the term “abiotic stress” or “abiotic stress condition” refers to the exposure of a plant, plant cell, or the like, to a non-living (“abiotic”) physical or chemical agent or condition that has an adverse effect on metabolism, growth, development, propagation and/or survival of the plant (collectively “growth”). An abiotic stress can be imposed on a plant due, for example, to an environmental factor such as water (e.g., flooding, drought, dehydration), anaerobic conditions (e.g., a low level of oxygen), abnormal osmotic conditions, salinity or temperature (e.g., hot/heat, cold, freezing, frost), a deficiency of nutrients or exposure to pollutants, or by a hormone, second messenger or other molecule. Anaerobic stress, for example, is due to a reduction in oxygen levels (hypoxia or anoxia) sufficient to produce a stress response. A flooding stress can be due to prolonged or transient immersion of a plant, plant part, tissue or isolated cell in a liquid medium such as occurs during monsoon, wet season, flash flooding or excessive irrigation of plants, or the like. A cold stress or heat stress can occur due to a decrease or increase, respectively, in the temperature from the optimum range of growth temperatures for a particular plant species. Such optimum growth temperature ranges are readily determined or known to those skilled in the art. Dehydration stress can be induced by the loss of water, reduced turgor, or reduced water content of a cell, tissue, organ or whole plant. Drought stress can be induced by or associated with the deprivation of water or reduced supply of water to a cell, tissue, organ or organism. Saline stress (salt stress) can be associated with or induced by a perturbation in the osmotic potential of the intracellular or extracellular environment of a cell. Osmotic stress also can be associated with or induced by a change, for example, in the concentration of molecules in the intracellular or extracellular environment of a plant cell, particularly where the molecules cannot be partitioned across the plant cell membrane.

[0062] The modulation of protein in transgenic plant cells (hereafter generally referred to as the “target protein”) can be achieved by a variety of approaches involving the use of recombinant DNA constructs. Examples of such recombinant DNA constructs include recombinant DNA constructs that produce messenger RNA for the target protein where native miRNA recognition sites in the mRNA for the target protein are modified or deleted, recombinant DNA constructs that produce an RNA gene suppression element such as a miRNA or a dsRNA comprising sense and anti-sense sequences from the gene encoding the target protein, recombinant DNA constructs that produce a transacting short interfering RNA (ta-siRNA) and recombinant DNA constructs that produce a miRNA element such as a decoy miRNA that is a target for native miRNA or RNA that sequesters target messenger RNA away from native miRNA.

[0063] Small RNAs that regulate protein expression include miRNAs and ta-siRNAs. A miRNA is a small (typically about 21 nucleotide) RNA that has the ability to modulate the expression of a target gene by binding to messenger RNA for the target protein leading to destabilization of the target protein messenger RNA or translational inhibition of the target protein messenger RNA, ultimately resulting in reduction of the target protein. The design and construction of ta-siRNA constructs and their use in the modulation of protein in transgenic plant cells is disclosed by Allen and Carrington in US Patent Application Publication US 2006/0174380 A1 which is incorporated herein by reference. The expression or suppression of such small RNAs are aspects of the invention that are conveniently illustrated by reference to use of miRNAs.

[0064] Recombinant DNA constructs can be used to modify the activity of native miRNAs by a variety of means. By increasing the expression of a miRNA, e.g. temporally or spatially, the modulation of expression of a native target gene can be enhanced. An alternative gene suppression approach for suppressing the expression of a target protein can include the use of a recombinant DNA construct that produces a synthetic miRNA that is designed to bind to a native or synthetic miRNA recognition site on messenger RNA for the target protein.

[0065] By reducing the expression of a miRNA, the modulation of a native target gene can be diminished resulting in enhanced expression of the target protein. More specifically, the expression of a target protein can be enhanced by suppression of the activity of the miRNA that binds to a recognition site in the messenger RNA that is transcribed from the native gene for the target protein. Several types of recombinant DNA constructs can be designed to suppress the activity of a miRNA.

[0066] For example, a recombinant DNA construct that produces an abundance of RNA with the miRNA recognition site can be used as a decoy for the native miRNA allowing endogenous messenger RNA with the miRNA recognition site to be translated to the target protein without interference from native miRNA. A recombinant DNA construct that produces RNA with a modified miRNA recognition site, e.g. with nucleotides at positions 10 and/or 11 in a 21mer miRNA recognition site which are unpaired with respect to the native miRNA, can be used to sequester natively expressed miRNA thereby reducing the cleavage that normally occurs when miRNA binds to a recognition site. The unpaired nucleotides can be produced e.g. through additional nucleotides between positions 10 and 11 or through substitutions of the nucleotides at positions 10 and 11.

[0067] Additionally, a recombinant DNA construct can be created that produces RNA that can be processed in plants into synthetic small RNA (miRNA-like) that can bind endogenous miRNA recognition sites but is unable to induce cleavage of mRNA because the small RNA is modified, for instance by having a modified nucleotide at positions 10 and/or 11 or a deletion that produces a bulge between positions 10 and 11 when the small RNA is paired with the miRNA recognition site. The resulting synthetic small RNA, a cleavage blocker, can reduce endogenous miRNA binding and thus block cleavage of a protected miRNA target site enhancing the expression of a target protein.

[0068] A recombinant DNA construct designed for producing a modified messenger RNA for the protein where the native miRNA recognition site is modified to be resistant to the binding of cognate miRNA which regulates the native gene can also be used to express protein from heterologous messenger RNA that is no longer modulated by the native miRNA.

[0069] The activity of a miRNA which down-regulates an endogenous protein is enhanced by enhancing the expression of the miRNA or by enhancing the ability of the miRNA to bind an RNA encoding the target protein. A recombinant DNA encoding an RNA encoding the miRNA or a miRNA-sensitive messenger RNA encoding the protein in which a miRNA binding site is added are designed to enhance miRNA activity resulting in enhanced suppression of the target mRNA and cognate protein. Recombinant DNA encoding an RNA encoding a miRNA, or a miRNA-sensitive RNA are designed using methods disclosed in US Patent Application Publication US 2009/0070898 A1.

[0070] Some, if not many, miRNAs modulate the expression of multiple proteins or biochemical pathways. Transgenic plants can be provided with enhanced traits not so much from the suppression or enhancement of the expression of a particular protein, as from change of enzyme activity in a pathway by modulating the level of a miRNA. Thus, aspects of this invention are achieved by enhanced miRNA activity resulting from use in transgenic plant cells of recombinant DNA constructs that produce an enhanced level of a miRNA. Other aspects of this invention are achieved by reduced miRNA activity resulting from use in transgenic plant cells of recombinant DNA constructs that produce a reduced level or activity of a miRNA.

### Recombinant DNA Constructs

[0071] Recombinant DNA constructs are assembled using methods well known to persons of ordinary skill in the art and typically comprise a promoter operably linked to DNA, the expression of which provides the enhanced agronomic trait. Other construct components can include additional regulatory elements, such as 5′ leaders and introns for enhancing transcription, 3′ untranslated regions (such as polyadenylation signals and sites), DNA for transit or signal peptides.

[0072] Numerous promoters that are active in plant cells have been described in the literature. These include promoters present in plant genomes as well as promoters from other sources, including nopaline synthase (NOS) promoter and octopine synthase (OCS) promoters carried on tumor-inducing plasmids of Agrobacterium tumefaciens and the CaMV35S promoters from the cauliflower mosaic virus as disclosed in U.S. Pat. Nos. 5,164,316 and 5,322,938. Useful promoters derived from plant genes are found in U.S. Pat. No. 5,641,876 which discloses a rice actin promoter, U.S. Pat. No. 7,151,204 which discloses a maize chloroplast aldolase promoter and a maize aldolase (FDA) promoter, and US Patent Application Publication 2003/0131377 A1 which discloses a maize nicotianamine synthase promoter. These and numerous other promoters that function in plant cells are known to those skilled in the art and available for use in recombinant polynucleotides of the present invention to provide for expression of desired genes in transgenic plant cells.

[0073] Furthermore, the promoters can be altered to contain multiple “enhancer sequences” to assist in elevating gene expression. Such enhancers are known in the art. By including an enhancer sequence with such constructs, the expression of the selected protein can be enhanced. These enhancers often are found 5′ to the start of transcription in a promoter that functions in eukaryotic cells, but can often be inserted upstream (5′) or downstream (3′) to the coding sequence. In some instances, these 5′ enhancing elements are introns. Particularly useful as enhancers are the 5′ introns of the rice actin 1 (see U.S. Pat. No. 5,641,876) and rice actin 2 genes, the maize alcohol dehydrogenase gene intron, the maize heat shock protein 70 gene intron (U.S. Pat. No. 5,593,874) and the maize shrunken 1 gene. See also US Patent Application Publication 2002/0192813A1 which discloses 5′, 3′ and intron elements useful in the design of effective plant expression vectors.

[0074] In other aspects of the invention, sufficient expression in plant seed tissues is desired to affect improvements in seed composition. Exemplary promoters for use for seed composition modification include promoters from seed genes such as napin as disclosed in U.S. Pat. No. 5,420,034, maize L3 oleosin as disclosed in U.S. Pat. No. 6,433,252), zein Z27 as disclosed by Russell et al. (1997) Transgenic Res. 6(2):157-166), globulin 1 as disclosed by Belanger et al (1991) Genetics 129:863-872), glutelin 1 as disclosed by Russell (1997) supra), and peroxiredoxin antioxidant (Per1) as disclosed by Stacy et al. (1996) Plant Mol Biol. 31(6):1205-1216.

[0075] Recombinant DNA constructs in this invention will generally include a 3′ element that typically contains a polyadenylation signal and site. Well-known 3′ elements include those from Agrobacterium tumefaciens genes such as nos 3′, tml 3′, tmr 3′, tms 3′, ocs 3′, tr7 3′, for example disclosed in U.S. Pat. No. 6,090,627; 3′ elements from plant genes such as wheat (Triticum aesevitum) heat shock protein 17 (Hsp17 3′), a wheat ubiquitin gene, a wheat fructose-1,6-biphosphatase gene, a rice glutelin gene, a rice lactate dehydrogenase gene and a rice beta-tubulin gene, all of which are disclosed in US Patent Application Publication Number 2002/0192813 A1; and the pea (Pisum sativum) ribulose biphosphate carboxylase gene (rbs 3′), and 3′ elements from the genes within the host plant.

[0076] Constructs and vectors can also include a transit peptide for targeting of a gene to a plant organelle, particularly to a chloroplast, leucoplast or other plastid organelle. For descriptions of the use of chloroplast transit peptides see U.S. Pat. No. 5,188,642 and U.S. Pat. No. 5,728,925. For description of the transit peptide region of an Arabidopsis EPSPS gene useful in the present invention, see Klee, H. J. et al (MGG (1987) 210:437-442).

[0077] Recombinant DNA constructs for gene suppression can be designed for any of a number the well-known methods for suppressing transcription of a gene, the accumulation of the mRNA corresponding to that gene or preventing translation of the transcript into protein. Posttranscriptional gene suppression can be practically effected by transcription of RNA that forms double-stranded RNA (dsRNA) having homology to mRNA produced from a gene targeted for suppression.

[0078] Gene suppression can also be achieved by insertion mutations created by transposable elements can also prevent gene function. For example, in many dicot plants, transformation with the T-DNA of Agrobacterium can be readily achieved and large numbers of transformants can be rapidly obtained. Also, some species have lines with active transposable elements that can efficiently be used for the generation of large numbers of insertion mutations, while some other species lack such options. Mutant plants produced by Agrobacterium or transposon mutagenesis and having altered expression of a polypeptide of interest can be identified using the polynucleotides of the present invention. For example, a large population of mutated plants can be screened with polynucleotides encoding the polypeptide of interest to detect mutated plants having an insertion in the gene encoding the polypeptide of interest.

[0079] Transgenic plants comprising or derived from plant cells of this invention transformed with recombinant DNA can be further enhanced with stacked traits, e.g. a crop plant having an enhanced trait resulting from expression of DNA disclosed herein in combination with other enhanced traits with various degree or amount of enhancement including, but not limited to enhanced water use efficiency, enhanced cold tolerance, increased yield, enhanced nitrogen use efficiency, enhanced seed protein and enhanced seed oil herbicide pest resistance traits, or any combinations thereof. For example, genes of the current invention can be stacked with other traits of agronomic interest, such as a trait providing herbicide resistance, or insect resistance, such as using a gene from Bacillus thuringensis to provide resistance against lepidopteran, coliopteran, homopteran, hemiopteran, and other insects. Herbicides for which transgenic plant tolerance has been demonstrated and the method of the present invention can be applied include, but are not limited to, glyphosate, dicamba, glufosinate, sulfonylurea, bromoxynil and norflurazon herbicides. Polynucleotide molecules encoding proteins involved in herbicide tolerance are well-known in the art and include, but are not limited to, a polynucleotide molecule encoding 5-enolpyruvylshikimate-3-phosphate synthase (EPSPS) disclosed in U.S. Pat. No. 5,094,945; 5,627,061; 5,633,435 and 6,040,497 for imparting glyphosate tolerance; polynucleotide molecules encoding a glyphosate oxidoreductase (GOX) disclosed in U.S. Pat. No. 5,463,175 and a glyphosate-N-acetyl transferase (GAT) disclosed in U.S. Patent Application Publication Number 2003/0083480 A1 also for imparting glyphosate tolerance; dicamba monooxygenase disclosed in U.S. Patent Application Publication Number 2003/0135879 A1 for imparting dicamba tolerance; a polynucleotide molecule encoding bromoxynil nitrilase (Bxn) disclosed in U.S. Pat. No. 4,810,648 for imparting bromoxynil tolerance; a polynucleotide molecule encoding phytoene desaturase (crtl) described in Misawa et al, (1993) Plant J. 4:833-840 and in Misawa et al, (1994) Plant J. 6:481-489 for norflurazon tolerance; a polynucleotide molecule encoding acetohydroxyacid synthase (AHAS, aka ALS) described in Sathasiivan et al. (1990) Nucl. Acids Res. 18:2188-2193 for imparting tolerance to sulfonylurea herbicides; polynucleotide molecules known as bar genes disclosed in DeBlock, et al. (1987) EMBO J. 6:2513-2519 for imparting glufosinate and bialaphos tolerance; polynucleotide molecules disclosed in U.S. Patent Application Publication Number 2003/010609 A1 for imparting N-amino methyl phosphonic acid tolerance; polynucleotide molecules disclosed in U.S. Pat. No. 6,107,549 for imparting pyridine herbicide resistance; molecules and methods for imparting tolerance to multiple herbicides such as glyphosate, atrazine, ALS inhibitors, isoxoflutole and glufosinate herbicides are disclosed in U.S. Pat. No. 6,376,754 and U.S. Patent Application Publication Number 2002/0112260. Molecules and methods for imparting insect/nematode/virus resistance are disclosed in U.S. Pat. Nos. 5,250,515; 5,880,275; 6,506,599; 5,986,175 and U.S. Patent Application Publication Number 2003/0150017 A1, each are herein incorporated by reference.

[0080] Another embodiment of the present invention provides methods for delivering transgenic crop plants comprising two or more genetic factors giving enhanced traits using haploid breeding approaches. One goal of transgenic trait integration is to deliver one or more transgenic traits to a inbred and the typical backcross process involved multiple generations with selection at each generation for the one or more transgenic traits coupled with selection for the elite inbred, referred to as the recurrent parent. As product concepts move to transgenic trait stacks, comprising two or more transgenic traits, the trait integration process becomes exponentially more complicated because an increasing number of progeny must be screened in order to recover progeny with both the transgenic traits and, as relevant, desired percent of the recurrent parent genome (i.e., 95% recurrent parent) and minimized percent of the donor parent genome (i.e., reduce linkage drag). The methods included herein provide an advantage over the art by reducing the time required to deliver a stacked transgenic trait hybrid to market as well as providing the potential for reducing the number of plots needed to generate an elite crop plant comprising two or more transgenic traits. These methods can be applied at any point in a breeding program, wherein the “recurrent” parent can be segregating. In other aspects, the recurrent parent comprises one or more genetic factors. Further, depending on the degree of segregating in the starting material, sister line generation can occur in parallel to trait integration. Examples of stacking two or more genetic factors using a haploid approach can be seen in U.S. Patent Application Publication Number 20090070891 and is herein incorporated by reference in its entirety.

[0081] Embodiments of the invention provide molecules of that include “fragments” of the disclosed recombinant DNA molecules; including oligonucleotides of at least 15, at least 16 or 17, at least 18 or 19, and at least 20, 21, 22, 23, 24, 25, 26, 27, 28, 29, 30, 31, 32, 33, 34, 35, 36, 37, 38, 39, 40, 41, 42, 43, 44, 45, 46, 47, 48, 49, 50 or more, consecutive nucleotides of any of the sequences provided. Such oligonucleotides are fragments of the larger molecules having a sequence selected from the group consisting of SEQ ID NO: 1 through SEQ ID NO: 8104, or SEQ ID NO: 14404-22507 and use, for example as probes and primers for detection of the polynucleotides of the present invention.

[0082] Aspects of the various embodiments of the invention also provide for nucleic acid fragments of SEQ ID NO: 1 through SEQ ID NO: 8104 that are at least about 50, 75, 100, 125, 150, 175, 200, 225, 250, 275, 300, 325, 350, 375, 400, 425, 450, 475, or 500 or more nucleotides in length. Non-limiting example include SEQ ID NO:14404-22507, where each nucleic acid sequence can be used as a probeset of corresponding SEQ ID NO:1-8104. Some aspects of these embodiments provide for nucleic acid molecules that encode functional fragments of any of the polypeptide sequences provided in SEQ ID NO: 8105 to SEQ ID NO: 14403.

[0083] Other embodiments of the present invention provide for one or more isolated (where isolated means occurring in its non-native environment) polypeptides having at least about 10 contiguous peptide residues of one or more of the peptide sequences provided in SEQ ID NO: 8105 to SEQ ID NO: 14403. In other aspects of these embodiment, the polypeptide(s) comprises at least about 15, 20, 25, 30, 35, 40, 45, 50, 55, 60, 65, 70, 75, 80, 85, 90, 95, or 100 or more contiguous peptide residues from one or more of the sequences provided in SEQ ID NO: 8105 to SEQ ID NO: 14403. In particularly aspects, these embodiments the poly peptide includes a functional fragment (e.g., pfam annotation) of one or more of the polypeptides provided in the Sequence Listing.

[0084] Other aspects of the various embodiments of the invention includes, transgenic plants, transgenic plant seeds, transgenic crops, plant products and byproducts having any of the nucleic acid or protein fragments described above. The invention also provides for various methods that use such fragments.

[0085] Embodiments of the present invention also contemplate that the trait-improving recombinant DNA provided herein can be used in combination with other recombinant DNA to create plants with multiple desired traits or a further enhanced trait. The combinations generated can include multiple copies of any one or more of the recombinant DNA constructs. These stacked combinations can be created by any method, including but not limited to cross breeding of transgenic plants, or multiple genetic transformation.

[0086] DNA vectors containing gene(s) of interest or fragments of genes disclosed in the sequence listing can be delivered into plant cells via one of the several methods known to those skilled in the art, including but not limited to protoplast transformation, biolistic bombardment and Agrobacterium-mediated transformation. The delivered DNA can be integrated randomly into a plant genome or can also be present as part of the independently segregating genetic units such as artificial chromosome or mini-chromosome. One aspect of this embodiment, the construct further comprises regulatory sequences, including, for example, a promoter, operably linked to the sequence.

### Plant Cell Transformation Methods

[0087] Numerous methods for transforming chromosomes in a plant cell nucleus with recombinant DNA are known in the art and are used in methods of preparing a transgenic plant cell nucleus cell, and plant. Two effective methods for such transformation are Agrobacterium-mediated transformation and microprojectile bombardment. Microprojectile bombardment methods are illustrated in U.S. Pat. Nos. 5,015,580 (soybean); 5,550,318 (corn); 5,538,880 (corn); 5,914,451 (soybean); 6,160,208 (corn); 6,399,861 (corn); 6,153,812 (wheat) and 6,365,807 (rice) and Agrobacterium-mediated transformation is described in U.S. Pat. Nos. 5,159,135 (cotton); 5,824,877 (soybean); 5,463,174 (canola); 5,591,616 (corn); 5,846,797 (cotton); 6,384,301 (soybean), 7,026,528 (wheat) and 6,329,571 (rice), US Patent Application Publication 2004/0087030 A1 (cotton), and US Patent Application Publication 2001/0042257 A1 (sugar beet), all of which are incorporated herein by reference for enabling the production of transgenic plants. Transformation of plant material is practiced in tissue culture on a nutrient media, e.g., a mixture of nutrients that will allow cells to grow in vitro. Recipient cell targets include, but are not limited to, meristem cells, hypocotyls, calli, immature embryos and gametic cells such as microspores, pollen, sperm and egg cells. Callus can be initiated from tissue sources including, but not limited to, immature embryos, hypocotyls, seedling apical meristems, microspores and the like. Cells containing a transgenic nucleus are grown into transgenic plants.

[0088] In addition to direct transformation of a plant material with a recombinant DNA, a transgenic plant cell nucleus can be prepared by crossing a first plant having cells with a transgenic nucleus with recombinant DNA with a second plant lacking the transgenic nucleus. For example, recombinant DNA can be introduced into a nucleus from a first plant line that is amenable to transformation to transgenic nucleus in cells that are grown into a transgenic plant which can be crossed with a second plant line to introgress the recombinant DNA into the second plant line. A transgenic plant with recombinant DNA providing an enhanced trait, e.g. enhanced yield, can be crossed with transgenic plant line having other recombinant DNA that confers another trait, for example herbicide resistance or pest resistance, to produce progeny plants having recombinant DNA that confers both traits. Typically, in such breeding for combining traits the transgenic plant donating the additional trait is a male line and the transgenic plant carrying the base traits is the female line. The progeny of this cross will segregate such that some of the plants will carry the DNA for both parental traits and some will carry DNA for one parental trait; such plants can be identified by markers associated with parental recombinant DNA, e.g. marker identification by analysis for recombinant DNA or, in the case where a selectable marker is linked to the recombinant, by application of the selecting agent such as a herbicide for use with a herbicide tolerance marker, or by selection for the enhanced trait. Progeny plants carrying DNA for both parental traits can be crossed back into the female parent line multiple times, for example usually 6 to 8 generations, to produce a progeny plant with substantially the same genotype as one original transgenic parental line but for the recombinant DNA of the other transgenic parental line.

[0089] In certain embodiments of the invention the recombinant DNA insertion is “targeted” in order to achieve site-specific integration, for example to replace an existing gene in the genome, to use an existing promoter in the plant genome, or to insert a recombinant polynucleotide at a predetermined site known to be active for gene expression. Several site specific recombination systems exist which are known to function implants include cre-lox as disclosed in U.S. Pat. No. 4,959,317 and FLP-FRT as disclosed in U.S. Pat. No. 5,527,695, both incorporated herein by reference.

[0090] Transformation methods of this invention can be practiced in tissue culture on media and in a controlled environment. “Media” refers to the numerous nutrient mixtures that are used to grow cells in vitro, that is, outside of the intact living organism. Recipient cell targets include, but are not limited to, meristem cells, callus, immature embryos and gametic cells such as microspores, pollen, sperm and egg cells. It is contemplated that any cell from which a fertile plant can be regenerated is useful as a recipient cell. Callus can be initiated from tissue sources including, but not limited to, immature embryos, seedling apical meristems, microspores and the like. Cells capable of proliferating as callus are also recipient cells for genetic transformation. Practical transformation methods and materials for making transgenic plants of this invention, for example, various media and recipient target cells, transformation of immature embryo cells and subsequent regeneration of fertile transgenic plants are disclosed in U.S. Pat. Nos. 6,194,636 and 6,232,526, which are incorporated herein by reference.

[0091] The seeds of transgenic plants can be harvested from fertile transgenic plants and be used to grow progeny generations of transformed plants of this invention including hybrid plants line for selection of plants having an enhanced trait. In addition to direct transformation of a plant with a recombinant DNA, transgenic plants can be prepared by crossing a first plant having a recombinant DNA with a second plant lacking the DNA. For example, recombinant DNA can be introduced into first plant line that is amenable to transformation to produce a transgenic plant which can be crossed with a second plant line to introgress the recombinant DNA into the second plant line. A transgenic plant with recombinant DNA providing an enhanced trait, e.g. enhanced yield, can be crossed with transgenic plant line having other recombinant DNA that confers another trait, for example herbicide resistance or pest resistance, to produce progeny plants having recombinant DNA that confers both traits. Typically, in such breeding for combining traits the transgenic plant donating the additional trait is a male line and the transgenic plant carrying the base traits is the female line. The progeny of this cross will segregate such that some of the plants will carry the DNA for both parental traits and some will carry DNA for one parental trait; such plants can be identified by markers associated with parental recombinant DNA, e.g. marker identification by analysis for recombinant DNA or, in the case where a selectable marker is linked to the recombinant, by application of the selecting agent such as a herbicide for use with a herbicide tolerance marker, or by selection for the enhanced trait. Progeny plants carrying DNA for both parental traits can be crossed back into the female parent line multiple times, for example usually 6 to 8 generations, to produce a progeny plant with substantially the same genotype as one original transgenic parental line but for the recombinant DNA of the other transgenic parental line.

[0092] Descriptions of commonly used breeding terms such as “crossing”, “hybrids” and methods for crossing and producing hybrid that are used to describe present invention can be found in one of several reference books (Allard, “Principles of Plant Breeding,” John Wiley & Sons, NY, U. of CA, Davis, Calif., 50-98, 1960; Simmonds, “Principles of crop improvement,” Longman, Inc., NY, 369-399, 1979; Sneep and Hendriksen, “Plant breeding perspectives,” Wageningen (ed), Center for Agricultural Publishing and Documentation, 1979; Fehr, In: Soybeans: Improvement, Production and Uses, 2nd Edition, Monograph., 16:249, 1987; Fehr, “Principles of variety development,” Theory and Technique, (Vol. 1) and Crop Species Soybean (Vol. 2), Iowa State Univ., Macmillan Pub. Co., NY, 360-376, 1987).

[0093] In some embodiments of the invention, during transformation, DNA is introduced into only a small percentage of target plant cells in any one transformation. Marker genes are used to provide an efficient system for identification of those cells that are stably transformed by receiving and integrating a transgenic DNA construct into their genomes. Marker genes provide selective markers which confer resistance to a selective agent, such as an antibiotic or herbicide. Any of the herbicides to which plants of this invention can be resistant are useful agents for selective markers. Potentially transformed cells are exposed to the selective agent. In the population of surviving cells will be those cells where, generally, the resistance-conferring gene is integrated and expressed at sufficient levels to permit cell survival. Cells can be tested further to confirm stable integration of the exogenous DNA. Commonly used selective marker genes include those conferring resistance to antibiotics such as kanamycin and paromomycin (nptII), hygromycin B (aph IV) and gentamycin (aac3 and aacC4) or resistance to herbicides such as glufosinate (bar or pat) and glyphosate (aroA or EPSPS). Examples of such selectable are illustrated in U.S. Pat. Nos. 5,550,318; 5,633,435; 5,780,708 and 6,118,047, all of which are incorporated herein by reference. Selectable markers which provide an ability to visually identify transformants can also be employed, for example, a gene expressing a colored or fluorescent protein such as a luciferase or green fluorescent protein (GFP) or a gene expressing a beta glucuronidase or uidA gene (GUS) for which various chromogenic substrates are known.

[0094] Plant cells that survive exposure to the selective agent, or plant cells that have been scored positive in a screening assay, can be cultured in regeneration media and allowed to mature into plants. Developing plantlets regenerated from transformed plant cells can be transferred to plant growth mix, and hardened off, for example, in an environmentally controlled chamber at about 85% relative humidity, 600 ppm CO₂, and 25-250 microeinsteins m⁻²s⁻¹ of light, prior to transfer to a greenhouse or growth chamber for maturation. Plants are regenerated from about 6 weeks to 10 months after a transformant is identified, depending on the initial tissue. Plants can be pollinated using conventional plant breeding methods known to those of skill in the art and seed produced. The regenerated transformed plant or its progeny seed or plants can be tested for expression of the recombinant DNA and selected for the presence of enhanced agronomic trait.

[0095] Progeny can be recovered from transformed plants and tested for expression of the exogenous recombinant polynucleotide. Useful assays include, for example, “molecular biological” assays, such as Southern and Northern blotting and PCR; “biochemical” assays, such as detecting the presence of RNA, e.g., double stranded RNA, or a protein product, e.g., by immunological means (ELISAs and Western blots) or by enzymatic function; plant part assays, such as leaf or root assays; and also, by analyzing the phenotype of the whole regenerated plant.

### Transgenic Plants and Seeds

[0096] Transgenic plants derived from the plant cells of this invention are grown to generate transgenic plants having an enhanced trait as compared to a control plant and produce transgenic seed and haploid pollen of this invention. Such plants with enhanced traits are identified by selection of transformed plants or progeny seed for the enhanced trait. For efficiency a selection method is designed to evaluate multiple transgenic plants (events) including the recombinant DNA, for example multiple plants from 2 to 20 or more transgenic events. Transgenic plants grown from transgenic seed provided herein demonstrate improved agronomic traits that contribute to increased yield or other trait that provides increased plant value, including, for example, improved seed quality. Of particular interest are plants having enhanced water use efficiency, enhanced cold tolerance, increased yield, enhanced nitrogen use efficiency, enhanced seed protein and enhanced seed oil. Transgenic plants of the present invention include, but are not limited to, corn, soybean, cotton, canola, alfalfa, wheat, rice, sugarcane, sugar beet seed, millet, barley, peanut, pigeon pea, sorghum, vegetables (including but not limited to Broccoli, Cauliflower, Cabbage, Radish, Chinese cabbage, Melons, Watermelons, Cucumber, Gourds, Pumpkin, Squash, Pepper, Tomato, Eggplant, Onion, Carrot, Garden Bean, Sweet Corn, Pea, Dry Bean, Okra, Spinach, Leek, Lettuce, and Fennel), grape, berries (including blue, black, raspberry, mullberry, boysenberry. etc), cherry and related fruit trees (including but not limited to plum, peach, apricot, kiwi, pomegranate, mango, fig), fruit trees (including but not limited to orange, lemon, lime, blood orange, grapefruit, and the like), nut trees (including but not limited to coconut, walnut (English and black), pecan, almond, hazelnut, brazil nut, hickory nut, acorn, and the like), sunflower, other oilseed producing plants or any combinations thereof.

Selection Methods for Transgenic Plants with Enhanced Agronomic Trait

[0097] Within a population of transgenic plants each regenerated from a plant cell having a nucleus with recombinant DNA many plants that survive to fertile transgenic plants that produce seeds and progeny plants may not exhibit an enhanced agronomic trait. Selection from such population is necessary to identify one or more transgenic plant cells having a transgenic nucleus that can provide plants with the enhanced trait. Transgenic plants having enhanced traits are selected from populations of plants regenerated or derived from plant cells transformed as described herein by evaluating the plants in a variety of assays to detect an enhanced trait. These assays also can take many forms including, but not limited to, direct screening for the trait in a greenhouse or field trial or by screening for a surrogate trait. Such analyses can be directed to detecting changes in the chemical composition, biomass, physiological properties, morphology of the plant. Changes in chemical compositions such as nutritional composition of grain can be detected by analysis of the seed composition and content of protein, free amino acids, oil, free fatty acids, starch or tocopherols. Changes in biomass characteristics can be made on greenhouse or field grown plants and can include plant height, stem diameter, root and shoot dry weights; and, for corn plants, ear length and diameter. Changes in physiological properties can be identified by evaluating responses to stress conditions, for example assays using imposed stress conditions such as water deficit, nitrogen deficiency, cold growing conditions, pathogen or insect attack or light deficiency, or increased plant density. Changes in morphology can be measured by visual observation of tendency of a transformed plant with an enhanced agronomic trait to also appear to be a normal plant as compared to changes toward bushy, taller, thicker, narrower leaves, striped leaves, knotted trait, chlorosis, albino, anthocyanin production, or altered tassels, ears or roots. Other selection properties include days to pollen shed, days to silking, leaf extension rate, chlorophyll content, leaf temperature, stand, seedling vigor, internode length, plant height, leaf number, leaf area, tillering, brace roots, stay green, stalk lodging, root lodging, plant health, barreness/prolificacy, green snap, and pest resistance. In addition, phenotypic characteristics of harvested grain can be evaluated, including number of kernels per row on the ear, number of rows of kernels on the ear, kernel abortion, kernel weight, kernel size, kernel density and physical grain quality.

[0098] Assays for screening for a desired trait are readily designed by those practicing in the art. The following illustrates screening assays for corn traits using hybrid corn plants. The assays can be readily adapted for screening other plants such as canola, cotton and soybean either as hybrids or inbreds.

[0099] In certain embodiments of the invention transgenic corn plants having nitrogen use efficiency can be identified by screening in fields with three levels of nitrogen (N) fertilizer being applied, e.g. low level (0 N), medium level (80 lb/ac) and high level (180 lb/ac). Plants with enhanced nitrogen use efficiency provide higher yield as compared to control plants.

[0100] In some embodiments, the present invention discloses transgenic plant exhibiting increased yield under various stress conditions (e.g., drought, heat, limited nitrogen, or any combinations thereof disclosed herein, compare to control plant. For example, transgenic plants of the present invention can exhibit averaged, or similar yield received in the past, but higher yield as compared the control plants under similar stress conditions. The present invention is capable of maintaining yield under stress conditions as compared with plants that do not comprise the genes or miRNA disclosed herein.

[0101] In other embodiments, transgenic corn plants having enhanced yield can be identified by screening using progeny of the transgenic plants over multiple locations with plants grown under optimal production management practices and maximum weed and pest control. A useful target for improved yield is a 5% to 10% increase in yield as compared to yield produced by plants grown from seed for a control plant. Selection methods can be applied in multiple and diverse geographic locations, for example up to 16 or more locations, over one or more planting seasons, for example at least two planting seasons, to statistically distinguish yield improvement from natural environmental effects.

[0102] In other embodiments, transgenic corn plants having enhanced water use efficiency can be identified by screening plants in an assay where water is withheld for a period to induce stress followed by watering to revive the plants. For example, a useful selection process imposes 3 drought/re-water cycles on plants over a total period of 15 days after an initial stress free growth period of 11 days. Each cycle consists of 5 days, with no water being applied for the first four days and a water quenching on the 5th day of the cycle. The primary phenotypes analyzed by the selection method are the changes in plant growth rate as determined by height and biomass during a vegetative drought treatment.

[0103] In other embodiments, transgenic corn plants having enhanced cold tolerance can be identified by screening plants in a cold germination assay and/or a cold tolerance field trial. In a cold germination assay trays of transgenic and control seeds are placed in a growth chamber at 9.7° C. for 24 days (no light). For example, seeds having higher germination rates as compared to the control can be identified as having enhanced cold tolerance. In a cold tolerance field trial plants with enhanced cold tolerance can be identified from field planting at an earlier date than conventional Spring planting for the field location. For example, seeds are planted into the ground around two weeks before local farmers begin to plant corn so that a significant cold stress is exerted onto the crop, named as cold treatment. Seeds can be planted under local optimal planting conditions such that the crop has little or no exposure to cold condition, named as normal treatment. At each location, seeds may be can be planted under both cold and normal conditions preferably with multiple repetitions per treatment.

[0104] In other embodiments, transgenic corn plants having seeds with increased protein and/or oil levels can be identified by analyzing progeny seed for protein and/or oil. Near-infrared transmittance spectrometry is a non-destructive, high-throughput method that is useful to determine the composition of a bulk seed sample for properties listed in table 1.

TABLE 1

| | |
|---|---|
| Typical sample(s): | Whole grain corn and soybean seeds |
| Typical analytical | Corn - moisture 5-15%, oil 5-20%, protein 5-30%, |
| range: | starch 50-75%, and density 1.0-1.3%. |
| | Soybean - moisture 5-15%, oil 15-25%, and |
| | protein 35-50%. |

[0105] Although the plant cells and methods of this invention can be applied to any plant cell, plant, seed or pollen, e.g. any fruit, vegetable, grass, tree or ornamental plant, the various aspects of the invention are preferably applied to corn, soybean, cotton, canola, alfalfa, wheat, rice, sugarcane, and sugar beet plants. In many cases the invention is applied to corn plants that are inherently resistant to disease from the Mal de Rio Cuarto virus or the Puccina sorghi fungus or both.

### Homolog Identification

[0106] In certain embodiment, the present invention also includes identification of homologs of proteins encoded by the DNA identified in the sequence listing which is used to provide transgenic seed and plants having enhanced agronomic traits. From the sequence of the homologs, homologous DNA sequence are identified for preparing additional transgenic seeds and plants of this invention with enhanced agronomic traits.

[0107] An “All Protein Database” are constructed of known protein sequences using a proprietary sequence database and the National Center for Biotechnology Information (NCBI) non-redundant amino acid database (nr.aa). For each organism from which a polynucleotide sequence provided herein can be obtained, an “Organism Protein Database” are constructed of known protein sequences of the organism; it is a subset of the All Protein Database based on the NCBI taxonomy ID for the organism.

[0108] The All Protein Database are queried using amino acid sequences provided herein as SEQ ID NO: 8105 through SEQ ID NO: 14403 using NCBI “blastp” program with E-value cutoff of 1 e⁻⁸. Up to 1000 top hits are kept, and separated by organism names. For each organism other than that of the query sequence, a list is kept for hits from the query organism itself with a more significant E-value than the best hit of the organism. The list contain likely duplicated genes of the polynucleotides provided herein, and is referred to as the Core List. Another list is kept for all the hits from each organism, sorted by E-value, and referred to as the Hit List.

[0109] The Organism Protein Database are queried using polypeptide sequences provided herein as SEQ ID NO: 8105 through SEQ ID NO: 14403 using NCBI “blastp” program with E-value cutoff of 1 e⁻⁴. Up to 1000 top hits are kept. A BLAST searchable database is constructed based on these hits, and are referred to as “SubDB”. SubDB are queried with each sequence in the Hit List using NCBI “blastp” program with E-value cutoff of 1 e⁻⁸. The hit with the best E-value are compared with the Core List from the corresponding organism. The hit is deemed a likely ortholog if it belongs to the Core List, otherwise it is deemed not a likely ortholog and there is no further search of sequences in the Hit List for the same organism. Homologs from a large number of distinct organisms are identified and reported.

[0110] Recombinant DNA constructs can be prepared using the DNA encoding each of the identified homologs and the constructs can be used to prepare multiple events of transgenic corn, soybean, canola, cotton and other transgenic plants mentioned. Plants can be regenerated from the transformed plant cells and used to produce progeny plants and seed that are screened for enhanced water use efficiency, enhanced cold tolerance, increased yield, enhanced nitrogen use efficiency, enhanced seed protein and enhanced seed oil. From each group of multiple events of transgenic plants with a specific recombinant DNA for a homolog the event that produces the greatest enhancement in yield, water use efficiency, nitrogen use efficiency, enhanced cold tolerance, enhanced seed protein and enhanced seed oil is identified and progeny seed can be selected for commercial development.

### Pfam Module Annotation

[0111] The amino acid sequence of the expressed proteins shown to be associated with an enhanced trait are analyzed for Pfam protein family against the current Pfam collection of multiple sequence alignments and hidden Markov models using the HMMER software in the appended computer listing. The Pfam domain modules and individual protein domain for the proteins shown in the sequence listing. The Hidden Markov model databases for the identified patent families are known to a skilled artisan allowing identification of other homologous proteins and their cognate encoding DNA to enable the full breadth of the invention for a person of ordinary skill in the art. Certain proteins are identified by a single Pfam domain and others by multiple Pfam domains.

### Selectable Markers

[0112] The present invention include transgenic plants with and without selectable markers. As used herein the term “marker” refers to any transcribable polynucleotide molecule whose expression, or lack thereof, can be screened for or scored in some way. Marker genes for use in the practice of the present invention include, but are not limited to transcribable polynucleotide molecules encoding B-glucuronidase (GUS described in U.S. Pat. No. 5,599,670, which is incorporated herein by reference), green fluorescent protein and variants thereof (GFP described in U.S. Pat. No. 5,491,084 and U.S. Pat. No. 6,146,826, RFP and the like), proteins that confer antibiotic resistance, or proteins that confer herbicide tolerance. Marker genes in genetically modified plants are generally of two types: genes conferring antibiotic resistance or genes conferring herbicide tolerance. Examples include, but are not limited to antibiotic resistance markers, including those encoding proteins conferring resistance to kanamycin (nptII), hygromycin B (aph IV), streptomycin or spectinomycin (aad, spec/strep) and gentamycin (aac3 and aacC4) are known in the art.

[0113] Included within the term “selectable markers” are also genes which encode a secretable marker whose secretion can be detected as a means of identifying or selecting for transformed cells. Examples include markers that encode a secretable antigen that can be identified by antibody interaction, or even secretable enzymes which can be detected catalytically. Selectable secreted marker proteins fall into a number of classes, including small, diffusible proteins which are detectable, (e.g., by ELISA), small active enzymes which are detectable in extracellular solution (e.g., alpha.-amylase, beta.-lactamase, phosphinothricin transferase), or proteins which are inserted or trapped in the cell wall (such as proteins which include a leader sequence such as that found in the expression unit of extension or tobacco PR-S). Other possible selectable marker genes will be apparent to those of skill in the art.

[0114] The selectable marker is preferably GUS, green fluorescent protein (GFP) or variants thereof, neomycin phosphotransferase II (nptII), luciferase (LUX), an antibiotic resistance protein, or a herbicide (e.g., glyphosate, bromoxynil, and the like) resistance or tolerance protein. The selectable marker is most preferably a kanamycin, hygromycin, or herbicide resistance marker.

### Transcript Profiling

[0115] Technologies for measuring gene expression such as transcript profiling or expression profiling are well known to one skilled in the art. Sequencing-based methods such as the use of expressed sequence tags (ESTs) now include methods based on short tags, such as serial analysis of gene expression (SAGE) and massively parallel signature sequencing (MPSS). These technologies permit the analysis of complex mRNA populations from selected cells or tissues, producing large-scale measurements of gene expression. In addition, gene expression changes observed due to environmental conditions such as biotic and abiotic stresses indicate the identity of encoded gene product plays a role in those processes.

[0116] In some embodiments of the present invention, when annotation for the gene exists, transcriptional profiling allows a biological pathway or process to be inferred, and it provides more insight into how a plant responds at a molecular level to stresses. With this knowledge, one skilled in the art can unravel approaches to mitigating the stress via transgenic technology.

[0117] In one embodiment, because gene expression profiles can be tissue-specific or regulated by time of day, the present invention can provide information and allows one to decide how these genes are expressed in transgenic plants. Furthermore, the promoter and other expression elements for these genes can be used to drive expression of other transgenes in plants.

[0118] In another embodiment, the present invention can be used to detect changes in expression of endogenous genes that occur as the result of ectopic expression of a transgene and gives insight into the mode-of-action of the transgene. This in turn can help reveal transgene optimization strategies. For example, those genes which are affected by over-expression of a transgene can themselves be overexpressed in transgenic plants to attempt to obtain a similar (or better) transgenic response.

[0119] In one embodiment, the sequences of the present invention provide sequences to be situated on the microarray and can be used to identify variants of the gene across different lines of the same plant species. For example, single feature polymorphisms (SFPs) occur when a variant of a specific gene hybridizes only partially to its homologue on the microarray. By statistical methods, one skilled in the art can identify 25-mer oligonucleotide probes that do not hybridize, thus identifying potential nucleotide polymorphisms. These nucleotide polymorphisms can be used as molecular markers in genotyping and breeding studies.

[0120] In certain embodiments, the nucleic acid sequences disclosed can be used directly as EST template sequences or used to design and subsequently create oligonucleotides probes that can be affixed to a solid support, e.g., glass microarrays. The collection of oligonucleotide probes for a unique template is called a probeset. The microarrays in turn can be used to identify gene expression patterns in a large variety of germplasm, over numerous environmental conditions or abiotic stress, and in a variety of tissues. This gene expression data can be used for mode-of-action studies, promoter and other expression element discovery, and systems biology networks.

[0121] In some embodiments, probes can typically be 25 nucleotides long or longer and approximately 10-16 unique probes are created for each template sequence as listed in SEQ ID 1-8104, or from “probeset” sequences denoted in SEQ ID 14404-22507. For example, SEQ ID NO: 1 can be used as a template sequence to design probes to be fixed on a microarray. The corresponding amino acid sequence of SEQ ID NO:1 is SEQ ID NO: 8105. Part of the SEQ ID NO:1 can be used as probes, and the collection of all of the probes are disclosed in SEQ ID NO:14404 with or without the overlapping sequence. Hybridization of cellular RNAs to the probes conjugate to the microarray can result in specific binding of mRNA to the microarray, and subsequent detection methods allow quantification of the amount of each template sequence, resulting in a gene expression intensity value.

[0122] In one embodiment, template sequences can be retrieved from public or proprietary EST sequence databases. Hybridization and detection of these templates via microarray technology can verify that these sequences are functional. Furthermore, specific expression patterns can be measured under numerous environmental stimuli, suggesting that these sequences have a function under those conditions.

[0123] In some embodiments, the polynucleotide or polypeptide molecules can also be used to prepare arrays of target molecules arranged on a surface of a substrate. The target molecules can be known molecules, e.g. polynucleotides (including oligonucleotides) or polypeptides, which are capable of binding to specific oligonucleotides, such as complementary nucleic acids or specific antibodies. The target molecules can be immobilized, e.g. by covalent or non-covalent bonding, to the surface in small amounts of substantially purified and isolated molecules in a grid pattern. By immobilized is meant that the target molecules maintain their position relative to the solid support under hybridization and washing conditions. Target molecules are deposited in small footprint, isolated quantities of “spotted elements” of single-stranded polynucleotide arranged in rectangular grids in a density of about 30 to 100 or more, e.g. up to about 1000, spotted elements per square centimeter. In additional embodiments, arrays comprise at least about 10, 20, 50, 100, 150, 200, 250, 300, 350, 400, 450, 500, 550, 600, 650, 700, 750, 1000 or more polynucleotides sequences, e.g. at least about 1000 to 5000 or at least about 10,000 to 100,000, distinct target polynucleotides per unit substrate. Where detection of transcription for a large number of genes is desired, the economics of arrays favors a high density design criteria provided that the target molecules are sufficiently separated so that the intensity of the indicia of a binding event associated with oligonucleotides molecules does not overwhelm and mask the indicia of neighboring binding events. For high-density microarrays each spotted element can contain up to about 10⁷ or more copies of the target molecule, e.g. single stranded cDNA or oligonucleotide probes on glass substrates or nylon substrates.

[0124] Yet in another embodiment, arrays can be prepared with molecules from a single species, e.g., a plant species, or with molecules from other species, particularly other plant species. Arrays with target molecules from a single species can be used with polynucleotide or peptide molecules from the same species or a different species due to the ability of cross species homologous genes to hybridize. High stringency hybridization is generally used when the target oligonucleotides and samples are from the same species.

[0125] In other aspects of this invention, the organism of interest can be a plant and the target molecules can be polynucleotides or oligonucleotides with nucleic acid sequences having at least about 80 percent, at least about 85 percent, at least about 90 percent, at least about 92.5 percent, at least about 95 percent, at least about 97.5 percent, at least about 99 percent, at least about 99.25 percent, at least about 99.5 percent, or at least about 99.8 percent sequence identity to a corresponding sequence of the same length in a polynucleotide having a sequence selected from the group consisting of SEQ ID NO: 1 through SEQ ID NO: 8104 or SEQ ID NO: 14404 through SEQ ID NO: 22507 or complements thereof. In other aspects of the invention, at least 10% of the target molecules on an array have at least 15, at least 16, at least 17, at least 18, at least 19, at least 20, at least 21, at least 22, at least 23, at least 24, at least 25, at least 26, at least 27, at least 28, at least 29, or at least 30, consecutive nucleotides of sequence having at least 80%, at least 85%, at least 90%, at least 95%, at least 99%, at least 99.5%, at least 99.8%, or 100%, identity with a corresponding sequence of the same length in a polynucleotide having a sequence selected from the group consisting of SEQ ID NO: 1 through SEQ ID NO: 8104 or SEQ ID NO: 14404 through SEQ ID NO: 22507 or complements or fragments thereof.

[0126] In another embodiment, the arrays of the present invention are useful in a variety of applications, including gene discovery, genomic research, molecular breeding and bioactive compound screening. One important use of arrays is in the analysis of differential gene transcription, e.g. transcription profiling where the production of mRNA in different cells, normally a cell of interest and a control, is compared and discrepancies in gene expression are identified. In such assays, the presence of discrepancies indicates a difference in gene expression levels in the cells being compared. Such information is useful for the identification of the types of genes expressed in a particular cell or tissue type in a known environment.

[0127] Yet in another embodiment, a sample can be prepared with RNA extracted from a given cell line or tissue. The sample can be produced by reverse transcription of mRNA or total RNA and labeled with radioactive or fluorescent labeling. A sample is typically a mixture containing many different sequences in various amounts, corresponding to the numbers of copies of the original mRNA species extracted from the sample.

[0128] In some embodiments, the initial RNA sample for sample preparation can typically be derived from a physiological source. The physiological source can be selected from a variety of organisms, with physiological sources of interest including single celled organisms such as yeast and multi-cellular organisms, including plants and animals, particularly plants, where the physiological sources from multi-cellular organisms may be derived from particular organs or tissues of the multi-cellular organism, or from isolated cells derived from an organ, or tissue of the organism. The physiological sources may also be multi-cellular organisms at different developmental stages (e.g., 10-day-old seedlings), or organisms grown under different environmental conditions (e.g., drought-stressed plants) or treated with chemicals.

[0129] In one aspect, the present invention includes recombinant DNA constructs having a polynucleotide encoding a protein that has an amino acid sequence having at least 95% identity over at least 95% of the length of a reference sequence selected from the group consisting of SEQ ID NO: 8105-14403 when said amino acid sequence is aligned with said reference sequence.

[0130] In another aspect, the present invention includes a mixture having plant cells, and an antibody to a protein produced in said cells wherein said protein has an amino acid sequence that has at least 95% identity over at least 95% of the length of a reference sequence selected from the group consisting of SEQ ID NO: 8105-14403 when said amino acid sequence is aligned to said reference sequence.

[0131] Yet another aspect of the present invention includes recombinant DNA constructs having a promoter that is functional in a plant cell and that is operably linked to a polynucleotide that: encodes a protein having an amino acid sequence having at least 95% identity over at least 95% of the length of a reference sequence selected from the group consisting of SEQ ID NO: 8105-14403, when said amino acid sequence is aligned to said reference sequence; or is transcribed into an RNA molecule that suppresses the level of an endogenous protein that has an amino acid sequence that is at least 95% identical over at least 95% of the length of a reference sequence of SEQ ID NO: 8105-14403, when said amino acid sequence is aligned to said reference sequence; and wherein said construct is stably integrated into a chromosome in a plant cell nucleus. In some aspect, this invention includes a transgenic plant cell having the recombinant DNA construct wherein said DNA construct provides for an enhanced trait as compared to control plants; and wherein said enhanced trait is enhanced water use efficiency, enhanced cold tolerance, increased yield, enhanced nitrogen use efficiency, enhanced seed protein or enhanced seed oil. The DNA construct further can express a protein that provides tolerance from exposure to an herbicide (e.g., a glyphosate, dicamba, or glufosinate compound) having an agent applied at levels that are lethal to a wild type of said plant cell nucleus.

[0132] In some aspects, this invention provides transgenic plants (e.g., corn, soybean, cotton, canola, alfalfa, wheat, rice, sugarcane, or sugar beet plant), that is homozygous for said recombinant DNA and have a plurality of plant cells.

[0133] Yet in another aspect, this inventions includes transgenic pollen grains having a haploid derivative of a plant cell nucleus having a chromosome comprising the recombinant DNA construct.

[0134] In one aspect, this inventions provides a method for manufacturing non-natural, transgenic seed (e.g., corn, soybean, cotton, canola, alfalfa, wheat, rice, sugarcane, or sugar beet seed) that can be used to produce a crop of transgenic plants with an enhanced trait resulting from expression of a stably-integrated, recombinant DNA construct, said method includes (a) screening a population of plants for said enhanced trait and said recombinant DNA, wherein individual plants in said population exhibit said trait at a level less than, essentially the same as or greater than the level that said trait is exhibited in control plants which do not contain said recombinant DNA, wherein said enhanced trait is selected from the group of enhanced traits consisting of enhanced water use efficiency, enhanced cold tolerance, increased yield, enhanced nitrogen use efficiency, enhanced seed protein and enhanced seed oil; (b) selecting from said population one or more plants that exhibit said trait at a level greater than the level that said trait is exhibited in control plants, and (c) collecting seed from selected plant from step b.

[0135] Yet in another aspect, the method of this invention further includes: (a) verifying that said recombinant DNA is stably integrated in said selected plants, and (b) analyzing tissue of said selected plant to determine the expression or suppression of a protein having the function of a protein having an amino acid sequence selected from the group consisting of one of SEQ ID NOs: 8105-14403.

[0136] In one aspect, this invention provides a method of producing hybrid corn seed including: (a) acquiring hybrid corn seed from an herbicide tolerant corn plant which also has a stably-integrated, recombinant DNA construct; (b) producing corn plants from said hybrid corn seed, wherein a fraction of the plants produced from said hybrid corn seed is homozygous for said recombinant DNA, a fraction of the plants produced from said hybrid corn seed is hemizygous for said recombinant DNA, and a fraction of the plants produced from said hybrid corn seed has none of said recombinant DNA; (c) selecting corn plants which are homozygous and hemizygous for said recombinant DNA by treating with an herbicide; (d) collecting seed from herbicide-treated-surviving corn plants and planting said seed to produce further progeny corn plants; (e) repeating steps (c) and (d) at least once to produce an inbred corn line; and (f) crossing said inbred corn line with a second corn line to produce hybrid seed.

[0137] In some aspect, this invention provides substantially purified nucleic acid molecule having a nucleic acid sequence wherein said nucleic acid sequence exhibits 95% or greater identity to a nucleic acid sequence selected from the group consisting of SEQ ID NO: 1 through SEQ ID NO: 8104 and sequences complementary to SEQ ID NO: 1 through SEQ ID NO: 8104.

[0138] In some aspects, this invention provides substantially purified nucleic acid molecule having a nucleic acid sequence wherein said nucleic acid sequence exhibits 95% or greater identity to a nucleic acid sequence selected from the group consisting of SEQ ID NO: 14404 through SEQ ID NO: 22507 and sequences complementary to SEQ ID NO: 14404 through SEQ ID NO: 22507.

[0139] Yet in another aspect, the oligonucleotides disclosed in SEQ ID NO: 1-8104 or SEQ ID NO: 14404-22507 can be conjugated to a solid support to be used in transcript profiling. Furthermore, fragments of SEQ ID NO: 1-8104 or complements thereof, and SEQ ID NO: 14404-22507 or complements thereof can also be fixed onto a solid support and used as probes in transcript profiling.

[0140] It is contemplated that any embodiment discussed in this specification can be implemented with respect to any method, kit, reagent, or composition of the invention, and vice versa. Furthermore, compositions of the invention can be used to achieve methods of the invention.

[0141] It will be understood that particular embodiments described herein are shown by way of illustration and not as limitations of the invention. The principal features of this invention can be employed in various embodiments without departing from the scope of the invention. Those skilled in the art will recognize, or be able to ascertain using no more than routine experimentation, numerous equivalents to the specific procedures described herein. Such equivalents are considered to be within the scope of this invention and are covered by the claims.

[0142] All publications and patent applications mentioned in the specification are indicative of the level of skill of those skilled in the art to which this invention pertains. All publications and patent applications are herein incorporated by reference to the same extent as if each individual publication or patent application was specifically and individually indicated to be incorporated by reference.

[0143] The use of the word “a” or “an” when used in conjunction with the term “comprising” in the claims and/or the specification may mean “one,” but it is also consistent with the meaning of “one or more,” “at least one,” and “one or more than one.” The use of the term “or” in the claims is used to mean “and/or” unless explicitly indicated to refer to alternatives only or the alternatives are mutually exclusive, although the disclosure supports a definition that refers to only alternatives and “and/or.” Throughout this application, the term “about” is used to indicate that a value includes the inherent variation of error for the device, the method being employed to determine the value, or the variation that exists among the study subjects.

[0144] As used in this specification and claim(s), the words “comprising” (and any form of comprising, such as “comprise” and “comprises”), “having” (and any form of having, such as “have” and “has”), “including” (and any form of including, such as “includes” and “include”) or “containing” (and any form of containing, such as “contains” and “contain”) are inclusive or open-ended and do not exclude additional, unrecited elements or method steps.

[0145] The term “or combinations thereof” as used herein refers to all permutations and combinations of the listed items preceding the term. For example, “A, B, C, or combinations thereof” is intended to include at least one of: A, B, C, AB, AC, BC, or ABC, and if order is important in a particular context, also BA, CA, CB, CBA, BCA, ACB, BAC, or CAB. Continuing with this example, expressly included are combinations that contain repeats of one or more item or term, such as BB, AAA, MB, BBC, AAABCCCC, CBBAAA, CABABB, and so forth. The skilled artisan will understand that typically there is no limit on the number of items or terms in any combination, unless otherwise apparent from the context.

[0146] All of the compositions and/or methods disclosed and claimed herein can be made and executed without undue experimentation in light of the present disclosure. While the compositions and methods of this invention have been described in terms of preferred embodiments, it will be apparent to those of skill in the art that variations may be applied to the compositions and/or methods and in the steps or in the sequence of steps of the method described herein without departing from the concept, spirit and scope of the invention. All such similar substitutes and modifications apparent to those skilled in the art are deemed to be within the spirit, scope and concept of the invention as defined by the appended claims.

What is claimed is:

1. A transgenic plant cell with stably integrated, recombinant DNA comprising a promoter that is functional in plant cells and that is operably linked to DNA from a plant, bacteria or yeast that encodes a protein having at least 90% sequence identity to SEQ ID No. 12257;
wherein said plant cell is selected from a population of plant with said recombinant DNA by screening plants that are regenerated from plant cells in said population and that express said protein for an enhanced trait as compared to control plants that do not have said recombinant DNA; and
wherein said enhanced trait is selected from group of enhanced traits consisting of enhanced water use efficiency, enhanced cold tolerance, increased yield, enhanced nitrogen use efficiency, enhanced seed protein and enhanced seed oil.

2. A recombinant DNA construct comprising a polynucleotide encoding a protein that has an amino acid sequence having at least 95% identity over at least 95% of the length of a reference sequence selected from the group consisting of SEQ ID NO: 8105-14403 when said amino acid sequence is aligned with said reference sequence.

3. A mixture comprising plant cells, and an antibody to a protein produced in said cells wherein said protein has an amino acid sequence that has at least 95% identity over at least 95% of the length of a reference sequence selected from the group consisting of SEQ ID NO: 8105-14403 when said amino acid sequence is aligned to said reference sequence.

4. A recombinant DNA construct comprising a promoter that is functional in a plant cell and that is operably linked to a polynucleotide that:
(a) encodes a protein having an amino acid sequence having at least 95% identity over at least 95% of the length of a reference sequence selected from the group consisting of SEQ ID NO: 8105-14403, when said amino acid sequence is aligned to said reference sequence; or
(b) is transcribed into an RNA molecule that suppresses the level of an endogenous protein that has an amino acid sequence that is at least 95% identical over at least 95% of the length of a reference sequence of SEQ ID NO: 8105-14403, when said amino acid sequence is aligned to said reference sequence; and
wherein said construct is stably integrated into a chromosome in a plant cell nucleus.

5. A transgenic plant cell comprising the recombinant DNA construct of claim 4 wherein said DNA construct provides for an enhanced trait as compared to control plants; and wherein said enhanced trait is enhanced water use efficiency, enhanced cold tolerance, increased yield, enhanced nitrogen use efficiency, enhanced seed protein or enhanced seed oil.

6. The plant cell of claim 5 further comprising DNA expressing a protein that provides tolerance from exposure to an herbicide comprising an agent applied at levels that are lethal to a wild type of said plant cell nucleus.

7. The plant cell of claim 6 wherein the agent of said herbicide is a glyphosate, dicamba, or glufosinate compound.

8. A transgenic plant comprising a plurality of plant cells of claim 5.

9. The transgenic plant of claim 8 which is homozygous for said recombinant DNA.

10. A transgenic seed comprising a plurality of plant cells of claim 5.

11. The transgenic seed of claim 10 from a corn, soybean, cotton, canola, alfalfa, wheat, rice, sugarcane, or sugar beet plant.

12. A transgenic pollen grain comprising a haploid derivative of a plant cell nucleus having a chromosome comprising the recombinant DNA construct of claim 4.

13. A method for manufacturing non-natural, transgenic seed that can be used to produce a crop of transgenic plants with an enhanced trait resulting from expression of a stably-integrated, recombinant DNA construct of claim 4, said method comprising:
(a) screening a population of plants for said enhanced trait and said recombinant DNA, wherein individual plants in said population exhibit said trait at a level less than, essentially the same as or greater than the level that said trait is exhibited in control plants which do not contain said recombinant DNA, wherein said enhanced trait is selected from the group of enhanced traits consisting of enhanced water use efficiency, enhanced cold tolerance, increased yield, enhanced nitrogen use efficiency, enhanced seed protein and enhanced seed oil;
(b) selecting from said population one or more plants that exhibit said trait at a level greater than the level that said trait is exhibited in control plants, and
(c) collecting seed from selected plant from step b.

14. The method of claim 13 wherein said method for manufacturing said transgenic seed further comprises:
(a) verifying that said recombinant DNA is stably integrated in said selected plants, and
(b) analyzing tissue of said selected plant to determine the expression or suppression of a protein having the function of a protein having an amino acid sequence selected from the group consisting of one of SEQ ID NOs:8105-14403.

15. The method of claim 14 wherein said seed is corn, soybean, cotton, canola, alfalfa, wheat, rice, sugarcane, or sugar beet seed.

16. A method of producing hybrid corn seed comprising:
(a) acquiring hybrid corn seed from an herbicide tolerant corn plant which also has a stably-integrated, recombinant DNA construct of claim 4;
(b) producing corn plants from said hybrid corn seed, wherein a fraction of the plants produced from said hybrid corn seed is homozygous for said recombinant DNA, a fraction of the plants produced from said hybrid corn seed is hemizygous for said recombinant DNA, and a fraction of the plants produced from said hybrid corn seed has none of said recombinant DNA;
(c) selecting corn plants which are homozygous and hemizygous for said recombinant DNA by treating with an herbicide;
(d) collecting seed from herbicide-treated-surviving corn plants and planting said seed to produce further progeny corn plants;
(e) repeating steps (c) and (d) at least once to produce an inbred corn line; and
(f) crossing said inbred corn line with a second corn line to produce hybrid seed.

17. A substantially purified nucleic acid molecule comprising a nucleic acid sequence wherein said nucleic acid sequence exhibits 95% or greater identity to a nucleic acid sequence selected from the group consisting of SEQ ID NO: 1 through SEQ ID NO: 8104 and sequences complementary to SEQ ID NO: 1 through SEQ ID NO: 8104.

18. A transgenic plant cell with stably integrated, recombinant DNA comprising a promoter that is functional in plant cells and that is operably linked to DNA from a plant, bacteria or yeast that encodes a protein having at least 90% sequence identity selected from the group consisting of SEQ ID No. 8105-14403;
wherein said plant cell is selected from a population of plant with said recombinant DNA by screening plants that are regenerated from plant cells in said population and that express said protein for an enhanced trait as compared to control plants that do not have said recombinant DNA; and
wherein said enhanced trait is selected from group of enhanced traits consisting of enhanced water use efficiency, enhanced cold tolerance, increased yield, enhanced nitrogen use efficiency, enhanced seed protein and enhanced seed oil.

19. A solid support comprising at least 10 nucleic acid sequences selected from the group consisting of SEQ ID NO: 1 through SEQ ID NO: 8104 and sequences complementary to SEQ ID NO: 1 through SEQ ID NO: 8104.

20. A substantially purified nucleic acid molecule useful in transcription profiling comprising a nucleic acid sequence wherein said nucleic acid sequence exhibits 95% or greater identity to a nucleic acid sequence selected from the group consisting of SEQ ID NO: 14404 through SEQ ID NO: 22507 and sequences complementary to SEQ ID NO: 14404 through SEQ ID NO: 22507.

21. A solid support comprising at least 10 nucleic acid sequences selected from the group consisting of SEQ ID NO: 14404 through SEQ ID NO: 22507 and sequences complementary to SEQ ID NO: 14404 through SEQ ID NO: 22507.

The application's sequence listing, which the Patent Office published only in electronic form, follows.

SEQUENCE LISTING (22507 sequences)

SEQ ID NO: 1 - DNA, 966 bp, Zea mays
  misc_feature (966)..(966): n is a, c, g, or t
  Peptide Sequence Number=SeqID_8105
  Probeset Number=SeqID_14404
aaactccgaaggtctaaaggatcgataggccacgctttcacggttcgtattcgtactggaaatcagaatcaaacgagcttttaccctttttgttccacacgagatttctgttctcgttgagctcatcttaggacacctgcgttatcttttaacagatgtgccgccccagccaaactccccacctgacaatgtcttccgcccggatcggcccggcgaggccgggccttggagccaaaaggaggggcggtgccccgcttccgacccacggaataagtaaaataacgttaaaagtagtggtatttcacttgcgcccggaggctcccacttatcctacacctctcaagtcatttcacaaagtcggactagagtcaagctcaacagggtcttctttccccgctgattccgccaagcccgttcccttggctgtggtttcgctggatagtagacaggacagtgggatctcgttatccattcatgcggtcactaataagatgacgaggcatttggctaccttaagagagtcatgttactcccgcgtttacccgcgcttggttgaatttcttcactttgacattcagagcactaaaagaatcacattgcgtcagcatcctcgagaccgtcgcaatgctttgtttaaattaaacagtcggattccccttgtccgtaccagttctgagtcggttgttcgacgcccggggaaggcccccgagggggccgttcccggtccgtcccccggccggcacgcggcggcgagctctcgccgcgcgagcagctcgagcattccgccagcagccgacgggttcggggccgggacccccgagcccaaccctcagagccaatccttttcccgaagttacggatccgttttgccgacttcccttgcctacattgttccattggccagaggctgttcaccttggagacctgatgcggttatgagtacgaccgggcagcggccgcgaattn

SEQ ID NO: 2 - DNA, 801 bp, Zea mays
  misc_feature (800)..(801): n is a, c, g, or t
  Peptide Sequence Number=SeqID_8106
  Probeset Number=SeqID_14405
atcgagtctcgcgcgaggtgtttcggcaccgcgaaatgccacctccggctgcgatgctgctccttacggcggcctcggggcctcccacgctgtcgctgaccgtgggcgcgaggcgggcgccgctccgggccccaagccggcggaggctgcgggcgctgcggccggcgaggatccgcgccgccgcggcgatcggtggcgagttcggcggcctcggccggcgccgcgtcgtcgtgggagagttcatcgagcgcctgcgcaacgttctgcccgggggcagttggtggcgcctcgaggacggcgatgaggccggggacggggccggccgcgcagaggggagcggtaccaccgccgtgtccgcgctcaggcggatgtgggccctcgttgccggcgacagattggtcatctatgtcggcttcgcgtccctcgtcggcgctgcggtaacgctttcccagccatagcagtgtgctatggactatggtcagggccggtaaaatttgaggccctgtacaaattctgaaatgaggcctcttttattagtcaaggttattgatcgttggtgaacgaaacgtcatactgcacgtatataggaggacatatcctgtgcaatcactcattttggtgcaagcgtgcaatcaaactatccagagcatccagtctagatccaacggtttcatatggaagtggttaaatgtaaaatagacactaggtttcaggtggaaggggttaaatgtaaaataacagttaccattagatccaaaaaaaaaaaaaaaaaagcttatcgatrscrtcgacctcgaggnn

SEQ ID NO: 3 - DNA, 753 bp, Zea mays
  misc_feature (1)..(7): n is a, c, g, or t
  Peptide Sequence Number=SeqID_8107
  Probeset Number=SeqID_14406
nnnnnnntattgtgtttaacaattactgcatttttcaaggacatctgtaatgtttcatcctcaattgtcctagagacaatgaggcggtatggatcatggcagctgatcacataacaccgataaacattcagaaaaaaattatcgaagttaatctcacaacaccgataacattcagaaaaaacttatcggtaaaacatgcccaaagatctcaagaatttgaagtaatatgtgtcgtagccagtatctgtaagtgtgacactgatttgtaaatctgagatatcataatatactgtctgcaatcccctcgtccttaacagcaaatgtcaaaactctgtgtcttaatcaggcctatattccaacatttgtacagaagcaccctgatctttcacaatacaagaaattatttcatccgcaatgaaaacagtggatgatctcaccaaaaatcaaagcatccacccagctgagtctggcaatgtgaactctaagctaatggaagtgtcttaactcggtccagatgtatcccacctatgaggttgggtttgagtgtatgtgtgtgtatttggtacggctgtgttggtgtggtggtctttttgtttttgtacttaggtgttcttctcaatccaatggtacgcagctcccctgtgtatttgagaaaaaggtttccagtgtatgaactcagcctgttgaccaccaaatctatatcaccatatgatgacttccaccatatgcattgagcatgatatctcattttac

SEQ ID NO: 4 - DNA, 901 bp, Zea mays
  misc_feature (894)..(901): n is a, c, g, or t
  Probeset Number=SeqID_14407
agcctctctccccaccgcatcttctatcttcggttccttgctctgcaccgccttctgctcatccatctcccatggtgcccagccgagcagcccatggaggcttcctccccacgctgaagccctctctactgatggccgcagtcctgctcccttctcctcaagcagcgcctgagctccattccttggtcttcctgcttggcgctaggtcctaagacgagctcctgttctccatccatggcgcccaggcgagtagctccccttctccagatccatggacgccatcccctcctgcaatttagagaaggcggagtctctgtgcgttgctcaccaagtgcttgacggacaacctgaacctgagacccatcgtcgtttttgtggtcttcgaatcggattcagttttgccctccatcgatgtctcgtctctccttcgctgcaccatcctcgtccttatctattggtacgctagctgaaaatcgtgcgaagcgaagggtgtagatcaaaacaacccacaagacgatgtcggccgatgatcctgaagatagatggactaagcgggtgtcagaataaaagttgatcgtcaagtggccatcatctaacaacactaacctagtgttatcccaggttgtaattttgttctgttgtggatggtgctaagtgccggtgggctcggccttcttatataagtatatcccatctttagcttctttattgaggattgtcacttaagctacattgtattttaaaacttataaatgttttatacattcaaattgtaatcttttgaatcaatttctcttgtaatcactttgatgatatattgtaatattgctataacttgtaaatgttgtaacttgtaatcattttgtaataaagaatttatttccgctgcgaaannnnnnnn

SEQ ID NO: 5 - DNA, 702 bp, Zea mays
  Peptide Sequence Number=SeqID_8108
  Probeset Number=SeqID_14408
atcgaaaagtttttcatataaatcttcttatctttctgcctcttgatttcaaatcagaatgggtaaagacaagcatcacgaacaagacaaaggattcttttcacatcataatcatcccggccatgggtatccaccgggagcttatcctcctcctccgccgggagcttatccaccaccgcatggttaccctcagcaagggtaccctccacagggttaccctccgcagggctatccacctgcagcttatccacctcctcctggtgcttatcctcccgccggttaccctggtcctcaccgtccaggtcttggaggaggagtcgggggattgatagctggagcggcaacagctgcggcggctgcaatgggaagtcaccacgcgggccatcatggtggttatggccaccatcacggtggtaagtacaagaaagggtttttcggtggaggaaagtacaagcgaggaaagcacagcatgtttggagggaagcataagcgtggcaagcacggcatgtttggaggcaaacgaggcaagcatggcatgttcggacgaagaaagtggaaatgatcatatgaatatgatatttcgcgatctctatgatttctctatatattatcgtatgtaacaacttgatattaagcttaatatatatgcgtgtgtgttatctgtttttaatgtatctttatatatctatgaaagagtggctt

SEQ ID NO: 6 - DNA, 705 bp, Zea mays
  misc_feature (1)..(4): n is a, c, g, or t
  misc_feature (705)..(705): n is a, c, g, or t
  Probeset Number=SeqID_14409
nnnntacgtaggccccccccccccaaagcacaagtgcacaaccaacagcaaagaagagacgacgtcgatcgatcgatatctcagcaaccaagcaggtaggtaggcatggcggccgagaaggagggcgcggtggtgaccaagggccacgacgaggggatgaaggcggcggcggcgctgctggaggagttcgggctcccgccggggctgctgccgctggaggacgtgacggaggtggggttcgtgcgggccaccggctacttctggctcgcgcagcgcaagaaggtggagcaccggttccgcaagatcggcaagcaggtgagctacgacgtcgatatcgccggctacgtccggcccaggggcatcaggaggctcaagggggtcaaggccaaggagctcatgctctggccgcccgtctacgagatggccgtcgacgacgacccgcccaccggcggcaagatccacttcaagagcctcgccggcgtcaccaagaccttccccgttgacgcattcgccgccggccagtagccatcttatatcactacaataatacatacaccattatatatggcgcatatatatactattaattaatctcttgtgttactaccttatatatatgttatgtgtgtacttgctaatcctgatgatgatggagaacgtaacctctagtttttttctgacaaatataatgaaatgaagccgaan

SEQ ID NO: 7 - DNA, 575 bp, Zea mays
  Peptide Sequence Number=SeqID_8109
  Probeset Number=SeqID_14410
cagctacgtaggccccccccccagcgtctgacgtagcaaccattcatatgattcatatgtttgtgcatccatcacatccatcaccctctccatgtccctctccttcttcacgataaacatgttactcagatgctatatcaccatatccttcacttgaatgatctcgttagcaataccagcccaccatatttaccatcatgtatgtcatgaaaaatgtggctttcattggtatagctaccccaatggtctttggtattctgcaaaaagaatgtcatgaaatagcaacatactatcggttgcgcctggatcgaaggggatcttcaatccagacataaccgaacaagcctgacaggggaagataccccagccaactttctagacatatgaagatcagtcaggtcgtcatcatccaataattggttaagctcatctctcacctggtaaatagttggtaaatagtgaatagtttttgatccccaaaccacggagagaaatagtgctagtaatctatctctctctattcaccatgaatactaatgtcatgaaataactttgtgctcaatgctacctaattc

SEQ ID NO: 8 - DNA, 1239 bp, Zea mays
  misc_feature (1239)..(1239): n is a, c, g, or t
  Peptide Sequence Number=SeqID_8110
  Probeset Number=SeqID_14411
ccccttctctcgacggcgccaccatgccgcctccgccctcaaccctagccgtatcgcgccctcgccctgcctccagccccgcgcagtatgctgctcgctccgggctccggtcatctgccatgcgtcgttggctactcgcttgctcccatgctcccttcggatctgctgctcttggtgatttagcgccgccgcctcctgctccaacggcttcacctccgacccatcgcctcccccgcctcgcggctcgcctctgcctcctgctccagcggcgttcagcaccgccggtatgggcgatcttcgtcgctctggtggaccacccggcggcggtggcggagatcaactcagctaggaagtacttcgccacgacggtgatggacttctggcaatggttcgtgtcggagtccgttgctggcatctcgcgagatgcccccgacccatcatccatttcacgcgccagcaagaaagtagataagaacacattatctacaggttccgtccaaagcatttgaagcagctgctggaaaggcacaccttaggcttagatttgtcatgaatttgcaggcaatttcattacaccaccctgtttcaagaagcatctcaattaacacggagtaaaccccaaaaaggaatagagatctgcattgctgagtgtgacattgtggctggtaactgcaaatcaaaatgatatgcgatcagtatgggaatgaccacaatggtgatctgcgggcaagaaaatataaagatacccaaccaagtgcaatttatcttttcaaggagatgcattatagcaagaagaaaagatttagtgaaactattcagaaagctattgatgatatggtagcaacggttgcaacaccggatgaagatggacagtttgtgatgtcttctacacaatttgtttcccatgtcttgccgagctcaagttaacttatttacaatgttgtcctttagaactccttcaagacaagctctatttcagtaaaggtgcaagagctccaaactcaactgtagactgagagccaagaaaaagatgtagttgtgggcttttgaacaatagctggagtgatatgaaacattagtgatatagttgtgggcttttgaactgctttaagctggagtggtgtcgctgtggtgctttagtgactgatcatctctggagcttttgtgaattatctagctagctatctgtaaatgatctagttgtgaatgatattataattgtgatgcttttgtgaatan

SEQ ID NO: 9 - DNA, 713 bp, Zea mays
  Peptide Sequence Number=SeqID_8111
  Probeset Number=SeqID_14412
agcagactaaaaaaatcgagtagagatgaagaagaagacgaggagaagcagtacgcagaagaagaagaagaaatagttcgatggcgatgacagtagcagcttccacctctgtggcagtgtctccaccgtcccttaccttcctccgctacctcctcgctcttttgagattcagcgatgcggtttagttgttaaaacctaaacttcaattcgattttcccggtttaacatctggtatagagagtgtaagctaatccaaaaccggaaatggaggtgtttatagtttaatttcaattcggtttacccggtttagaatctggtatagatagtgtgtaatggatatttgacttgaatgatgtttgtttgttatgagtgtgttcctaaagttatggagtgcaatgcatattctctgttgtagcttcctaaagttatgaagcttctcagatactctcttgctgtgctgatatggtctacagtacagcacgtacaagaaagcgagaacgagaaactaatctcttagcttctgaaactaatctctaagctccctcctccagccggataccctcccggttatccccaacattgagaaactttaaaccgatatcttcatattgtgtgtcaaagtgttgttgttaggttgttatattgttgtcagctatcttcttcctcagttatggggttgctttttgcaagtatcagtactctgttaagccaag

SEQ ID NO: 10 - DNA, 705 bp, Zea mays
  Probeset Number=SeqID_14413
ctgtcgattctcttttaattctgaagtcgatcgccaatcgattggtgtggcctctgatcccatggctgcacgtcgaggaggcagggaacttccaatggaagatgtttgttattacaagtggccgcttcctggggctgataagtttgggctgttttgtgtttgtgatggacatgggggagcaggggctgcaaacagaagcttggatgatcaccaatatgagcactacatcaaactgagcgagatggagaagaactgcaagttgaatgaccttcttgacgcattggacttcattcaagttgtcatatttgtgaagagcgttaacagagctggggagctgaacaagttgcttattgaatgcaatttcccctcaatatgttttcactctggcatgtctcatgaaaagaggctgactcactacaaaagtttcaaggaagggcacaagaggatccttgtggcgacagacttggtaggaagaggcattgacattgagcgtgtcaacattgttatcaactatgacataccagattctgctgatacatatcttcacagggtcgggagagctggtaggtttggaacaaagggtcttgcgatcacatttgtggcatcaggttcagattctgaattcatgtgtatgtctcagaattttttttttttaagaacctcactgaggttctaccattggaggaagaaaaatttaattagact

SEQ ID NO: 11 - DNA, 965 bp, Zea mays
  misc_feature (965)..(965): n is a, c, g, or t
  Peptide Sequence Number=SeqID_8112
  Probeset Number=SeqID_14414
attctagccagttcttcagtctcagcctgaaataacagaaaaaaaacacccgcgtcgtggctgcgccccgggacgcgctgcgggggctgagccgccatcggtgttgagtaaccgcccggggcgaactgcgaatgggtctgtgcccaggccgcctgcgccgcgggggactcgcccgcgcgcgtgctgccatggctgcgcgccgggtgccacgcctgtgcgccggggtgggaccgcttgcccgcgcgctgccagggccgcgcacccgctctccgtggctgctgcgcacgcctaggccgtgcctctgggaggcgcttgcgcaggccatggccgccggggctactggactgtgcctgcgctcgcagccaggggccgagcgcccgagcctgcgccgaggccggggcctgcgccggcgtgcccgcgcgccgaggctgggccacgcctggcgtaggggggctgcgcccgcctgccgtcaggggccgcaccggccgcgcccgtgcgacgcctgggacgccgcatgcctcgcccgcaccgccgggaggctgcgtgccgcgccgtcatccctagccgccagcaattgaccgcgccgccagggcccgctcgcgcgccgagagaccacgcgtcgtgccccacaccgccgtggccggatccccgcgccgaggcatgagcagatccacccgaaccgggtcgatcccgggcctgcgcgccgcgggggccgcgcccgctgccgtcagggccgggggaccttcccacccgcagggccggttgctcgctcgaccgcgccgccatggccttgggcggccgccagcaggaaggagtgacgaatggttagggttcaaaccctaactgtttgggtctcatgggccacttgtctggactgtacaaattgagtctgtcattttatcattttagcattttttttctgcaatttcagacctaatgtttatttgtatcacaattactatcan

SEQ ID NO: 12 - DNA, 851 bp, Zea mays
  misc_feature (614)..(851): n is a, c, g, or t
  Probeset Number=SeqID_14415
ctcgcctcgcgtcgtcaaagcgcgcgcgttcccgttccggccttcccccaccacgacgcccgcaccccacccaccctctgcctagcgtagcgcaccgtccgcggcgacggcggtgtccacctacccacccaccgccgcacgtttcctcctgcgcgccgcctcggatcagcccgagcccaccgcgtcggcgccgcccccacccgtctaaacaaccacggaggccgcggccggccgcgtctctctctctcctcgccgaggctaccgtccgtctcgtctagccggccgcggggatgaggcgatcatcgagcggggcgcgcgtgtcggacagcggcggcggcggcgtgagcgggagcgaggcggcgctgccgacgtacgaccctctgtcggcggcggggcggcgggaggcggcgcggacgcaggcgctgggacgcgccgtgcactgcatccctgtcgtgcttgtcgtctgcggcctcctcctctggctctcctcctcctcccacacccacctcgattgagtaccagcggggatcttaagtgaacctggcgggtagagtctggttctgttacacttgtacgataccactgaagagttccgagttccaaaagagaaagannnnnnnnnnnnnnnnnnnnnnnnnnnnnnnnnnnnnnnnnnnnnnnnnnnnnnnnnnnnnnnnnnnnnnnnnnnnnnnnnnnnnnnnnnnnnnnnnnnnnnnnnnnnnnnnnnnnnnnnnnnnnnnnnnnnnnnnnnnnnnnnnnnnnnnnnnnnnnnnnnnnnnnnnnnnnnnnnnnnnnnnnnnnnnnnnnnnnnnnnnnnnnnnnnnnnnnnnnnnnnnnnnnnnnnnnnnnnn

SEQ ID NO: 13 - DNA, 694 bp, Zea mays
  misc_feature (694)..(694): n is a, c, g, or t
  Peptide Sequence Number=SeqID_8113
  Probeset Number=SeqID_14416
aaccaaggctgcgtttctagcagccaaactctcatctttatgaatatcagttttataaacatttaactcttgcagacaatctcagcttccttcttctctttactttcttgttcaataaagctttaataagctatctccatttctgtttaaataaagctctttgagcattttgtacatttgttctcatggtatcagagcatcagggagtagatcttggtgttatatcttctacttgagcttcagactatctacaagacctctatggagccattaagtcttccaagactttcgtttgcttcctacgagatgtctgtatgaagaagaaagggtattgggccagatgggccagagatacaacgtgagaaagaaacagtcatgtcttcaaacccaacccgcttatgtcggactccatggacaaaactcagcggctacgaaagcgttcctctgtacgaaccgtgatgaaaccgtaatcaacgacgaaatcacacgtgaactgaaggaggaagtcatcacacaaatatgtttatcaatggtatgtatctgtccttcttcctgagacagaacaagtgaatggtcgtttggtagattaaggagaagtgatgcatgtgtggtcgtttggtgatttatgctggctggtttagattataggcttggaatctggaatagaatgcttacgctaggtttgattttctgn

SEQ ID NO: 14 - DNA, 570 bp, Zea mays
  Probeset Number=SeqID_14417
cacgaatgaacagttgtggaactcatcccggccaacggcgtagaagcaatgacggcgacacgatttggaggaagtgacggcggcgacacaaggccccttccactgatgtatgccctcttcgttggcgatcttctctcgtttttcttgtgcagaactgcatcggtgcaattgatggcactcatgtgcccattacaatttcacctgacaaagctgctccttttagaaacaggaagggaactctcaatcaagaagtgcatatccattattggtacaatggaagttacaaaggaggaaaaagcgaaagcctacaatgtcttcaaggaccttgacaataggcaaattttcttgagtgcatgcgatgatgatgccgagtctgcactaatttggctgagaaacgagatggcttagctggtggagtcgtctgaattgcttgttggatatccaatatgttatgttgttcaaatgaaaaattactcatctccctttggtttgtttttaatctaaatgcacacactctattgtaatgtaataatagacaaatgagcgaccaacttctgattttgatgcttc

SEQ ID NO: 15 - DNA, 771 bp, Zea mays
  misc_feature (771)..(771): n is a, c, g, or t
  Peptide Sequence Number=SeqID_8114
  Probeset Number=SeqID_14418
acccacgtattcttttctctctgaaatttttccccagcagcaccggccgcccttctcctatctccctgctcgccctgcctcttcttccttgagccgtgcccggtgctcctccaccaagcctcgccggcgtactctcctggccgtggtcggatctgtccccctgcttcctattcccagctccctacccctctccatggcgtcgcccagctccagctcgcccccctctgatctacacgcaggggtttcttccatggcgagctcccccaggccagccgccatatgtgcagtgggggatagcttctcggtcctccgtcgaaagatcaagtgttgctgatcaatttttaagcaagaaatctggtatgacgcatgacaaggttgtctgctatggcatacaactatgtctctatttcatcctataatgagttgaagtaaagaagacagacagccgtacacaaactctgcatcttgaaactaccatggttggcaaagaagctggatgcatcctttacattggtgtcttcttatcactaagcagtaatgtgaagcaagttcatttgttgactaagaacggatgaacacaaatcagtgaagatttagttgtgctagagatggaggatggagaggtagtaaatttcaatatggctttgatactattttcccttacaatctttgtacggaacaagaaaaatgatgttgtatgtggatattattgtaattctataatttatttctaaacaataaatatgactacgcatgagacttttgtgatgn

SEQ ID NO: 16 - DNA, 632 bp, Zea mays
  Probeset Number=SeqID_14419
ctcaaaacacacacacactcctccctcaccaagtcaccgggccgcagagggcgatcaagcagctagtacacctctgctgtgagtccgcaatgtcgactagctgccgcgctccggccaaccgctgcatctgcaagacgccgtcggggaacccgctgccgcggcggggccaggtcaaggagagcatcgccaagcagatcgtggcggccgccgtggccacggcgtcgatggtcgtctgcgacgccggcgcgggcggcaagaaaggcggggccaagccgcccgccccgcccgccggtgccaagaagaaatgagaagccgaattgcttgtccgggtgtccaataatttatggtatgcttgcacaccacctagctagcgcgccagttcatgtgccagctgtactatttttgttaaggtttgttcgtgttcgtgtagtgatcaccaccttgacgtgacgtctatcgttgtctcgtgcgtgcatgccaggataagtttcacttcctcgccgcacttgtctttgttctgctatgttttgttcttgttattccgtcgtcagggatgtactcctactggggggaggtcggcaagtattatggcctgatctttccctgttatatgtattgtgtgtgtactgcat

SEQ ID NO: 17 - DNA, 608 bp, Zea mays
  Peptide Sequence Number=SeqID_8115
  Probeset Number=SeqID_14420
acacacacatttcagctcacagcgcaggcagaggaagcgagaagcgagccaccaagaaaccacccaaaggtttgcacaatggccgcttctcagctcaccatcctctccgtcctcgcgctcctggccgtggccgccaccgctcaggcgcccggagcggcccccgcggcagcgccccaggccccgcctccaccgccggcgaccccgcccccggcaatggcgccccctaccccggcgccggtgtccccgccccctaccgcggccccggcgcccgcgcccaccgtcgcccccacgccctccgccaccgcgccggcgcccgccgactccccgatgtcctcccctccggcgcccaccccggacatgtcgccctcgcccaccgccgagcccgccaccccgggcagcggcgccgctggtctccgccccgccttcgtgctggctgccgccgccgccgccatctacgtcttctagatgacccgacgatgtatcatttcattgtttctttgcagcttttgttccatttctccccctctttgcccccttccgtccgcacattggtgtaccctcatcttctgctgtaattacgagcattgatttaatttatgcatttcacc

SEQ ID NO: 18 - DNA, 958 bp, Zea mays
  misc_feature (958)..(958): n is a, c, g, or t
  Peptide Sequence Number=SeqID_9527
  Probeset Number=SeqID_14421
accgctctccggcttgcgctcgagatctcatccgatcctcaccgccccccacccatgccgactgatcacggcagcagcagcgacggcggccaccaggcgcaatgccggcggaggggcgccagcgtcgacgtcgagctccgcgccgccatggcgctggccgacatggcgggggccggggccggggcggccgccgaccacgcgctcccggcgcagcgcctgcgccacgccgccgccccagcggcccaggcggcgatggagcaggaggacgaggagctggcgagcacgaggctgagccttgagctgggcaacgtcggcatccagtcctccccttgctccagcagctccagcggcgccgggcagcaaccgccgcagtcgtcggcggccgtgacgggatacggcctcagcagaccgcggcacatgctcaccgaggcggagaaggaggcgaagcggctgcggcgcgtgctcgcgaaccgggagtccgcccggcaaaccatcctccgccgccaggcgatccgggacgaactggcgaggaaagtcgcggatttagcgtcgcagaacgagaacatgaagaaggagaaggacaaggtgctggaacagtacctcacgctcaaggagacgaacaagcagctgaaacaacaggcacatcatctatcgctttcattcctttaatttccttcccttttccccgtcatccattattagtactccccctgctaccaccattgttaggcaacggaaaagaaaagaaaagaaatcccagaagggaacctagtatgttccaatccagctccagttgtgcccccacgagaggactacagtcacgctgcagtacacctatgctagtacgagtactaattatggtgaaaccgggggcctgtcaatcgctcatgtctgtatattatttacattttgctctgacagtgatgttcggacaataatatactctatgtgccctccn

SEQ ID NO: 19 - DNA, 1096 bp, Zea mays
  Peptide Sequence Number=SeqID_9528
  Probeset Number=SeqID_14422
aacatcgatcgtccctgtgagcatttgctcttgcgcttcttgacactccaatttgccagaaagaagcaaacatccatatttggtagcaatggcagcgtcgaggtgcagcaccgccttcgtcttgctcgtcgtggtcacggtggcggcggcggcggcggcggcgctgctgcagccggcggaggcggcagcggcggcacgccgcgccgacgcccacgtgctctggtacccgggaacaaggcagcgtagccccagcggcttcaggggtttccctcgctccaggctgtcgccaccgtccgcgggcaggctaacgccgccgtcgcccagcggcaggccgatgacgccgccgccgtcccaggcgcaggcgccgccggcgcccatctcgcccccgtgcaccgccgcgaacccgcagcccggcttccctggcatgccggtgggcggcaccggcggcttcggaggggcgtcgccctcgccgccgtcggcgccgacggactgcgtgacgccgctggcggggctgatgacgtgcgcgtcgttcctgacggggagcgaggcggagacgccgaccccgcagagcgagtgctgcggcgggctgggcatgttcctcaacagctcggcggcggcggacgaccggtcgctgcgttgcctgtgcccggtgatcctcggcgacgtgaaccgcatgctccccaagcccatcgaccccgtccgcatgatgtacctccccatcgcctgcggcgtcgtcctcccgcctcaagtcctcttcatctgcttcactgggcagccgacgccgccggtggtgaaccggattcctgactcctggaagacctcgtcttcttcagcattgtcgccttgagctggtgccgacgatcggatttggttactgctcatcacgcaggcacagtctatcccgggacgtatctatcaagtttaattattaagattacaaaaaaacgtgagaaactagctggttactaccaactttgcagccatgagagtggtcaacgcatcatgggccaattgtggtgtagtattactgatcgatgtaatagctagcatgttttcctttttcttattgagaatgtaaacaaaaatacaagagcat

SEQ ID NO: 20 - DNA, 603 bp, Zea mays
  misc_feature (603)..(603): n is a, c, g, or t
  Peptide Sequence Number=SeqID_9529
  Probeset Number=SeqID_14423
aagctcactcaaacacaggcacagccacccaacactatcacaaagccgcacaagctagacaatctcctcataagtgctagcggagcctcccagctagcaatatggcaaagtgcctcgccgtcgccctcctgctgctgctggtgctcgcgtactgcgacgggagggagctaaaccagaaggaccaggcactcgcaacggcacgcggtgccggggccgccggtggtggcgtcggcgaggagaagattttggggttgcctgacctgccgcctgtgggaaccgttaccggtaccagcaccactaacggcccgctggtggcgcttcctgcccttcccgggatccctgctcacccatgatcacctctagttcatgtgctggcttacaagatgaagctcacctcgtgactttacacttctaggctctagcttaacatcgcccggaaggccaacaccggcgtttcgctcatgtccatgttccttccttaatgggcgtctgtatcatctatccccgtctgtatttcttttcagttcatgttctagtatttttcgtttccttgatgtgctacatgtatgatgtatcatcaatgtaataaatacttctttttcn

SEQ ID NO: 21 - DNA, 587 bp, Zea mays
  Peptide Sequence Number=SeqID_9530
  Probeset Number=SeqID_14424
cacaaacaagcaacgcatcctccactcttcaccaccgtctagctagctcttgttaggtcgatcggcaatggcgtccaccaaggctctcttcgtgctcgccgttctcctcgcgtcggccgtcctcctcgccgccgcggcctccgagcaaactcatgacaaggaggggaaggtggccaccaacggtgccggcgtccaggacggctggggtggcggcggccgcggcggagggtacccgggccgcgggggcggcggctacgggccctgcggccggtggggctgctgccgccgtgggtaccacggcgactgcatccgatgctgcagggccgccaacgacgtcccggaggccatggaccgcactgaggtgcacaactagctagctggcagctggctatggcttggctagcaagcaggacccatgatcaatctggaagctagcttcttccagggtactgagtaaaataaatctccggtttagttcatgtgatctatgtatgtgcgcggatgaacgtatgtatctacgtacatacgttcgtagtcctcttcctttgtttggttggaacaataataagaaaatgtgatgcgtgtgg

SEQ ID NO: 22 - DNA, 659 bp, Zea mays
  Probeset Number=SeqID_14425
aaaaccataaataaaagatgtcaaaagattgcggcaaccacggtggtggcaaagaagcagccgtccggcgaatctgcgccgccgttatagccttcatcataatagttctaatcaccatctttctagtatgggtcatactaaggccaactaagccaagattcatcctgcaagaagccaccgtcttcgccttcaacctctcgcaaccaaacctcctcaccacaaactttcagatcacattcgcatctcgtaaccctaactccaagatcggtatctactacgaccgtctccacgtttacgctacgtaccgtaaccagcagataactctcaggacagcaatccctccgacgtatcaaggccacaaagaagacaacgtctggtctccgtttgtttacgggaccgctgttccgatcgcaccgtacaactccgtcgctttgggagacgagcaaggtcatggactcgttcagttgatgatacgcgccgatgggcgcgtgaggtggaaagtagggacgttgatcaccggaaaatatcatatccatgttcggtgtccggctctcatcaatcttgggaacaaagctgctggtgttattgtcggtgacaacgccgttaagtatacgttggttactaaatgcagtgtgaacgtttagaactttgacgccgtt

SEQ ID NO: 23 - DNA, 690 bp, Zea mays
  Peptide Sequence Number=SeqID_9531
  Probeset Number=SeqID_14426
atcctagagcttttgcagtaagaaaaaaaaaaacaagttaaaataaaaaatactgctctagcttttggaatatattccttttaaatctcaataaaaaaacctataaaaatggcacgtcaatttgtcacattggccctattggctttaaccgtggccaccgttttcgctgctgacgctccctcagcctctccccaaaaatctccatcacccaccactgccccaaccaaggctcccaccaccccaaccaaagctccggccgccgcacctaagtcaacctcagcttcttcacccaaagcatcttcccctgctgcagaaggacccgctgctgaggatgactactccgcggctagtcccagtgattctggcgaggcacccaccgactctgctgcctctcctccggctcccacacccgatagcacatccgccgatggaccaagtgaggcagaggcaccaagtagcagcgccgtgaccaccgtcaagctctctgttgccggcactatcatcaccgccgttagcttccttttcttttctctctaagttaaaaggagttcaagttttgtttcaagggattaccatacaattttttgagatgaggccgtaaatgtatacgtttataaatcgaggtttattggagttaataaaaacttaactatctatatggaattttgttaataaaattaaatgttgcgg

SEQ ID NO: 24 - DNA, 675 bp, Zea mays
  misc_feature (675)..(675): n is a, c, g, or t
  Probeset Number=SeqID_14427
ccaattccgatcacaagctccaatcaaaccaatccagagtaccatcggctatcaatcagcaggaggaagaaaccgctgctcgaccggggaagaaccaagaggctcggcgaagatgcaggcggcgaaggagaaggtgaaggacggcgtgagcgcggtgaaggccaaggccaagatcacgcaggccaaggcgtcggagaaggcggaggcggccacggcgaggtcgcacgcggagcgggagctggcgcacgagcgcggcaaggccaaggtggccgcggccaagatggagctgcaccaggacaaggcgctccaccgggaggaggccatggagcaccgcatccacaagcacggcggcggccacggccgccaccaccacaagcacggcgtcggcatcgtggccgcgcccccgccggcgaccggtgccggggcttaccaccctcctcctgccgccggtggccactactactgatcagctacgcagctggatcgccagctagatgggcacatgcgtcgcgtttgtgtgatgtgttctcgatagctaataagtctgtactttgtgatgtttatgtttgacttacccacgcgtggtttttcattttgcacttggcttggatatgagagctgtacttgatatttatgcacatatgaatgcatgcgaccttgttggcttgtcccgcn

SEQ ID NO: 25 - DNA, 524 bp, Zea mays
  Peptide Sequence Number=SeqID_9532
  Probeset Number=SeqID_14428
acaacaacaaaacaatgtcgggacgatatatataggacgcagaagagttcaaccataggagtacccatcaccccgggtgcggttccaaaaaaaacagtgtgtgacggatgcggatgcgacgaggagtggcagctgaaccaaaccctatgttgtcactacacatgcaaggtttgtatgggcgggagcaaaagaaagagaggaaggctgctagaaaagaggcttcgggagaggcagcagcggaatgacaagctcaagcttgttcctttctcctttctcatttctcatttctcatttctctgcacaataaagctctttgagctatttcatcttgtttcgataagctctatgagcatcagtttgtctctgttttaacgttttatcaaacttattcaagtttgtgtctctatccttgtattcccttgaactttatgtcggggctttagtttggttcgcacatcgtagtttgtacgatgctgtttcttgctttgtaaccgcttagatttattaatgaaaacatttgtacg

SEQ ID NO: 26 - DNA, 609 bp, Zea mays
  Probeset Number=SeqID_14429
attaaaatgtgttttaaaccccatattctagagtctataaataccaatcacttttcaagtcctgtaagataaaaataagagagagaaatggctaagatgccaagttcatcgaagatctatgtggttatgcttctctcattcttggcgcttttcataatggcccatgctcaaacctcttctccagatgggaagttctttcaagattccccggcccaagcctacaccggtccttcgtacgctcctgttcctccgagatgcttcaatccacctggctgcggtccaacggataaaaggaaaagaagatttcgccatcaaagttccaatttggccacatgaatcttgagagttaaaagcttgctcgctgatgtttgtggtgccttctcatttggtttaggttatctatgtataaatacatatatggaacgtttatgagatctatgttataatatggtgcgattttaccctgaggttgagggaaataagattcgaattgtgcgatttcaattactggtaagttggtaaccactatagtttgttatgtgaaatgtatattgtcaaaacaaaaaatgtatgttgtcaattatcataatgatatttctgtttactgtt

SEQ ID NO: 27 - DNA, 640 bp, Zea mays
  misc_feature (640)..(640): n is a, c, g, or t
  Peptide Sequence Number=SeqID_9533
  Probeset Number=SeqID_14430
agaaggaaaccctagccgccgtcgtcttcctcttcgtcgtcctcgaagccatcttctggtctgttggtagctatggcgctgcgcaccgttgccgcgaagctgaaggcccccgtcgcctctctcaagcaggcctgggcggtctgccgtcctcaggctaagcaccctttggagggcctgaatgttgatccgctcaccctccaggagatgaaggccctcgagagggccgttagggcaggcgaaatgaagcagactttggttaccattggcttcatgggtggtttgactggtgcggttgcccatttgctccattcagacttagctgcccgtgaggcgacggcggaggcggaggcggaggcggcggtacgtgaggtgcttgattcgcttgattcagatgtcaatgcggttggtacaaacaaagactaaggcgcccaaggaaatggcgtttggttagcctcgctgttatgtgcgttaattttaagctggtgcggatgtcttatatgtttaactactcggtatttggcttgtggcaagagtactatttatgactgggtagtctgtggattcatccgagtaatctctgataatattgaggtttcatctgtgtaatatgttatctaagcaaagggtcaagcgttttgtn

SEQ ID NO: 28 - DNA, 545 bp, Zea mays
  Probeset Number=SeqID_14431
ccgacacgtcgcttaaacctaatccaggcagcgacgacgccgccgccgcccccgaaaccacgtagcgctgctctgcccctatcttgcagtcaccagcagggaggctctgcggcctgcgccctgatgcgctcggtgtattcggccatcttctgcctgtcccagaaaaactagatcggatggggaaaaagggcaagcggcggggcgaggccgccgctacgggtgcgccggaggaggctgccgagcaggaggctcccgcggcatccgctgccgcttctgattcagccacgccgagaaggagcaggcgacggggcggcgacgccagggccgcgcaggaggcctccgccaccgtacacgcactggatcccgccgatgcagggaaggggacaacggacagggaaaagaagcctaagctcaacgaacgaaagaagaataagagggagcaatctccttgtgctgctgcatcgggtgctgatgctcccgccacgggtaaatcaggcgatgactgcactgatggggaaggtgttctaggaaactctgaagtttgc

SEQ ID NO: 29 - DNA, 2050 bp, Zea mays
  Peptide Sequence Number=SeqID_9534
  Probeset Number=SeqID_14432
tgccgagggttgacgggaccaaggtacatcgaccagcctatagcacccgccgttttccaatctcttaaaatgtcccttcgtccatataagatgaggtgcaaaatatctggagaacatgtaatacgagcatttctctatcttcttggagaggcatgacttgcccaatccagcgccggaggccggagacccactccgcatcccggacccgatggcagtcccggtgtcattgagcctgtggccatctcagcaattccagatctcaacatctttctctatacagctaccttctactctcagtcttctgtaatggtcactgcttcaattgtctcgcgacggagcgtctcagcatcgcctggcaagaggagaccctgagcgagctgagcctggagagccagcccagcggcgcggcggtaattggctgtcgttccgtagagagacttgagcttctcattatcgaaccgccactcggagcctaaaggtaatgtcagcaaagttgaaaactaaataccgcactgcagagactcgggccaaggcgacagtcgagacaagaacttaccccagtaccaagccggtcggcccttgggcgtgcatgctacaagtcgcgaaattggagactcgctatgaacagtccgaacaccgccgagtgcattgccatgctcatcacgcaagatctcatccgtgtcatcgatcgtctgaagcagcatgctgggcggaggagcgacagatagcttgccagtccagcgctcaaccagttcaaagacggcgtggtagatgaacgagttggcaaacgtgctccattcagcgccacgaaggtcaacaacagaccaacgctccaactcgcgtggcgacgcccagcgcgactcgcgatgcgccatgccggcgacctcatagaccctgaagccatcgctgtctgggcgccggtgctcgacctccttcatctgcccgctgataccgcagggaagtctaacagactggaactcagcctcgccgaggagttcaatgatcttagctccaggcacatctggcagcacctcgccacctgattggcaagggatgtaaccctcaaaagggatcgagccatctggcaaccgcaggtaaggggcagaatgcgtgatgaagcgcctcgtcaacccacccgtctgcgacaagccgctgagcacaatacgtgtagccttcagaccaagacttcccgagcgaagtgcgtacgaggcagccgtgatgatctccggagactgttgtgtggcaggccaccagcctgttttgaacgcagcatatgaatctcgaagtgcctccttcgtcaagtccgtcgcaaatggtatagtcttctggaattcgctgcacagcggagcaggcatgaactccatgcgaccgtaccgttccgggtcagccaacttcagcttctcaagcgctgaaggtgcctgcgagtcgacctccaaccaggcgtggcctaccttctcatgtcagctgttatgttctggcattcgttgcgctaggaggatactgaccattccgcataagccagcggttgatgtgacgccatatacttgttccaccccataaatgcgagggctcttccacggcgaatcctgagaacttagaagggtcctcgggacatcgaagaagcaggcgggtgcagtaggggtggcctgcagcagtgcctttgatcaggtactcgcgactgacatatccgtactctgggaggaggtcgacatgatagggttccaggatgatactcttggaagaatcggtctcgggaagatgaataattttaggcacattgacctcaaggaactgtggttcttgtggcgttatggagcccattgtagttgtgtatctggagataggagggacggatgcttgagataagatattcgaaatgaagtgatttgtggactgagtaatccttgctctgataacgatttaggacatgcgcaaagatatctatttatcaacgacttacacggcgtgccaggatgcttgtaagttattagtcgtcttagccgtatcgctggttgctgtcggttcgagctagtcgcttcgacatagtcgg

SEQ ID NO: 30 - DNA, 1207 bp, Zea mays
  misc_feature (1207)..(1207): n is a, c, g, or t
  Peptide Sequence Number=SeqID_9535
  Probeset Number=SeqID_14433
tctctctcccttgaagtagactctaagctaaagccaccgtcagattttcagatctcagatctcagctcttcattcgacgccatggccgagaagggcaaagaaaaggtaactatgatgaagttgaaggtggatcttgattgtgccaaatgttacaagaaagtgaagaaggttctttgcaaattccctcaaataagagaccaattgttcgatgagaagtccaacattgtcatcatcaaggtggtttgctgtagtcctgagaggatcatggacaaactctgttccaaaggcggcggctcgataaagaccatcgagatcgtcgagccacccaagcctcctcagccacaaccccaacaaccacctcaaaaacctaaagatgctcagcctaaagctcctgagaagcctaaggaacctgaaaagccaaagcagcctgaaaagcctaaagagccagagaagcccaaacagccagaaaagcccaaagaacccgaaaagccgaagcaacccgcacccgctccagctcccgcaccagcacccgcagccaaacccgcacccgttccagctcccgcgccagcacctgccccgaagcagccgggaccgccaccgcaagtgatcccgatgatgccgcaagggcagccagcaatgtgttgcgggccctactacgatggatacggagggccagcattcaatggatatggaatgccgccgcagccttacgagtgctatggacgaccagtctacgagagctggggtgggggctgcccaccaccaccactagtcccccccccccccccaatcatttgattttgatgatatggaagatttctttgacactgatgctgctgagtttgatcaaggattcgatggaagaatgtattaccaagcaccttccgaatttggctttggaaagaatggtgagatggttaagaaatcaagtggaaacaggagcccgagatcgattgtggaaccagctaagtatgcggaaaagccagcgaaatggggaaaccagagggttgctgctgctccgagaaacatccaccagcctcgctgaagagatatgttgttaactagtcagagaagtcagagcagttcggtctgtgtatctttagccaccactgtacctttgtaatttttagtatttgcttccacaacaaaaatctgtaactttgtatctttatgatgttcgttctcaaacttgctatcacaaaaatgn

SEQ ID NO: 31 - DNA, 2271 bp, Zea mays
  misc_feature (2271)..(2271): n is a, c, g, or t
  Peptide Sequence Number=SeqID_9536
  Probeset Number=SeqID_14434
atcagtcaggtcattgtcagtcaacggtcccgctcatgacattacactgactcaagtgtgttccattgattcgttgtgtgctcggtaaatgcgcgtggggtcttgacccgtctattccctgtcacgatgaacgggatgtgtaatagtggtcgttgtgccgtgggtgcgtttcgggagggttcacgacggtgcaccacctcgaaacgaggcatcacgtgatgacttcaccctgttgcctgtgctcgcatccatgcctatcaactcgattcacaagtattttccgtcacctaatatagctcatgggtggaagggtagacttgaagtctccaagtcttgaggtcaagaattgtggagaaactccctgttatccatactgccttggccttcgaccctccgtgtggaagttcagactcattatgaatagccatgtcatatttttcaacgacgcctacatcacttgcagtcggtgatagagggtgtattgcacgccgtagtacttggaacatcaccacgggcgtcaatcggccgtggcgttggcatcttggacctcaggatcaacgagacatcacttacttgtcctgccaattgatacgagctggtagcacggacatacccaacgcgtcaccttattcaaagccaaacatgacctctggagcgcagtctcagtagttctgaatcatgttctggtaccttcggtctttgacaagatagaacgttcgttagtatacttctactcccccgcgagccagggaggaacgacgctacagggtgcgaggatagtcacgatggaagcaatcgaagcgtgagagtgcaacgaggtacctatgactgccctactcacatcccatctatcgcaatctactccgtagtgtcaagtctttaaatcgaatagggtgctgaccatcggacgccggagctggagccgcccgggacctgatgcggagacccactccggtcccgggtcggaggagaagagagggaagaggaccatgtgctgggttgtgctgcaataagtgatgattagcacgaaggctattctggaaattgtggttgagattcacgaaagacgtatgcatggagtctgaatcgtaggagcactgtggctggggagatggcgtggagtctgccaacctagccagcatcccatgtgctcggtgctagggagtgtctcgaaacctgtgagtattctttcaccaaccacaaccgacagagagagttccgtaacacgagcaagcccacgatgctgggcagaaaggactcatcacaacccctttcgtgattttgcgagaaacatgattgtagagtttcagggtactttggtatagcaaatggtggtttgacgtggtgtctgagcgggtggctgcccaccagtcgcctctgatttgctaggtagccgccgagccaaggtgtagtctacccatcagacacgaccgacggacgaccggccatcgcggatcaacactccccgctcgcaagactcattccatgttgatcatcaaatcactgctttcttgaactagaagtcgattgcagatcccgctccggcatgtaagtgcgcgtatgcagttgatcgctattgtgatcattgttcacacaccccagcgctacgatggggtcctttggcgatggcgtcgtctcgctccttgatacctacaccagatgcttggtgttgttgaaagagctcacccggggctccaaggcaagcgaggaacaggcgaaacttggaggttctattcgctcgtcaagatcacgcgttcggaagtactactcttccaaggtttccgagagcggatcttcctttgagaaaggcgatggtgagccggccccgaaaggcatgatctgcgatccatgtactgattttggaccacagctactgctcgcagctcgctgaggcggcttgtacgtcgcctgagggcatttgtggacagcatcatgaggacgttcggcaagaacagccagactggcatcgattacgaatcattgatgtccctttcacaaggatcagggttggaggctattcgcaccatgacggatctgtcggaacgtgtcagtataagatcagcgagttcacatggcagcgtcgagagtcctggccgccagaggtcttccaggaagaggagaggcgagagcagcagaagcagcagcaccagcagcaaggccagcaaggcatccaagagcaggccgaagctaagcaaagcacctaaagcaacgcaggagccacactcaggaagaggctcaatgagtcgacaccatccaaaggacaccaaacgn

SEQ ID NO: 32 - DNA, 666 bp, Zea mays
  misc_feature (1)..(1): n is a, c, g, or t
  Probeset Number=SeqID_14435
natttaatgttatttgttaccgattacattacaaatatgtgaaccaaacagcaccttatttaatactcggtgctgtacccgacaagtgtcaagctgaagatgaggctgaattagctgaccagtgatccgtggccacccggacacgtaggcacagcactgtggcacgcaggtaggcagcccgccatcgtactttgtcagtgcgctgccgcgtggatgcacgtggcggtagcctccagatctgtgttgccggcttgccgcgtggatgtacacgtggcgtggcggaggatacaaaatgaacagcacaggccagggcacagacgcacgcgtcaggtgcaccgtgcacccgctgaattgaacacctcaccaccatggacatggaggcgcaggcggcaaaggcgagaaccgaggacccgcgacgtcctcccagcgacggcggggccgcaggagcgaagtgcgtggagggtggaggcgacggtgccagccggagcacggcgaagcgggaggccgagaaggcggctgcggtggaggcggagggcgccaagccgctgccgctgccacacgaacgggtgccgcagccgcgcgacgtgtacaacgagcagctggagcggatgtgaatgcatgttttctgctcggcagtctcgatcaaccccaatcgacccaatgatc

SEQ ID NO: 33 - DNA, 537 bp, Zea mays
  Peptide Sequence Number=SeqID_9537
  Probeset Number=SeqID_14436
atcttgcaacttataagtttgactttgtttttttcatagaatgttcttacagtttacctttggctagtcagtcatactaattcaaaaggtattaagtagccttcacttgaaccacaatggaagtgaaacatttcttattccaccctgcaattgtttttggttctagtagcagtatccagtggtaatttaactgccactagaggagttgatattgcagtaaccattttgcgtaatgcgtctcctctctaattgagcaggaagcgtttgttcggcatgatgaatgatctgccaactgtttttgaagtcgtctccagtggtgtgaagcaatcaaaagagagggatagatccggtactgacaatggtggtagaaataaactgtcggtaaagcaaacaagcgagccacgattagaaaataacgccagggagcctgatgagggctacgatgaagatgacagcaaccacagcgaaaccttgtgcgggacatgtggtggaatatacagcgctgatgagttctggatcgggtgcgacgtgtgcgag

SEQ ID NO: 34 - DNA, 616 bp, Zea mays
  misc_feature (1)..(15): n is a, c, g, or t
  misc_feature (616)..(616): n is a, c, g, or t
  Peptide Sequence Number=SeqID_9538
  Probeset Number=SeqID_14437
nnnnnnnnnnnnnnngtatctagtgataaaggaacaattcatgtgttcaatttaaagataaatgttggtttgaccacaaatgataagcctctgccagctccagacgctgatgttccccatatgagtccatcattttcttttattaaaggtgttctacctaaatatttccactcggagtggtctgttgctcaattcaggctccatgagggcgagcagtacatcgttgcatttggtcatgagaagaataccgtggcagttgttggcatggatggaagcttctaccggtgccagttcgacccggtcaatggaggagaaatgcagcagctggagtgccacaatttcctaaaaccatcagatcagccgtagtagcaaaataataaagcagcagcaactatttgtctgccttgtgtgccatggctggctgtacagtatctctgtaagctctcggctcggctgagggttaattaagcagaggctaatgttatgtgtaaatatatgcctttggtgacgatgccataatgtgctctgtggaggctcagaaggaagaagccttgtgcagatgaacaatgatagaatgcatcttttatctatgagtgtttggtttgttaggaattan

SEQ ID NO: 35 - DNA, 1109 bp, Zea mays
  misc_feature (1109)..(1109): n is a, c, g, or t
  Peptide Sequence Number=SeqID_10850
  Probeset Number=SeqID_14438
tggcattgtgtagtgttttgagaaaataaacagaaaattgtcccaactcgtagtgtcatcctctcgatgagagtaagagtctcgttgcttacacatatgagggtttttatctgtcttaagagaagtacattctggatcttcttgatcgggcctctcttactgatagcggacagttgaggctcctatggaactcaatattcatctatgtgccacggatggtgagcctcttgaagaccctaatcattattgtcacattgttgggagtcttgtttacgttggtgtgactcgtcctgatatcttttattctgtacataatctcagtcagtttgtttccgcttccactcagcttcactatagtcacttgctttgggttctacgttatcttcgtggaactatatctcgtcgtttgttctttccacgatccaactctttacagttccaagcgtactatgatactacttgggctagtgattcctcttatcgcccttctctttctgcctattgtgtttttcttggtggttcttggaagactaataaacaggcagtggtttctcgttcgagtgtagaggctgagttgcatgatatggctcttgtgactgcagaggtggttgcttgaggattttggtgtctctgtctgtatgtcgactcctcttttgtctgacagtacaggtgctattggtattgctcgtggtccaatgaagcatgagcttaccaagcatattagtgttgatgctcattatacacgagcataggttcaggatggtgttgtttctcttcgatgtgtcctcagagcttcaactggcagatttcttcaccaatgctcagcatcgagctcagcatcggttttatatctccaaactcagtgtttttgtcttcttgatccaccttgagtttgagggggtgttagagatatatgtacttgtttatatttctctaacaccccttcaaactcaagtcggatcagagacattgagtttgagtaaatgtagtcgatgatgctcccgagtttgagctttagtgaagaaatctgccacttgcaaatctgaaggtacatattgtagagtaattgtcttctgacggcaatgagattgagtaaagaaggcatctan

SEQ ID NO: 36 - DNA, 523 bp, Zea mays
  Peptide Sequence Number=SeqID_10851
  Probeset Number=SeqID_14439
cacgagttagacacatgagcaacacaccaagaacgccactgcgcgcgcaacgagagaagtagagagaaggcatggcggccgccacaggaatcgcagatcaccggcatcgtgtctttgtgtggcggtgggtgtggtcaacgttacacgccgcatgtcctgggcttcttgccgcaccagaagagtagtcgatcgatgttgttttcctcaccggagctcagggagcatcgtggatccgccctcgacgtcatcagcaccgccggcgtcttcaccgctgtgaggtcacgaggatctgaagaatcaccctggtaactggaatctcaagtgtcaggagaagagcaggtggtttaggaggagccacaaggcgaggagtatgatctgatctaggtggcgtttctcagttgacattggcgccgacgatccttagttcgtcttatctttattattttattttgtaataagtcttccgctatgtaataaatactctgatgttattgacatttatctctatacactctgttattac

SEQ ID NO: 37 - DNA, 523 bp, Zea mays
  Probeset Number=SeqID_14440
gtaataacagagtgtatagagataaatgtcaataacatcagagtatttattacatagcggaagacttattacaaaataaaataataaagataagacgaactaaggatcgtcggcgccaatgtcaactgagaaacgccacctagatcagatcatactcctcgccttgtggctcctcctaaaccacctgctcttctcctgacacttgagattccagttaccagggtgattcttcagatcctcgtgacctcacagcggtgaagacgccggcggtgctgatgacgtcgagggcggatccacgatgctccctgagctccggtgaggaaaacaacatcgatcgactactcttctggtgcggcaagaagcccaggacatgcggcgtgtaacgttgaccacacccaccgccacacaaagacacgatgccggtgatctgcgattcctgtggcggccgccatgccttctctctacttctctcgttgcgcgcgcagtggcgttcttggtgtgttgctcatgtgtctaactcgtg

SEQ ID NO: 38 - DNA, 739 bp, Zea mays
  Peptide Sequence Number=SeqID_10852
  Probeset Number=SeqID_14441
attttttcgtctattgcctgttcatcccgcccatgcctcctcgttcttcctctccaccgccgctcgcacggatccctctcctcgctgtgggtcgcaagtaggtgccgtctctgggtgcgcatggctcggatagagtccactagcgccaccatcggcttccatgcgagcaaacctccctcctcttttagtcccccgcctgttcagcacgtccgtgcctcctcgtgcttcctctccaccgccgctcacactgatccctcttcttgctgccggtcgcgggcaggcgatggctctgggtgtgcatggctcggatgaagtccaccaggctgccatcggcttacatgcgccagatttcgaggtctgtgtgtcattttggcacaaccctctcctccttcggccaagacggcacctggacgacgatgtcacgcgtacctctgcgtcgcgcgctatgcgctgctgctcctccggccagtgcgaagactagaagacgatgccaccgtgattggcaatgccttgatctacgcacataaactgtttgacggtacatcgcactggaatgtgttgttaataagaaagacaagaatgatgcagtaccttctattgctactcagttgtgcaggtttatttctgctggcaaggattggtatgggagtttcaaagggaggatgtagtaacttctattgctacttcgctgtaactcagaagacactgttttcagctagcgtgaaggataattctgctg

SEQ ID NO: 39 - DNA, 998 bp, Zea mays
  misc_feature (703)..(998): n is a, c, g, or t
  Probeset Number=SeqID_14442
aaaaggaaattacggcacttgtcacgtcacctcaaatccttcaaataggctgcctgtcctcgtcctcgacgcacgcacgtcggttctttggtcggcgctcacagctcactccactcctgctccgcctctgctgcggcgtcgcaatgtcccagtcccagatcgaggcgttcacacgcctggcggtggcggccatggcgctcgccgcggcgtccgcgctcacgacgggcttccccgcgctcgaaccgcgcgcgcatgtcgtgctggccctgcacgccatcctgctgctcggcagcgctgcggtgctgctcctctccccggcgcacggtggcccagaggctgtccgggggacgacggtgccggggtcgctgcggtggctcggcttcgccgggatggcgctctgcgcgctccacgtggacggcggcgtcgccgcgcggagcgaggccgcggaggaggcgccgcggggcacggtcagaggtctcctcctcttcctcgtgttcttggcaggagtttggggagtctacctgtccatgctcaggggaaggggtgccccggccccgcaaccgcggccctcagcgacggcggcggaagaagatgctaacggcgaggaggccaacgccatgcccatccatgacggatgctcgcgtcgttgttgattcgaaggtttgaaaggtgcatgactttctctttacctacctggctaccnnnnnnnnnnnnnnnnnnnnnnnnnnnnnnnnnnnnnnnnnnnnnnnnnnnnnnnnnnnnnnnnnnnnnnnnnnnnnnnnnnnnnnnnnnnnnnnnnnnnnnnnnnnnnnnnnnnnnnnnnnnnnnnnnnnnnnnnnnnnnnnnnnnnnnnnnnnnnnnnnnnnnnnnnnnnnnnnnnnnnnnnnnnnnnnnnnnnnnnnnnnnnnnnnnnnnnnnnnnnnnnnnnnnnnnnnnnnnnnnnnnnnnnnnnnnnnnnnnnnnnnnnnnnnnnnnnnnnnnnnnnnnnnnnnnnnnnn

SEQ ID NO: 40 - DNA, 528 bp, Zea mays
  Peptide Sequence Number=SeqID_10853
  Probeset Number=SeqID_14443
atcaatatagacagcaaccatattgctatcatggtatcacgagctcaagttcatatcctcctttcgctgccctaggcgcagtactcaggctgcgccgcctccctccccctgcgcgtcacctctaggctgcgccctcacctcccctctgcgcgccatccaggcagcgccctcccctggccatggctggtctagaaccgccacctatcgtcgacgacgctgcgacccaggccgcagccgagcatgaagcacgcctccaggctgctgccaggcgtgatgctgcactcgcccaagcccttcaggcagagcaggaggcggccaccgcggcccaggagcgcgatgtcgccactgaacgcattcgcgctgctctcgagcgcgcagcacatgcgcgcgccctcgctgctcagactgccaccgatggaatatttttattagaaaatgtaaatactccatgttctagtcagaaatatttgaccttcgattatgcaatatgtttttttataaaaagtgtaaacatttcatgttcgagac

SEQ ID NO: 41 - DNA, 600 bp, Zea mays
  Probeset Number=SeqID_14444
gtattcatatatcttccggtcttccccacccgaccgcagcgaccgccgtcaagtcgaagaagaatatcctcggtggctcgacctcgggcctcggcacaccttttccccgccgcggccactgaaacacatggcatttgaggttgaggaagatgatgcatatcctagagggcattcaaatgcaattgtgacggatgaacaaggcgattgccatcacaaaggaaaggtgtcattggagcatcatcaagcggttttgctggtatgagcacaatgcctgtaaacacggttgaggtgtcacacaaaatgggaggcatgtgaacttaaaaggaggcattgagatcccatggagccatggtgagccttatggaaatggttttacttgtaattattgcactaatcgtatcaagggtggaggtcagacccgttaagagagcatttgggaagattgcctggaaatgtgactgcatgtattaatgttccatttaatgttaaggcagcaatgaatgatgaagtggttgttcggagaataaggaggaagcgaaacagtgacattaaactctatgttgagcgagaggttagagaatcaaataaagtattagtgac

SEQ ID NO: 42 - DNA, 851 bp, Zea mays
  Peptide Sequence Number=SeqID_10854
  Probeset Number=SeqID_14445
ctcacaacgatcggaccaaagaatcatacccatctcttttgaccattcaaactagtgaaaaatgggggtactcagaaagaaacacaataaaaaatccagaaggccgtcgtttaagagtgttttaacctcaatattagctacacaagccgcaatatttctcttattgctcgccggtgtttccctcgctggcacagccgtcgcatttatcgctagcatgccactattcgtagtattcagtccgattctcgtaccagcgggtgttgccactggtttactggccacgggtttagcagccgccggtagctccggtgcaatggctgtctccctcatcctttgggtcttcaagcgagtaacggggaaggagccgccaaaaatcatgtcaaaagtcttgaaaaaggtgtttcctggtggaggtgctgcagctaaactggcagcaaaaccagaagccgacccagcggccgcaccagcggcagcaccatcagccgcaccagcagctgcaccgagtacatgaaagcggtgggtaataagcaaaggatgatagataaataatccaactttaaaaaataaataataatatttacgtggggatggaagttaaattttcaaatatcactatactaatggatatcgtggaacaaaatagtaacaaatgtaagcatttttattgtataacattttaagaacgaagcgaagtgtcgttgacgttaattttattcaagttcaactaaaatgttattcaagttcttgttcaccaacgttgtcaaacgagacaatctataggcctcaaggaaccattgtaagttacatgtaaaatggggccataataattatggtcaagtaatgcccttttc

SEQ ID NO: 43 - DNA, 896 bp, Zea mays
  misc_feature (896)..(896): n is a, c, g, or t
  Peptide Sequence Number=SeqID_10855
  Probeset Number=SeqID_14446
gtcgagagagagaagatggaggattcgtcggcatcgtttgtaggaaacagatattgggtgctccgacatggaaagagcattccaaacgagagaggcctcatcgtctcttcaatggaaaatggagtgctaccagagtaccagttagcgcctgatggtgtcgctcaggctcagctcgctggccaatccttcctcaagcaactcgaggaaagtaagatatcactggacaaggtccgcatttgctactcccccttctctagaaccactcacaccgctaaggttgtcgctcaggtcctcaatatcccttttgattcccctcaatgcaagatgatggaaactctgcgagaacgctactttggacctacatttgaactcaagtcacatgataagtacccggagatatgggatcttgatgagaaagatccattcatgggaccagaaggaggtgaaagcgctgatgacgttgtatccagacttgccactgccatgttatccatggaagcagaatttcaaaggtgcgcaattctggtggtgagccatggagatccactgcagatgctgcagaacataatgcattcagcaaagcaacaaagcggaggagatggtggtttagctgagagaattcagatgagcagagttgcttctgtcttgtcacagcaccgcaagtttgctttgctcactggtgaactccgacccctcgtctgattgattgcaaaccagaaaaagtattcaactttgggatgttggtcctatctgccaatgacaattcttgcaatttttaaacttttatatggaataagcaagctgtttttgttagaaagacaaaggtttattcttctgtttggaataaatcatgattcatatgcatcttcaaatctgtacacgacctgagagctacn

SEQ ID NO: 44 - DNA, 858 bp, Zea mays
  Peptide Sequence Number=SeqID_10856
  Probeset Number=SeqID_14447
ctgtttcgattgagaagaaagcgatcacgaggatggcgagatcaacctctattctcttcctcacgctactcctttccgcttctctggctttaatccaggcaaaggaagatttgaaggagatcactcacaaagtttacttcgatgtggaaattgacggcaaagaagctggtcgagttgttattggccttttcggcaagactgttcccaaaactgcagaaaatttcagagctctttgcactggggagaaaggtgttgggaagagcgggaagccactacactacaaggggagcaagttccatagaatcattcctagttttatgatccagggaggtgacttcacacacgggaacggtatgggtggagaatccatctacggtcagaagtttgctgatgagaacttcaagctcaagcataccggaccaggtttgctttcgatggccaactctggagaggacacaaacggttcgcagtttttcatcacgacggtgacaacaagctggttagatggaaggcatgtggtgtttgggaaagtggtacaaggaatggatgttgtctacaagattgaagctgaggggaagcaaagtggaactcctaagagcaaagttgttattgcagacagtggagagcttcctctctaaaccctaagcacttgttcttcttcatgaagagaattatggggtttttaagttgtcttgtattataaacactcccgaatgctatccatccgaacaaaagcacttcagttttttgagtttttttaataatcattttctaaatagattttgggacttttgcttgtgtttttgatgtgagatttatgtttgttcttcttcatgaagagaagcaggtttttaagct

SEQ ID NO: 45 - DNA, 701 bp, Zea mays
  Peptide Sequence Number=SeqID_10857
  Probeset Number=SeqID_14448
aataaacacaaaagagttcttcaacgacgagattgagaaacgagaaacgacgatggcgacgaatctcctgaaactctcctctcaaatccgccgcctctctccactcaccagatccctaaccgtccgcacctccgccacatccaccggatcgaagaaagtctccgaccgaatcgtcaagctctccgcgatcgatgccgacggggacaagaaggacatcatcgggctctccgggcagactctcctccgcgcgctcacccacaccggattgatcgatccgctctcgcatcgcttggaggacatcgacgcttgctcggcggagtgcgaggtccagatcgccgaggagtggctcgagaagctcccgccgcgtacctacgacgaggagtacgtgctgaagcgtaactcgagatcacgtgtgctgaacaagcactcgcgtctcgggtgtcaggttgtgttgacgcaggagcttcaaggtatggttgtggctgtccctgaggccaagccttgggacatcccgtaagtgtagtaggtctttatttgttgtttgggaataaatcgctttggaaaaaggattatgataatgaatctgtgatcttccattttgaaactttattgtaatgtggttgaagaacttgcttgttttaacgattcccctgcttcgagtatgggtttgcattttaattgaatattgctttcttggtttt

SEQ ID NO: 46 - DNA, 1107 bp, Zea mays
  Peptide Sequence Number=SeqID_10858
  Probeset Number=SeqID_14449
acctcctccctcctgttccttcagccaccgtgagcaatggcgcccaagcggaagggtggcaacggccggaagaagaccgtcctcctctcgatcgtcaaggaggacgcccgccatgtatgcttctcaaagcgcaagcggggcctgttcagcaagaccagcgcgctgtccctgctcacgggcgcccaggtggccgccgtcatcttctcgcccggcggcaaggtcttctccttcggccacccctccgtcgacgccgtcgtcaaccgcttcatggcgggggacgccgcggtggtccaggccgccgccgacgacaacgggttgcagacgctgcagctgcagcacggcgacatgcgcaccgagctggcggaccagaagaagcggaagaagcgcgctgaggaggccctggacaaggagcgcgctgggggggaccagattgcctcgtggctccaccccgacgtgcgcgacatggggcatgacgacatggcggccttcgccgccgcgctcttgcaggtccaggccgccgtctccggacgcgccaaccaggttctcgtcgaggcctttcgcgtcgacatcagccgtatgctccaggtgcccccgccgccgccgcctccgctccagctcttcggtgccagcaccattgagttcggtagtagcagcagcagcgccaacgccgggatggagatgcaacagatgcagatggttatggagatgccaccgccgcctgacttccccgcagtgatggggatgcagcagttggttatggagatgccaccacagccaaggttcgaggcagcgatggagatgacgccgctgcaggagttcgtcgccgggatgcagaaggtgcagcggcaggggctcgggccgaacgccgacttcccctactgaggagaagaaagacaccagacagagtccgaccgagtccgagtctcagttactatattctaaataaatcgttcagatccatgtaagatccatctacgtgggtccaagatctatgcattagttggttcaattatcttagtagcaattaaatttatggcattgtaatcttttttgtatcggtagtacaatggctggaaattcgtgaatgaaatactattaagccttttc

SEQ ID NO: 47 - DNA, 651 bp, Zea mays
  Peptide Sequence Number=SeqID_10859
  Probeset Number=SeqID_14450
attttcactcagccaaatctgtgaagctcagcttctctcatcaatggcgaaatcagtggcgacggcgacttcttccctcgtgcaaaccctcagacgttacgtcaagaagccgtgggagataaccggaccttgcgctcacccggagtacctcgaatccgttccgaaggcgacggagtatcggatccgatgccccgccacgatcgatcaagaggcgatcgtgccgacctcggatcccgagacggtgtacaacatcgtgtaccacggtagagatcagcggcgtaaccgtccgccgatcaggcgatatctgttgaagaaggaggacgtggtgagtgagaagaagatgttcgaggagacggacttccctagggtttacttgacgaccactgtggaggaggatgagaacgcacgtggcggaggctacgagtaacaaaaaaaaaaggttttcttgtagtctctgacttgctgatgggcgaaggactgcgtgcgatatttctctaccgacagaagattttccatggtttgctttactaataaggtttgtagtagcttaatgtactgcaagacacactatttttcttcacaggaattagattgctgttcagacattctccctatgtttacgcatatctatgatgatgatgatgataaact

SEQ ID NO: 48 - DNA, 677 bp, Zea mays
  misc_feature (677)..(677): n is a, c, g, or t
  Peptide Sequence Number=SeqID_10860
  Probeset Number=SeqID_14451
agtgttttctagtgactcggaaaggaaagcgtgactcgctctgaagactcagtgagggctctgtgatcggagttgtaaaaatgtcgacggtggtagatcggagtgtatcgacgctgaatccaaacgcgccggcgttcgatccggtgggattccgtgaggtagaggatttctctcccaagtggtgggagctggtgacaacatccaagtggttccgtgacttctggctcagtgccaactcggaggagtatgagttcggcgagttctcagatatggaggacgagttcgaggagctagtcatgacgtcatccggtgagaatgagatggatggatcttcggtgagagaatcagatgttgggaggtacttgaaggtgcttctgagcatggcgaagtctacgaaagggaagctttacagatctaatgtgtcttgttctgccaagtataaccagaagaagatgaacccaaacttctactgtcgccggaaccatcacatctatcagcctcggtgaaaaggttgcagcagcgtctgggaaagaaataaaagctcatctctaaatctcttgtgttttcatgaatgagatactctcatctttacttcttgttctgtactacttgttcctctgattatgtgaatattcttctgttttgtgctttgcgtttatcaaaataatttcgcatan

SEQ ID NO: 49 - DNA, 857 bp, Zea mays
  Peptide Sequence Number=SeqID_10861
  Probeset Number=SeqID_14452
aaaacacaaaaccagacctcaacttcaaacagcttctgaacaactcttgaaaccaaaaacttctctaatgccggaagaaatacgagagcacggtggtcacaccgatcctaaaccttctccaccaccgccaaaacgtggcctcatcagccgcaagagacagctcgtgtttctctccttcatgattctactagctgctaaaggactcgttggtatcggagaagtagcgtttgtaatactgtcttatatatacttgtacgagttcatctccaggtttgccttcccacgcaagcaaaacgagcagaggaggagactctcaaaccctaaaaacaaactctttcaagcttacttcctcgccactgccatcatcggcctactcttcccgatttgctacatcggagatggactataccggggagacatccacggtgttagagctgcagctccacatcttttcctcctctccggtcaagccttcaccgaaccaattggtttctccgaccggtttgcaacacccattggtattctcggaccggttttctacaacgctcgtcgtatcttcgctctgttggattgggttaaagccgagttcgcagatattcagcgtccaggtggtccaataagattgtacggaggaagagctatagcgtcggttaacaccgtcatgtggttttacaatctgtttggtctcttgttgcctgtgtttcttcctcggtcttgtgagatttacttctcagccgacgacaacaaagtagattaagtaacctcccgtctactttctactttagaatctcttatgttgtgtttgtgtcagtgcttggtaaagattattgttaataaaagcgacagtttatgactgc

SEQ ID NO: 50 - DNA, 1022 bp, Zea mays
  Peptide Sequence Number=SeqID_10862
  Probeset Number=SeqID_14453
agatttgatcccaacgaaaacgcgtcttcatcttcctcctcctcctttcttttctctcgattttggctgaaagcagctttgtcttttttactacaaccaaatatggatgactgggaggatgaacaaattgcaccacttccagcaaaagttgtgcttaaaagcaactgggatgatgaagatgtagatgagaatgagattaaggactcatgggaggatgatgatgacgaacaacctgctcctccgcctccggtaaagcctgctcctccgaagaaagctgttgagaaaaagggcaaagcggctgaggctccaaaagaagaacctttagatcctctctctgagaaacttcgcatgcagaggcttgttgaagaagcggactacagggcaactgccgaactctttggaacgaagggtgaagagaaaagccttgacatgttcatccccaagtctgaatctgattttttggaatatgctgaaatgatttctcataggcttacaccatatgagaaaagttatcactatatcgcattgctgaaagctgtcatgagactttcggtgaccaacatgaaggcagcagatgttaaagatgttgcttcgtccgttacagcaattgcaaatgaaaagcttaaggctgagaaagaagctgctgctggtagaaagaagacgggtggcaagaagaaacagcttattgtagataaggccgatgacgatctagtagctggtccttatgatgccatggacgattttgacttcatgtagattacaagagctttgtgattgtgagggaatacagtttcgattgcctggcgtctgtttcatcattatctctcgggaagaagagcaaaagtttcttagttctgggatatatatagttggaacaaagaagtcttgctttatgggttttggtctgtttggtctggagacattctctaaagagtcatgttttgtttcttttctgttggttaaaaagctaatactttaatcaattctcgtgtaatggtaatacaaatgtcttatctttgctc

SEQ ID NO: 51 - DNA, 698 bp, Zea mays
  Peptide Sequence Number=SeqID_10863
  Probeset Number=SeqID_14454
actgtgattgaatcgtagacgacggcggcgatgacgacgacacaggagcttgcgatggaaggggagaagcatttagaggagactatcgaagcggcttttcagatcatttccgccatgaatgatgagctctgcaatccttctctatggtctacatcagccaccgcgagttccacgactggctccaacggatcagctctcgtttccgccgatgcggctgggatcgatggagcaccgcatcattcggaatctggtggtggtggaggcggaggaggaagtggaaacagtgctctggatgaagctagtcttcgctataagaactcagtgacttctcttcgtgctgttattgctgcgattcccaattctcagaaggcaaaagtatctgaagcggaaaatggtttaggaactcctgaagaagaagacgaaatcgaaaagctggaggagaaagccttgagtctcaggaaggagattgcagagaagaatgttcatgtcaaagagcttatcgacaaatttcgacaacttatagcagatatctccacatggcaaagcccttgttctgtttgagttttcgttttgacattgttgtgatcagtttggacaagattcaaagcctttgttcttgatgtaatagttttttaggtattttgctcttttgatttaatgaaagaaagcagaaaaccttaaagattacgttagtatat

SEQ ID NO: 52 - DNA, 669 bp, Zea mays
  Peptide Sequence Number=SeqID_12251
  Probeset Number=SeqID_14455
atctcaatctcgatttgagacgaaaaggaagagaagctgaagctaaagatgggtcaaggagaagaagacaaaagcaaaggcttcgctgatgaagcaggcacccatcatcagtacggtacgtttcaaggcgtttccaattaccctcctccgcggcctcagaactctcctccggtcactgggtttcctcagccttctgctccgcctcgagtctacgattccgcccctcctcattacgcccatggttatcaaaccgttccggtacatggtattgctgaaggaagacctgtgcatgtgcgacaacgccgccttccttgctgtggaattggtcttggatggttcctgttcatagttgggtttttccttggagcaatcccttggtacgtcggaatgttcatcatgatagttggaaggaggattgaccacagggagaagccaggatacattgcttgcaccatcgctgctatacttgcaacaattgctgtgattcttggtgtaactaaaggagcagaagactggtgatcaatcaaaactatctttgtggtcaagtcagaacgtttgtataggtgtcagacaaacatttcgtcttgtattttattatattcgtgctgcttgaagaaagacaaaaaggtgtaaacttaataaaaagatatgagttaagttatttgcaag

SEQ ID NO: 53 - DNA, 842 bp, Zea mays
  misc_feature (842)..(842): n is a, c, g, or t
  Peptide Sequence Number=SeqID_12252
  Probeset Number=SeqID_14456
ctttttccacttcctccctcctaatcctaaatcagcatcaatggcgattaccttctcagatctacacacagaggaaggcctcaaatccgtggaggagcacctcgccggaaaaacctacatctccggagatcaattgtccgtggatgatgtgaaggtatacgctgccgtttcggtgaaacctagcgatgctttccctaatgctagcaggtggttcgattgcgtcgcttcccatctagctaaaagcttccctggaaaagccgttggagttagtatcggtggctctgctgctgctgctcctgctcaagctgaggcacctgcagcagctgcagctgatgatgatgatgacatggatctgtttggtgacgagaccgaggaggaaaagaaagcagctgaggagagggaggctgccaagaaggacaccaaaaagcccaaagagagtggaaagtcctctgtgctcatggaagttaagccatgggatgacgagactgacatgaagaaacttgaggagtgtgttcgcgctgttgagatgcctggtcttctttggggagcttcaaaactggttccagttggttacggcatcaagaagctcacgatcatgctcacaatcgttgatgacctcgtgtccccagacaacctcattgaagactacctcacctgtgaacctaacaacgagtacatccagagtgttgacatcgtcgcattcaacaagatctagagactttaaaaacctctccccctaccaaacgatacattttgatttccttccaagttttgttatcttttgttgtttgcttgagatgcttattctctagttgcaagacctatgttacatgctatcaaan

SEQ ID NO: 54 - DNA, 733 bp, Zea mays
  Peptide Sequence Number=SeqID_12253
  Probeset Number=SeqID_14457
actacttctcttcctactccatctttcgcttgtacaaacctaatcagaaatggcaacggcgtcgtttagtatgctgtcagtgttcgccgctccttccggtggattgggctctcgcaacatcagaaacacaaaccaagtcttctccaataggaatcctttggtgggagtcaggtgcatggctcaggacgatcctatcaaggaagaatctcctctgccttcgacctcggccactccaccacagacgccgttgtattctcctccaccacttagcaagcctaaggtgagtacgaagtttggagatcttttagcgtttagcggtccagcgcccgaaagaataaatgggagactcgctatggtagggttcgtagcagcgattgcggtggagcttttgaagggagagaacgtgtttgctcaaatctccgacggtggagtcggatggtttctaggaacaacggcgttgctaacgttggcatcgatgattccattgttcaagggaataagggcagagtcaaagtccaaagggtttatgacgtcagatgccgagctatggaatggtcgattcgccatgctcggcctcgtggccttggctttcactgagtacgtcaaaggcgggactcttgtctaagtctcttttttttttcttcttttttgcatttcttgtgttaccctttagctatgttttaagggataatttggaggataataagtaaatcaaagttttgtttttaatatg

SEQ ID NO: 55 - DNA, 799 bp, Zea mays
  Peptide Sequence Number=SeqID_12254
  Probeset Number=SeqID_14458
gaacctctctgcctcttttgaccaaaaaaaacaaaagctctgtgcctctttgcagcgaaagctctatcaacaagacgatgattatctcagagaccaaccgcagagagatctgcaagtacctcttcaaagaaggagtattgtttgcgaagaaagatttcaatctcccgaagcatccgttgattgagtcagtgcccaacttgcaagtgatcaagctcatgcagagtttcaagtccaaggagtacgttagggagacattcgcgtggatgcactactattggtttctgaccaacgaagggattgagttcttgagaacttatcttaaccttccgtctgatgttgttcctgcgactttgaagaagtctgctaagcccattggtcgtcccttcggtggcccacctggtgatcgcccaagaggaccacctcgctttgatggagaccgtccaagatatggtgaccgtgatggttaccgtggagggcagcgtggtggtgatgttggaggtgaaaagggtggagctcctgctgattaccagccctcgttccaaggaggtggtggtaggcctggatttggccgtggcgcaggaggtttcagcgcagcagcaccctctggttctggtttaccttgaaagaaatttatgtaatcgttaagctatggaaagactgtttttttttttttttttttggcttcagttttgtttctgtaatacacatcgggaatctataatctatctatttctatgacttttggtctaaagaaacaaatcttatagttgaattcttgttgaaatgcacgtttcttatt

SEQ ID NO: 56 - DNA, 751 bp, Zea mays
  Peptide Sequence Number=SeqID_12255
  Probeset Number=SeqID_14459
aaaaaacgtcttgatagggaacaaaaagacatggcttcttcttcttcttttttcactttctctagtcagaccacactgcattcccatcttcacagaaacacctttctcaccaaaacccaatttccagttcccacaaaatcatcagaatctaacttctttggtctcagactctctccctccacctctcgctctccgctctctccctgttctttcaaaagctcaatctttgctaaggttaacaaggggcagagtgcaccagacttcacactaaaggatcaaaatggaaagccggtgagcttgaagaagtataaagggaagcctgttgttgtatatttctaccctgccgatgaaacccctggctgcaccaagcaggcttgtgcgttcagagactcttatgagaaattcaagaaagccggcgcagaggtcattggcataagtggtgatgattctgcttctcacaaggcctttgcaagcaaatacaagcttccttacacattgttgagtgacgaagggaatagggtgaggaaagattggggagtgccaggagatttatttggggcattgccagggagacagacttatgttctcgacaaaaacggtgtcgttcagctcatctacaacaaccagttccagcctgagaaacacattgatgagaccttaaagttcctcaaagctgcttgatcttgtattcttctcttcttcctcatctggatgactggatatttacaacaacaattcatgacgttcctct

SEQ ID NO: 57 - DNA, 641 bp, Zea mays
  Peptide Sequence Number=SeqID_12256
  Probeset Number=SeqID_14460
agattgggctgatcgctcagcgagtcaagtttgattttctccgggagagagagagatcgtttgattcttccgatggaggaggagatcggagggagggaggatagatggaagggatcgttagagaacataacggagatggcttcgaatctcgattctctacagaagcttctcctcaagaaagctgtcttcgttgaagaagacactttcgctagagcttctctagtctccgaacaaggtcgagcaatcaaggtacttgagcaaagggtacaaacactagaaagagaactagatgctgccattacagctgctgctcatgctcggtctgagaaacgccacgctgagtcttctcaaaaagctgctgagtcacgtgcgcaagaggttacaaaagagcttgaaaacaccacaaaggttttcaagctgcatatggaagagctccgaggtatgcaagaacagatatccaaacgcgataacgagattaagctcttggaatctataatccaaacgctcggcgggaaagagcggttgggaaaaagcggtgtgagtggatgatgcgttttttcacttgtagaaattttgtaagcttagtttgtgagacagtttatgtatgacaatgatactcctcttccaagataaaatattac

SEQ ID NO: 58 - DNA, 702 bp, Zea mays
  Peptide Sequence Number=SeqID_12257
  Probeset Number=SeqID_14461
aaaaacacacaaagctcatcgagagaagattcagacatttcatagcttctttattccttcccgaaggggtaccctgagatcacaaaggataacaaacaatgggcaagggagttgcagtcttgaacagcagtgagggtgttaaggggactatcttcttcacccaggaaggagacggtgtgaccactgtgactggaacagtttctggacttaaacctggtctacatggtttccatgtccatgctcttggtgacaccactaacggttgcatgtccaccggtccacatttcaaccctgatggtaaacaacacggtgccccagaggatgctaatcgtcatgctggagatctaggaaacatcattgttggagatgatggaactgccaccttcacaatcactgactgccagattcctcttagtggaccaaactctattgtcggaagggctgttgttgtccacgcagaccctgatgacctcggaaagggaggccatgaactcagcttggctaccggaaacgcaggcgggcgtgttgcttgtggtattattggtcttcagggctaagtaagctgttacttatcgaggaagggagtgatgcaataaggaggtcatatacctctagacctggctagtttgtgtgtgtatctgtgtgtactgtgtgtgtggctataatctctcctttgtggctcaatacattttatttaagacc

SEQ ID NO: 59 - DNA, 604 bp, Zea mays
  Peptide Sequence Number=SeqID_12258
  Probeset Number=SeqID_14462
acaaagatctcattatctaactcagatcatctatctgaaaggcttctcaattttggttcatcttatattgtagccatgtctcagactgtggtcctcaaagtaggtatgtcatgccaaggctgcgttggtgccgtcaatagagtcttgggcaaaatggaaggggttgagtcatttgacattgatataaaggagcaaaaggtgacagtgaaaggtaatgtggagcctgaagcagtttttcaaacagtttcaaagactggcaagaagacttcttactggcctgtggaggctgaggctgagcctaaagctgaggccgagcctaaggctgaggccgtgactgagactaaaaccgaggctgagactaaaaccgaggctgagactaagattgaggctaaggttgatgcaaaggctgatgttgaaccaaaactcgcagaagctgagactaagccatcagaagtttaagtactaaagatgaaaatggggctttttatctgtatttgaattgtttcttattgtctttgaatcgtgtgttgttgtaagactaaaaaatttatgctttatcgacgtacctaacattttcaagttttgataacaagatgttggaccc

SEQ ID NO: 60 - DNA, 664 bp, Zea mays
  Peptide Sequence Number=SeqID_12259
  Probeset Number=SeqID_14463
atccttaaaaatccgacgattcagaaccctaagcggtggatcctcaacaactatggctgaacaaccacagcagcagcgagaatccgattcttcccctcctcagctgaagttaccttctttcgtcgttaacttgttcccctttctccaacccaagtctccttctcccgctaacggcgccgatggtgctcctaaacccgcgggaggagtctccaaggacaaggagactcagaactcgacggtctctttcccttacaatcctcccaagagcacagagccactcaagcttgaagccgaacctagctccggaagcacttccaactccctcgtcatttggcaggtatatgcacttggagggtttctggtcctgaagtgggcttgggcgagatggaatgagaggaaccagacaagtgacaaaaaggaggatgatgatgctgatggtgatgatcaagctcctcatccggaagatgattgatgatgaaggctgctagtcatatttgcacgaagacgatgaatctgttgcccccattttggttctgtatagcaaaaactccctttcagattttcttatattcccattgtatctactcaagactgtcttgagttccttctacttctgtaatgacactacttttctcctctcccaatgcagtttttttctcttttc

SEQ ID NO: 61 - DNA, 604 bp, Zea mays
  misc_feature (604)..(604): n is a, c, g, or t
  Peptide Sequence Number=SeqID_12260
  Probeset Number=SeqID_14464
aagttcagtactcgcatagccttcttcccaccgagcagcccctcacgaaccctagcttgctaaaccctactccttcccttccccgatggatccgcagcaaccggagcctgtcagctatctgtgcggagattgcggagctgagaacacactcaagacaggggatgtgatccagtgccgtgaatgtggttaccgcatcctgtacaagaagcgcacccgtcggattgttcaatatgaagctcgctgaagacaagaaacaaatatcattcactgttaagtgtgtgccctgagacaaagctactacaatggagaaatgtattaggcagtactcgctcctaggtagtaatctttccattggactttggcttgaagtggtaaaaacttgtcaaacgtgtattgagattttagacatttgaggattgagattatgcatcttttagctggattttaaaacatggttattattgctgtcgccaggaatgaagtgccctgttggttgcacgcaggctctggctgttatttgctgcctttgtcgttattactacctgtgtaactattttaagacgtttttgtagttcaaattgaaatgtaaaaatgtcttatattn

SEQ ID NO: 62 - DNA, 714 bp, Zea mays
  Peptide Sequence Number=SeqID_12261
  Probeset Number=SeqID_14465
ctcacactcagattcaaatcagaaaacttgagatcaatcggagaagtaagaagaagatgggagctttcgggaagctgatcgacgcgatcctcttcttatacttcgctctgatggtgttcatcgcgccgctcttcgacgcccaaacggtgcttcctaaagaaatctacccggcgattctcaccgatctgaaccgcaactacatcgccgactttggagattacttgctcgcggaggagccgcatttcctcgtcggactcatctggcacgagctcgtactcctgtggccgctctcgatcgccaacgtctacgcgattctcgccggaaagtcgtggttcgccaccacgtgcttgctctacggagcttccgtcgtcacttccatgtctgctgtcctgggagagatgctaggttcggggaaggcatctcagaaattgctaatgatgtatgtgcctttcatgggtattgggatactggctactcttcgtggtttagtctctcgttcaaccaagagcactggatctgtcgacaagagatccgctgttaagcctaggaggaagctggcctagaagaggtggtttctcgtttgtgatagttggttctaatttatccttttctttctttatgtacctttggttgaaagcgtttcctctgaactctcttgtttgttctcagcaacaatgaaatgtttccttgatcgaaatcaaattcattgctttt

SEQ ID NO: 63 - DNA, 1320 bp, Zea mays
  misc_feature (1320)..(1320): n is a, c, g, or t
  Peptide Sequence Number=SeqID_12262
  Probeset Number=SeqID_14466
atttacgattagcctagcgactcggcatggctactgtcttcccccgtgacgccggcgtctccacgccggaagccgacgaggctaagaaaatctacgatgaagcacggcgagtggtgtccacctacgagactgttcccagtcccagcggaaccctgcaggattactgccgccaccccagcggctggtgcataaccctgccgatcatggtgagctccatggtcgcagagcagcactttgaggcgcgtggcaccgacgtgctccttgttacgatgcccaagtccgggactacctggatcaaggccctcctctatgctgcggcccaccgcactgacgacacatcatcgtccatactccggcagctcgcctcccacaactcccaccagctcgttcctttcctcgaggcccaggtctacaccaaggaccagattccagacctgagctcgcttcccgcgccacggctcttcgccacgcacatcccggctgagtcgctgccaccctccgttgtggcgtccggctgcaaggtggtgtacttgtgccgggaccccaaggactgcttcgtgtctctctggcactttatgaacaagttcaccccatgggacatcgacgaggcacacggccggttctgcgagggtgtctcgttgtatgggccattttgggagcacgtgctgagctactggcgttggcacgtcgaccgaccgggtcaggtgctcttcctgacttacgaggagctcagcgccgacccgctcggccaactgaggcgcctagccgagttcattgggcgccccttcacgccgggggagcaggaggcgggagtggacagggagattgcggaggcatgtgccatgaaaagcatggtcaaccaggaggtgaaccagtccaggacgaccgaaatcgttgagatgccgattcccaacgggatcttcttccggcgaggcgtggtcggagactggaccaactacctcacgccggagatggcaggaaggatcgatgagattaccaagagcaagtttgaaggatccggcctcatgctgccgaaaacaatctcggaaatctcaaagatctagcatccctccgtcgtgtttgatgtttgaaatcgttcaccttttttttctcttgttgtaaactgcaccctgctggcactggcttggctgaataaaaaaagcttgcattgttcttgttgatcaaacgaaataccagctggcgagttgttgatgttacggaaaaggcctgcttagtcttaggtatttttcttatcggtttaattgtgatcaaatgtgtttgtactctgcttaattattaataaaaatgattgtatgcacn

SEQ ID NO: 64 - DNA, 702 bp, Zea mays
  Peptide Sequence Number=SeqID_12263
  Probeset Number=SeqID_14467
ataacccacagagaacccaagaaaccttctcaaatcctctaaagaaaagaaatggcctccacagctatctcaagcgtcatcgtcggaacatccttcctccgccgtcaaacatctcccatcagcctccgttccctccccttagccaacactcagaccctcttcggcctcaagtcaggaaccgcacgtggtggacgcgtcacagccatggctacatacaaggtcaagttcatcactcccgaaggagagcaagaggttgagtgcgacgacgacgtttacgtcctcgacgctgctgaggaagccgggatcgacttgccttactcttgccgtgccggttcttgctcgagctgtgcaggtaaagttgtgtctggttttgttgaccagtctgaccagagtttcctcgatgatgaccagattgctgcagggtttgttctcacctgtgcggcttatcctacttctgatgttaccattgagacccacagagaagatgacattgtttaagacaaaagctccattaacatgctgcttttgatggtttcataatcattcatgtctttacattttgggttgagtttgttgttactttagtataatctatattgttgtctgttgtaattgttcttggtttggaccatcttttggttagatcaatggataactgtttcaaacttatggtaatgcaatttctgaagaacttttgatgag

SEQ ID NO: 65 - DNA, 811 bp, Zea mays
  Peptide Sequence Number=SeqID_12264
  Probeset Number=SeqID_14468
atcttcctcaattctccaattcccagatctgttagggatttcaaaaagagccatggagaatgggaaaagagacagagacgacatggaagtgcaaccctcccctagaaagccacgtgtactcctcgcagcaagcggaagcgtcgccgccatcaaattcggcaacctctgccactgcttcacagaatgggcggaagtgagagccgtcgtctcgaagtcgtctctccacttcctcgacaagctctctctcccaccggaagtgactctctacacagacgaagaagagtggtcgagctggaacaagatcggcgatcccgtgcttcacatcgagctcagacgctgggctgacgtcatggtcatcgctcctttgtctgctaacactttagccaagatagctggtgggatgtgtgataatcttctgacttgtatcataagagcttgggattatagcaaaccgctttttgttgcgccggctatgaatactttgatgtggaacaatccttttacggagaggcatcttttgtcgcttgatgagcttgggatcacactcattcctccgatcaagaagaggttggcttgtggtgactatggtaatggcgcgatggctgagccgtctcttatctattctactgttagactcttttgggagtctcagggtcatcagcaaagtggtggtggaactagttaaaaaccatggtctaatggttggttctgttttcagtgtcatagattgttctgtctgtactgctttgtgtttgtatatgttaagaacagctgtctggattgatgtctcttaactaccattttcactgtc

SEQ ID NO: 66 - DNA, 614 bp, Zea mays
  Peptide Sequence Number=SeqID_12265
  Probeset Number=SeqID_14469
agattcgaagctgcgagagagagaagagaagattaagataagcgatgggtgtggagaagcaagtcatcagacccggcactggtgccaaacccgctccgggccaaaccgtcaccgtccactgcaccggattcgggaaaggtggtgatctatcccagcagttttggagtacaaaggacgctgggcaaaaacctttctccttccagatcggtaaaggtgctgtgatcaaaggatgggatgaaggcgttatgggaatgcaaattggagaggtcgctcgcttgcggtgctcaccggattatgcatatggtcctggtggatttccggcgtggggaatccagccaaactcggttctcgactttgaaatcgaagtactcagcgttcagtaatgacaaattcacctcaaaactttatgttaaattattaagtggttgttaccctttatgcttatcgcttatgggatctttgttgaaacaaaactttgtgatgtcacttgtcagtacttctctaaactcggtgggcgacgttttatcttaaataaaagacccccgttactcttgtttcagtcctaatgctgcatgttttcttgcagttattgtggtattattattgttgtgccg

SEQ ID NO: 67 - DNA, 680 bp, Zea mays
  Peptide Sequence Number=SeqID_12266
  Probeset Number=SeqID_14470
aagctaatcttctcacaatctctctccaaaaagacctgaaaaaaaacatcacaagtttgatcaagaaaaccaagaaagatgccgaaagacaggaagattggaatcgccatggacttctcggagagcagcaagaacgcactgagatgggctatcgacaacttagctgataaaggagacacgttttacatcatccatgcgttaccaacatctgaagctggaccacgtaactccctctggctcaaatccggttctcctctcataccattggtggagtttagggaaccagagactatggagaaatacggtgtccaaatcgatataccagttcttgatatgctcgacactggttcgaggcagaaagagattcatgtagtgacgaaactatactggggagatgcaagagagaagttggttgatgctgttaaatctctcaaacttgattctattgtcatgggaagcagaggactcagtgcccttcaaaggataataatgggaagcgtgagcagctttgtgattcaacacgccccttgcccggtcaccgttgtcaaggactaaataaaaggctgttatctcatgtgttcgatcaaaaataattatcgcaatttatgcctttaataaaaagaacttctttctttcttggttgtatttgtatttgaaatcataaatatattaagttccat

SEQ ID NO: 68 - DNA, 651 bp, Zea mays
  Peptide Sequence Number=SeqID_12267
  Probeset Number=SeqID_14471
gaagaagctacaagttaagaggaagaggaagaggaagaggaagcagaggaataatggagtcaccgaagaagatagctcatgagatcggtggtgtgaagagagacgctcttcgatttggtctcaacggcgttaagagcgacatcgtcggatctcacccgctcgaatcctcttacgaatctgagaagagatctcatgaggcgatgaagaggacgatcattgggcatacctacgggactgcacttcctttgaagatggatatggacaggcagattctctctcggtttcaaagaccggctggaccaattccgtcatctatgctcggtttagaagtctacacaggagccattgatgactttggttttgaggattacttgaatgaccctcgtgactcggagactgtcaggccagtagacttccaccacgagatggaagttcgtcttggcatgtcaaagggcccggttgccccaagtttcatttaaggccctcatcatggtcgtggtttattacatgttatgtcttctttagcttttgaatgatgaatcaagtggaatcgtgtatgaacgtcttttgacatgtactctcttcaagtgtgatgtctgatgagacaactactgaatatggtcaatcaattctagtatgttaggttttgcg

SEQ ID NO: 69 - DNA, 698 bp, Zea mays
  Peptide Sequence Number=SeqID_13663
  Probeset Number=SeqID_14472
acttccactttcttctctttcgcttttgctctgttcactcagagcataaaccctaaaaagagaggagcaagaaactaaaaaaacacgaacatgatgttgttggggaagagacagagaccagagataaagagaaccacgagcctgtcggagataaaattcgatttgaacctaccttgcgaaccagaggagccgtccgatcatcaacatgttcagacgttgagtccaaggaaaagtaagctcgtgaccgttgatgaacatcgccaggttcatcatggactgttagatcaacggctcttagcgatggtctcgccgagaggtacacaaaggagacactcagaagattactccactcacgccggggattttctgaggtgttgctctctctgtaaacgtaatcttgttcccggccgagacatctatatgtatagaggagatagggcgttttgtagcttagagtgcaggcaacagcagattacggtggacgagaggaaagagaagggcttggttaggtccaccgtcgccgccggatccggcaaaggagagagagtttccgccgccgtgtaggtcacctttacaactatatatatttatatccgtatgttgtatatggttattattattatgtctaaacgcacattgaccgtgattaacctttgttaatcatcttaagctttgcttttaaacttaatttaagagtt

SEQ ID NO: 70 - DNA, 933 bp, Zea mays
  Peptide Sequence Number=SeqID_13664
  Probeset Number=SeqID_14473
aacaatggcagttcctccacttctcctcctcacactcctctccctcccttctcttctcatccacgccgccatctccgatgcttaccccaccattcccggaaccgctccgatcgacggaggtttctccgatgaactcaaacccatccgccgtgaggtctacggcgaaggcaaaatcttcgacatcagccaccgctacacgccggagatgccggcgtgggagtcaaaagaaggaatcggacggtttctatggctagccgcgagcatgaagaacgggtcgctcgctaacaactccgagatgaagatcccgactcacactgggacccacgtcgattcgcctggacacgtgtacgatgagtattacgacgctgggttcgatgtagactcgcttgatctccaagtcttaaacggtcctgcgttgttggttgatgttccaaggaacaagaacataactgccgaagtgatgaagtctcttaacataccaagaggagtccgtcgtgtgcttttcagaacattgaatactgacaggcgtctgatgttcaagaaggagtttgatacaagctatgtcggattcatgaaggacggcgcacaatggttggtagacaacactgacatcaaacttgttggggttgattatctatcagtagctgcatatgatgatctgattccgtcccacctagtattcctaaaaggccgagagactatactggtggagggattgaagctggatgatgtgaaggcaggagtctactctgttcattgcttacctctaagacttgttggagcagaagggtctccaattcgctgcatcctcatcagttgatttcttcctccaaaacttggagttgtctgtatgcaagttaacctttcgtatctttacttcaagatcttatgcttgacaaaaaaaaaaagtaaaataaataaggaaacttggcg

SEQ ID NO: 71 - DNA, 623 bp, Zea mays
  Peptide Sequence Number=SeqID_13665
  Probeset Number=SeqID_14474
ataggtatcgccgacgagtgaactgctacaaaagatctcacaatggaacaaactttcatcatgatcaagccagacggcgtccagaggggtctggtcggtgaaatcatctgcaagttcgaaaagaagggtttcactttgaaaggtctaaagctgatcactgtggaccgtccttttgctgagaaacactaccaagacttgtctgccaagcccttcttcaacagccttgtcgattacataatctctggaccagtcgttgctatgatctgggaggggaagaacgttgttttgacaggaaggaagatcattggagcaactaaccctgcggcttctgagccaggaaccatccgtggcgattttgctattgacattggcaggaacgtgatccatgggagcgactcagtggagagtgctaacaaggaagctgcgttgtggttccctgacggacctgtgaactggcagagcagccttcattcttggatctacgaatgattctaacgcgtgtggttgtttgttaccctttttatcctttggttatgaatcgaaacatgtctctccgttgttctttttgttagctttgttgcttgtcttcttccctgggaatctatgaaaacctatcttgcacc

SEQ ID NO: 72 - DNA, 953 bp, Zea mays
  misc_feature (953)..(953): n is a, c, g, or t
  Peptide Sequence Number=SeqID_13666
  Probeset Number=SeqID_14475
aggaaataatatacaaaatcaaaggttaagaaaaaaaatgggtgaggagaagaatcagcagcacttcgtgctagtacatggtgcatgccacggcgcgtggtgctggaacaaggttaagccgcttctcgaggcctccggccaccgcgtaaccgccttagacctagctgcttcgggtatagacacaaccaggtctatcactgagatctccacatgcgaacaatactctgagccattgatacagctaatcgcctcattaccaagtgatgagaaggttgtgctcgttggtcatagctttggagggttcagcttagccatggccatggataagtttccagacaaaatctctgtctcagtcttcgtgactgctttcatgcccgataccaaacactcaccatcgttcgtcgtggataagtttaaacgggatacgccaccagaagcatggttgggctcggagttcaaatcatatggctcagacaattccggtgtgtcaatgtctttcagcactgagttcatgaagcacgctctctatcaactttctcctgttgaggatattgagcttggattgcttttaaagaggcccggatcattgttcatcaacgatttatccaaggtggagaacttttcggacaaagggtatggatctgttcctcgagcttacattgtgtgcaaagaggacaaaacaattacaaaagaaattcagtggtggatgatcgataattatccgacgaaagtagtgaaggagatggaggacacagatcatatgccaatgttctgcaagcctcagttactaagtgactatctcttggaaatcgcggaaaaattagcttaaattatcttgttatgaaaatgtatttggatacaaataagtgttgtcctgcaaatgggtctttctaaagatcaagacttttatcgcgttcaaatgtttgacataatttaaaataaacttaacagtn

SEQ ID NO: 73 - DNA, 913 bp, Zea mays
  Peptide Sequence Number=SeqID_13667
  Probeset Number=SeqID_14476
aaaacacacctctccttcacatatttcttctttgtagtaatcagaaaggcagagagagagagagagatcagaggaaacaatggcgtctaactcgctcatgagctgcggcatcgccgccgtctacccttcccttctttcttcttcaaagtctaaattcgtctcagccggagtttctctccccaacgttggtaacgttggccacatcagaatggctgctcactggatgcccggcgagccacgtccagcttacctcgacggctctgcccctggtgactttggatttgacccgcttggacttggagaggttccagagaatcttgagagatacaaagaatcagagctcatccattgcagatgggctatgctcgctgttccagggattttggtaccagaggctttgggatacggaaactgggtcaaggcccaagaatgggcagcagtgcctggaggacaagccacttacttgggcaacccagtcccatggggtactttgcccacaatcttggctatagagttcttagctattgcctttgtggagcaccagaggagcatggagaaagaccctgagaaaaagaagtaccctggaggtgcatttgaccctcttggatactccaaggacccgaagaagtttgaggagttgaaagtcaaggagatcaagaacgggcgtcttgcgttgttggcgtttgtaggattctgtgtgcagcaatcggcctacccaggcacaggaccattggagaacctggctactcacttggcggatccatggcacaaaaacattggcgatattgttatccctttgaactagtgactttgtaaagaaaagatagtaatgtgtcctatgagctttatgtgtatcaaaactctctgtaatgaatgacagattgtctgaaacctttgttttgtcttggtgatc

SEQ ID NO: 74 - DNA, 951 bp, Zea mays
  Peptide Sequence Number=SeqID_13668
  Probeset Number=SeqID_14477
aacctttattttgtttctgccaaacacttctcttcctctctccaatggcttcctccttatccttcgtctcatcctctcacctcactctccgcactccttccctcaccctacgcaaactctctccccctagaacctccgtttcgttctccgtcaaggcccagtccgtcgcactctcccaagacgatctcaagaaactcgcggcggagaaagccgtggaggcgatcaaaccggggatggtcctcggcctcggaaccggatccaccgccgccttcgccgtcgaccaaatcggaaaactcctctcctccggcgagctccacgacatcgtcggcatcccgacctcaaaacgcaccgaggagcaggccagatccctagggatccccctcgtggccctggacacgcatcctcggatcgacctggccatcgacggagcggacgaggtggatccgaatctggacctggtcaaggggcgaggaggcgcgctcctgagggagaagatggtggaggccgtggccgagagatttatcgtcgttgcggatgatacgaagctagtgaaggggctgggagggagtggtttagcgatgcctgtggaggttgttcagttctgctggaagtttaatttggtgaggctgagggatttgtttaaggagtttgggtgcgatgcgaagctgagggttggtgagggtggggaggcgtatgtgacggataatagtaattatattattgatttgtattttaaggagccgttgaaggatgggttcgctgcggggagggagattgggaagttggagggggttgtggagcatggtttgtttttggggatggctacttcggtgattattgctgggaagaatggtgttgaggttatgaacaagtgaggtttttttaaaagtttgatgtttttcttctttgtctcctctgtaataatattaccaattgagttattgtaatatc

SEQ ID NO: 75 - DNA, 610 bp, Zea mays
  Peptide Sequence Number=SeqID_13669
  Probeset Number=SeqID_14478
attaccagaaaagcaaagatgggctgcataggtcttatcaatttaacaggtaccaatatttatcggcctgtgcttacaagaacatcaaacaaaccctacagcacaagaggaccatcgatggctgctattcgagctgagtcagttgctactgagatattaggaatctttgtcgagaagaatcctcccgagtccaaactcacccaactcggtgttcgtagttggcccaagtggggttgtcctccaagcaagtttccatggacttacgatgcaaaggagacttgttttctgctagaggggaaagtgaaagtgtaccctgatgggtccgatgaaggcgtagagattgaagcaggcgactttgttgttttccctaaagggatgagttgcacttgggatgtatccgttgctgttgataagcactaccaattcgagtgaatggctatcagtttctgctccgcatatttggtgatatgttcgatataacttcactgtctttgtatgttgacttaattttgtgtgtcatgtatcagtctatgcattactgggatttatttgctttgatatctaagtgatttctcctaatgtaatgtcccgttgctggcatttcctgccc

SEQ ID NO: 76 - DNA, 678 bp, Zea mays
  Peptide Sequence Number=SeqID_13670
  Probeset Number=SeqID_14479
aaaaagaaagaaaaaaatcgtcttgattggagacgacgacaatgcagaggctttgcactaagctccgttccatttcagtccgttcaaacgggaacctatctttaatcggtgctcctcaccgtctcatccaccattccccgacttctcagttaaccctaggtttcgccacgccgcccagcaaatggagcttcctccccgccggagcttctcccttcgttcctcatcattttgttcaagtacggagcatcacttccaaggacaaaatggccaaatggaagaagaagtggaggcctaggactccaatcacctctaaagtcaagaaagtcaagatcaagttctattcgtcatacaaagacaggtttaagccactgaatgatggtaccatccgtcgctggaaagaaggcaagcgccacaacgcacacctgaagtcaaagaaatcaaagcgtagattaagacagcctggactagtaccaccagcatatgccaaagtcatgaagaaactcaatttctgcaattgagggataaggagcaagaaacagttcagtctctcttccagatttttcctgatattgctcactggcacccaaagatttgatcaaactttagttcttttttttttgttttgttgttcaagttaattttaaccttgtctccaagtaataaattggtattgtgccc

SEQ ID NO: 77 - DNA, 746 bp, Zea mays
  misc_feature (746)..(746): n is a, c, g, or t
  Peptide Sequence Number=SeqID_13671
  Probeset Number=SeqID_14480
cttcccactttatccctctcgcccacctccctcctctcctctcccctcccctcctctcgtcacaccgcgccagctaaggcttcgctgtgcgctcccctcccccacgcgcattcattctcgcccgctacccctcgccgccgccgcgccatggccggcgttaggagcctcgtgctgctcctcctggtgctcgccgtcgcgctgtccgcctccgcctcgtccatcgccggcggggaccacctgcagctcggcctcctctccggcggcgctggccgcggggagtgcaggggcaccgtggccgagtgcggcggggaggacgcggagggggagctcgggtccgcgtcggccgaggcgcaccgccgcgtgctgcagggccgcggctacatcagctacggcgcgctgcgcaggggcaccgtcccctgcaaccgccgcggcgccagctactacaactgccgccccggcgcccaggccaacccctaccaccgcggatgctcccgcatcacccgctgccgcggctaagcctcggatccgcgcccagagatcacgtcctctcagttcaaaaataagctgcttctcgtgctgttctttaagcggtgccactagtatactgctgctgctactattattagttaaatttctttggttgttgccgctgctgtgttggcctattgggacatttgttgccgtcgttgttgtaaagtataagagagatttgtgccttaatatgaagagaatatttgttattcttn

SEQ ID NO: 78 - DNA, 907 bp, Zea mays
  Peptide Sequence Number=SeqID_13672
  Probeset Number=SeqID_14481
aataacaatctaactgttgtgtcttgtaagagaaagagagacagaaaaaaagatggtgctaaaggtgtacggacctcactttgcttcaccaaagcgagctttggtaacgcttatcgagaagggcgttcccttcgagaccgtccccgtcgatctcatgaaaggagagcacaagcagcctgcttatctcgccttacagcctttcggcaccgttcctgctgttgtcgacggtgactacaagatcttcgagtcacgtgcggtgatgaggtacgtagctgagaagtacaggtcacaaggacctgaccttttgggcaaaaccgtcgaagacagaggtcaagttgagcaatggctcgacgttgaggccaccactttccacccacctctccttaacctcacactccacatcatgttcgcatcagtcatgggattcccttccgatgagaagctgatcaaggagagcgaggagaagctctcagctgtgctcgatgtctacgaggcacatctcgccaagagcaagtacttggctggtgatttcgtcagcttggctgatttggctcacctccctttcactgattacttggttggacccatcggtaaggcttacatgatcaaagacaggaagcacgtgagcgcgtggtgggatgatattagcagccgtcctgcttggaaggagacccttgagaagtactcattccctgcttaaagatgatgatcatgttcttgatctttgtttgtgtttcggagtttctaagcaatgcctgtgtttaatgtgaggtttttaataaagagtggaactgtatgcctcctcttatcttatgtatgccacctctcttttctcttttgtttcatattgtaactccaattctgtgtgattgagttgaggtttgaatctagaggaacttaattatct

SEQ ID NO: 79 - DNA, 594 bp, Zea mays
  Peptide Sequence Number=SeqID_13673
  Probeset Number=SeqID_14482
atcgactccaaaacccatctctcaaaattctcaatttcagttcactctatagctcaaatggcgactcctcaatcctcaaccagaccaacccaccaaaacccacaacccaatttccacgacctcttccccgccatggccggaaaactcggaggagaaggtctaatcgacgagctctgcaaaggcttcgagctcctcatggacggagacaaaggagtcatcactttcgagagcttgcggcgaaacgcatcagcggttcttggactcggagatctgacggacgacgatgtaaggtgtatgatcgacgaaggggatttcgatcgagacggtgcgttgaatcagatggagttttgtgtgctcatgtttaggctaagccctgacttgatggatgcgtcacgctttgtcgtcacggaggcgatcgaggaggagtttggtgaccgaacgcatgggcattgatatccttctttctccatcagagactttgacttaagtttgtttaacccttttatgtttttcttatcctttcgattattgttgcaattcgtataaaattcttggatattatatcaaccgatatggaaaaaattcattgaaaac

SEQ ID NO: 80 - DNA, 1180 bp, Zea mays
  Peptide Sequence Number=SeqID_13674
  Probeset Number=SeqID_14483
atgtcccaacgaaagcattagcagagaagatgatgacgacgagcttctcttctcatcctcctcctcctcctacatcatcaacttccagatccctactcctcttcccttcatctcacctcaaactccctcctcgtcttctcttacatggccgctctacactctcctgctccgccgccggcaccaacaacggacctcctcccgccggcgactctgttccaaataacttctgtatcattgagggatcagagacggtccaagacttcgtgcagatgcagcttcaggagatacaagacaacattaggagcagacgcaacaagatctttctcctcatggaggaagtcaggaggctacgcgttcagcaacggatcaagagtgttaaatccatcagcgaggatgagaacactgtcctcgaggcgacggagatgcctgagatcccttcttccattccttttctccctaacgtgacgccaaagactttgaaacaactctacttgaccagtgtggctttgatctctggaatcattttctttggtggtttgattgcgcctaagcttgagcttaaggtaggactaggtggaacctcgtatgaagatttcataaggagcttgcatttacccttgcaattaagccaagtagatcccattgtggcatcattttctgggggagcggttggtgttatttcaaccttgatgctaattgaagttaacaatgttaaacaacaagagaagaagaggtgcaagtactgccttgggactggatacttgccatgcgctaaatgttctgctagtggtgtgtgcttaagcattgatccaataaaacgaactagagcttcgagcctgcttctgcaagctccgacaacggaaaggtgtctgaactgttccggcgcaggaaaggtgatgtgtccgacatgtctatgcactgggatggtcacagctagtgagcacgacccacgatttgaccctttcgactagaaaacgatctcagtttacttttcgaattaagggtttttgtatgtacatttgttcttcaaaagcctaagccaagactctgtactgaagaaagccatataaatgtttacatagtcaagaaaaataggatttatagctttttgccaaagcatagttacatagtgaagttcagaaatcccttgacacattatttgataaagcgaatttctttc

SEQ ID NO: 81 - DNA, 766 bp, Zea mays
  Peptide Sequence Number=SeqID_13675
  Probeset Number=SeqID_14484
aggtagaaagcgaaactctctctccagcttcagaggcttcagctatggcggccgagaatccttcaaacggtgtagacgtcgacacgagtctcgcttccgattcaaacgataaccgcaaagccagtgatttgaccaatcatgactcttccatggcattgacagtcccttccaccgccgtttgtctcggccgtttcgccggagatgcagcaggcggcgccgtcatggggtctatattcggctatggttctggattgtttaagaaaaaagggtttaagggatcatttgcggatgcgggtcagtctgcaaagaattttgcgattttatctggagtgcacagtttggttgtttgccttctgaagaaactgcgagggaaagatgatgccattaacgttggaattgctggatgctgcactggccttgctcttagttacccaggtgcaccacaagcaatgctacaaagctgtgtcacttttggtgccttttctttcatcctcgaaggactcaacaagaggcaaacagctttggctcactctgtctcctcgagacatgatcaaaccagaagtctgaaagatgatttaccactctccttggctctcccaatccatgaagagatcaaaggagctttctcatccttctgcaaatctttaacaaaacccaagaagctcgcgttccctagctcacgttgatcgaagttttttttgtatcctactacttccttttgtagatgttaaaagaacagatgaaaacaagaatcatgtttcaaaac

SEQ ID NO: 82 - DNA, 1020 bp, Zea mays
  Peptide Sequence Number=SeqID_13676
  Probeset Number=SeqID_14485
gtacagatgcttctccctcctcctcctctagaaacttctcccatggcggcttcttctgctctctcctcaccagcgcttctctccaacaaccgctctcctccgtcatgcggctccgtcagacgctcgatctcctcctccccggtgctcatcgctactcccagatcgtctcgtttgagcttcacaatacctgagaggagaagcctcgtcgtgaaatcaaccgtcggcgaggtctcctttcgcgaaccggcaacatcgggagataaggagggaatcgaatcgctgaaactcaaattactgagggtggtttcgggtttgaacagaggacttgtggcgagtgtagatgatctacaaagtgctgaggccgctgctaaattacttgaagccgctggtgggcctgtggatctaaccaatgatcttgacaaactccaagggaaatggaggctgctgtatagcagcgccttctcttctcgctctttaggtggtagccgtcctggtctacccactggtcgcttgattcccgtcactcttggccaggtgtttcagaggattgatgtgtttagcaaagatttcgataacattgccgaagtggagttaggagctccttggccgtttcctcctctggaagccactgcaacactggcacacaaattcgaactcttaggtacttgcaagatcaagatcacatttgagaaaacaactgtgaagacatcgggaaacttagcgcagattcctccgtttgagatcccgaggcttcccgatagtttcaggccaccgtctaaccctggaactggagattttgaagtcacctatgttgatgagaacatgcgcataactcgtggggatagaggtgaacttagggtctttgtcattgcttaagtcaaaaggaggtttgacatgtaaagatcaagtactttctgcttgttgcagcagccttatgacccctatgagttttgtacacatcgtttgaacgttgattatagatgtattttataatgaagtgaatgtcagttatgcttagtg

SEQ ID NO: 83 - DNA, 1349 bp, Zea mays
  Peptide Sequence Number=SeqID_13677
  Probeset Number=SeqID_14486
atccccagccccaaaaaatttccccatcccgccgccgccgccgccgccgcgcttagttgctgccccaccagaggccagcgatggccgcgtccgagagctcactgacgaggaccgcctcgacctgcgccccggagactgcgcacgggtcgcacgtcttcaagatcgacgggtacagcctgcacaggggcttcggcgtcggcaagttcatccggtccgctaccttcgccgtcggcggctacgactggtgcgtccgcttctaccccgacggcgacagggaagacagcaatggctgggtgtcggcctacctcgagctcaagaccgagaacacggaggtgagggtgctctacgatatctggctagtcgaccaggccacagcggctccgccgccgcggccttatgcccggccaaaccctagccaggtagacccgtcgatttttgacacccgtgacaatgcagccgtgagctggggctttaccaaattccggaggaagagtgagcttggagagtggattgtggacgacattcttggcatccagtgcaatcttacagtgatcaagttcaaggaggcgcaggtggaggacgccaagacgaatgttgtggtccaagtgccgccgtccgatctgtttgataatctcagtagcttgctggaggccacagagggggctgatgtatctttcaatgtgaagcatgcggttttctcagctcataagataatcctcgcgatgcgttcagcggtcttcagggcagagttctacgggccaatgagggacaaaaaaaggcacaacataactgttgaagatatgcagcctgctgctttcagaggactgcttcacttcatctacaaggattcgttgcctccgatggatgacctgaatgatgaagagtatgaagaaatgcttaggcatttgcttgtcgctgcagataggtatgccatggaaaggatgaaattgatgtgcgagagcaagctgtgcgaggttctttgtgccgagactgtggcgaccacgctggctctagccgaccagcaccattgcagccagctcaaagatgcttgcattgagtttatgaactcttctaatataattggtgatgtggtggccagtaaagggtatgagcaactgaaacgggaatgccctagtatcattgcggatatatgggagaaagcagctaagagtcgcagaatttagtatgctgatcgtggattaacatgagcgtagttacttaagttgaaaccttagcaacctgagattagtttgtcttttggagaaacgtaagtttcacaaaatgtttgtgatatgttctgctctgttatatgaacctgttctatatccgtaagaccgtaacattctctg

SEQ ID NO: 84 - DNA, 1096 bp, Zea mays
  Peptide Sequence Number=SeqID_13678
  Probeset Number=SeqID_14487
atcgcatcccttgtaaatttttatctcagaaacgtgcagcagagaaaatacaaaatgggactctgccgctttctcttcttcgtcgttgttgtgctgcttttctcctcatcttcctcagttgacgcctgcgaccgatgtcctcaccactctaaggctgcttttttctcctccgcatccgccctatcctccggagcttgttcttatggttccatggctacggctttcttcgccggtcacatcgccgccgccgttccttccatctacaaagacggcgctggctgcggtgcttgctttcaggtcagatgccacaaccccactctttgcagcaccaaaggaaccacggtgatggtcaccgacctcaacatgagcaaccaaaccgatctcgtcctcagcagcagagccttcagggccatggccaaaccggttgtcggggctgacacagatcttctcagacaaggcatcgtcgacgttgaataccacagagttccttgcgattacggaaacaagaagatgttgaatgttagagttgaagaatcaagcaaaaaaccatactacttggctataaagctcttgtaccaaggaggccaaaccgaagtcgtagccatcgacattgctcaggctggttcctccaactggagttacatgacacgaagccacggcgccgtatgggtcactgacaatgtacccaccggacctcttcagttcaggttcgtggtgacagctggctacgacggaaaaatgctctggtctaagaaggttcttcctgccaactgggaagccggcaagacctacgacgccggcgttcagatcaccgacattgctcaggaaggttgtgatccatgcgacgatcacatctggaactgatttacttactctccttttttctttctttcttttcttagaagcatatgtataaataatcaagcatattcattattaagtgagtttgtaccagaactattactaaacaagagaactaagaaagatttttaaaagggtgatggacatatgtatgtgcaaaggaggtctacacatgaccaccattctttctaccgataaccaagttatatgacattacttctttcttttatgtttc

SEQ ID NO: 85 - DNA, 644 bp, Zea mays
  Peptide Sequence Number=SeqID_13679
  Probeset Number=SeqID_14488
aaagaaagaaagaaagaaatgggaagcgcaccggcacagattccgactagcttcggccatgagctaagggcctgtcttcgctgccgcctcgtcaagacctacgaccagttcagggacgcagggtgcgagaactgtcctttcttcaagatggaagaggatcacgagcgtatcgtcgaggtcacgactcctaatttcaatggtataatctctgtgatggatccaagtagaagctgggcggctaggtggttaagaatcgggaagtttgctcctggttgctacactcttgctgtctcagagccactcactgaggaaatgctcgtatgccaagaagagcgtgtacaatacgttccccccaaacgcatgtgaagcaaatccatcaagacaacgaccgcaagtattgctctttcatatgttagcttcatgtaacggtatcaggtgctcatatgtgttgaaaatttccaagaagtcgttgcttctttgagtaccttaggttcatctatgtaaggtcgtcatgtataacttttgaacgtctccaccaaaatgcttctttaagagaatcgtttttgttaggaaaaatgtaaacataagtacaaaggccaacctaagcttcttggaactatgaaatgttatgtctgattaaagct

SEQ ID NO: 86 - DNA, 753 bp, Zea mays
  Peptide Sequence Number=SeqID_13809
  Probeset Number=SeqID_14489
cttcttcctctccgcattccatcagtgtttgtttttgggtgaaactgacaaagagtgcgagaaaaatgagcggagccgggaagaaagtggcggatgtggcgttcaaagcgtcgaggacaatagattgggaagggatggcaaaggtccttgtcaccgatgaggctcgaagagagttctctaacctccgtcgcgctttcgacgaggtcaacactcagctccaaaccaagttcagccaggagcctgaacccattgattgggatttttacagaaagggtattggctctggcattgttgacatgtacaaggaagcttacgacagcgttgagattcccaagtacgtggacaatgttacccctgaatacaagccaaagtttgatgctttgttggtggaactgaaagaagcagaacagaaatctctcaaggagtctgaacggctagagaaagaaattattgatgtccaggagataagcaaaaagctcagcaccatgactgcagatgagtactttgagaagcaccccgaactcaagaagaagtttgatgacgagatccggaacgactactggggatactgattcatcatatttcttgtatctccggtctggaaatgaaactctctcttctctttttcttttgatgtgattttgtgagtgtcaaccataacataataaggaccactccatttacttaagcagtgtgttgagatattcattggagatccaatgagacaatgacgataaaaacccatttggttcc

SEQ ID NO: 87 - DNA, 650 bp, Zea mays
  Peptide Sequence Number=SeqID_13810
  Probeset Number=SeqID_14490
aaaagaaatggcttcgctcggtttcaacctcggattctccttctccggtgtgaagaatcgacaagtttccgtgaatggaagagctcgcgttatctcctgttgttcctcttcttcttcagaagcatctcagcaggggatttctaccacgaagcctcctcctgagatagagctcgagttcttcggtccgaagcctgggagcgacgggacgtatccgagggataaagcgaaagctgtgagcggagagaagcttctgagaagcatcatgcaggatagcaagatcgagctttacgctacttacgggaaagtgatgaactgtggaggtggaggaagctgtggaacttgcattgttgagattcttgatggcagagaacttctgaaccagagaacagatacagaaaacaagtatctgaaaaagaagcctgaatcttggaggctcgcgtgccaaacaatagtagggaacaaagaaaactcaggaaaggttgtggttcagcggattccgcaatggaagaagtgaattcccttgtaagtgtaatgtttctcaattcgtttatgtatgtcccccccatactagttttctgtttgtatatctccaaaaactgttccttgtagatggcaatagtcatatacatatgataaagtctcggtgggtt

SEQ ID NO: 88 - DNA, 1074 bp, Zea mays
  misc_feature (1074)..(1074): n is a, c, g, or t
  Peptide Sequence Number=SeqID_13811
  Probeset Number=SeqID_14491
aacgctaggttccctgcagaccattattcaataatcatcgtcccttggtgactgaagagaagagtttaagcaaagaatggcagcacaagcgcttgtgtcttcttcacttacttcctctgttcagactgctagacagatattcggcgcaaaaccagctgtgtccgtatcacagaggaaggtttccttggttgttaaggctgcctcaactccacctgccaagcaaggagcaaacaggcaattgtggtttgcatcatcacagagtctctcttacttggatggcagcttacctggcgactttggattcgatccgcttggtctttcagacccagagggtactggaggcttcatcgagccgagatggctagcctacggagagatcatcaacgggaggttcgctatgttgggtgcagctggagctattgcacctgagattctaggaaaggccggtctgattcctgcagacactgctcttccctggttccaaaccggtgtgattccacctgcagggacatacagctactgggcagacccttacacactctttgttctcgagatggctttgatgggatttgccgagcacaggaggttgcaggactggtacaacccaggatctatgggtaaacaatacttcttgggtctagagaaaggtttcgcgggttcaggtgacccggcttaccccggtggaccattcttcaaccctcttgggtttggaaaagacgagaagtcgatgaaggagttgaaactcaaggaggtcaagaacggtagactggcaatgctcgccatcctaggctattttgtgcagggactagtgaccggtgtggggccttaccagaaccttcttgatcatttggcggatcccgtcaacaacaatgtcttgaccagcctcaagttccactgagatgatcatatatcgtattcatcacatggtgttttatgttggtttcccattctcttgtatcctacaatcttgtttgtttctcttggtaccatcagtttctctgtgttgtaacaccctgtgtaaacatattcgtcttttgtaagaaataatggccataaagaacaacttctaggatn

SEQ ID NO: 89 - DNA, 799 bp, Zea mays
  misc_feature (781)..(781): n is a, c, g, or t
  misc_feature (799)..(799): n is a, c, g, or t
  Peptide Sequence Number=SeqID_13812
  Probeset Number=SeqID_14492
attttctttacactgaaccatcactgagagagtgcgcttcacacaataaacaaaaaaaaatggctaggcaatttgctattgttgcgatctgcatcgtcctcatcgccggcgtcggaggtcaagctccgtcggcaccaccaaccaccacaccagcaccacccaccacaacaactcccccgccagcagccactcctcctcctgtctcagctcctccaccagtcacaacttctcctcctccagccaccaccgctcctcctcctgctactcctcctccagtcgcttctcctcctccggccactcctcctccagtggcaactcctcctccagcaactccccctcccgtcgcatctcctcctccagcaactcctccacccgtcgcatctcctcctccagcaacgcctcctccagctcctcttgcatctcctcccgctcaggttccagctcttgctcctacgacgccagacgctccctctacatctccgtcgtctagcccgcctctcccggccactgatggccctggaccgagcgccgaagggccaggaccttccacagattcgaatgaccagaatggagcaagcaagacagtttcaagcttggtacttggatctgttctcgtttggtttatgatctaagcgcgggagcctttcgctcggtgttccttgcatttgttttcatgttgatgtttgtttgttccattgttattactttcggaaccgtattcttttggattattatcttttggagaggatattattgagacttgagatggagatatcaggantatatttcgtttggagan

SEQ ID NO: 90 - DNA, 796 bp, Zea mays
  Probeset Number=SeqID_14493
acgagacacagaggcgatcgagaggggtcagagattcgggagtcggcggcgacgcacgaggaagcggtcggggataggccgccgcccgccggtgagggtctcggagagcgttacagatggtgccggcgaaggggtggagccggagggtcgggagcgcgcggtcgttcgtggggaacgcgctgggcggcgtgcgcggttggaccaacgtcgcctcctgggccgtcgccgggaccctcgcctactacctctgggtccgacccgcgcgccagctccagaaggagcagcaggaacgagctgctttagctgctgcctcagatccataccgttatgtcgagaaacggaagccaattcctgacccccaggacactagcctaacttacgggaagaagaaggatcctccgaagtctgacaactagttcatctgggaacatcctgtaacaaatgcggcgtccgtttgactggcaacgtcccaatatgggatttctgcaagcctgattgctaccacatgataagcatataccgtcaaaaaggttgcttcctcatgctagcaagccaggtcttgttgtcgcgagtctcttcgttttgagtaatttagtgttcatctttcgagtttcctgcttgtttggacggataccgttttgttagacacgaggaatcatactggaaatgtaaatgtgtaagtgctagatgttcagaaatcggtgtatggagacgctacaatccgtgcattgtgaccgtcactgctactgctactgtgctagtgtttccaacatgctaaataataaatcccctgttt

SEQ ID NO: 91 - DNA, 504 bp, Zea mays
  Peptide Sequence Number=SeqID_13813
  Probeset Number=SeqID_14494
atcaaccaacaactagcaatccaataactttaatcttttcatacatctcttcaaaaaaattcaaactttcagaagacaaaataaatcgaaatggctttggttagaagtttattgggtgcaaagaagattcttggccgctccctgacagcagcagcttcttccacgagcaaaacaacagcctcggcggcacctaaagggtttcttgcggtgtacgtaggagagagtcagaaaaagagatatgtggtgccaatctcatacttaagccagccttcatttcaagctctcctcagtaaatctgaagaagagtttgggttcgatcatccaatgggtggcttaacgattccttgtcccgaagatatcttcatcaacttaacgtctaggctccagtgaatgatgattatcctaatcttttcttcttcttgagttagcaatagacttattcattgtaaattataggacatttttctcatcttcctcctttttgaatgaattgttgagagaatg

SEQ ID NO: 92 - DNA, 955 bp, Zea mays
  Peptide Sequence Number=SeqID_13814
  Probeset Number=SeqID_14495
ataggtaatcataccacaacccgagcattctacaaccactttcatcaacgccatacacgtctcctaccctcacagttcgttgctccgcacatcagcaggacttgcaatggcgggagacggcgagctgaagctgctgggcgtgtggacgagcccgttcgtcatcagggtgcgcgtggtgctcaacctcaagtctctgccgtacgagtacgtggaggagaacctgggcagcaagagcgcgctcctcctgggctccaacccggtgcaccagagcgtgcccgtcctcctccacggcggccgccccgtgaacgagtcccaggtcatcgtgcagtacatcgacgaggtctgggcgggggccggcccgtccgtgctcccggccgacccctacgagcgcgccacggcgcgcttctgggcggcgtacgtcgacgacaaggtcgggtcggcgtggacggggatgctcttctcgtgcaagacggaggaggagagggcggaggccgtgtcccgggccgtggcggcgctggagacgctggagggcgcgttcgcggagtgctccaaggggaaggcgttcttcggcggcgacgccatcgggttcgtcgacgtcgtgctcggcggctacctcgggtggttcggggcgatcgacaagatcatcgggcgccggctgatcgacccggcgaggacgccgctgctggccaggtgggaggagcagttccgcgcggcggacgcggccaagggcgtcgtgccggacgacgccgacaagatgctcgagttcttgcccaccgtgctcgcttgggtcgccgccaaagcgaagtgaactgtgagcccgtgacatcgccagctcgtgacatgtgtgtttgtgtgtgtgcgtgtctgagtccgtccagtgtgtgctgaataaatgcaccgcatgtcgtgtgttgtaccaagggcaaacgatgctgaataattttgatgtttgtgg

SEQ ID NO: 93 - DNA, 759 bp, Zea mays
  Peptide Sequence Number=SeqID_13815
  Probeset Number=SeqID_14496
gtccaaacaagaagtgatgaactattttcagttagaacatagaagatagcattatcttaataggttccacgtggcatttcctaactggcacaagaaaatctccaagaggagttctcagtttgccacgtcagacgaagatcagaatccactcatttaggctaaaggctatctcttcaaacaaatttcaaatcacccaacaacacaaaatagtgatcaaagctcatggcgtctcttgcaactgtcgccgccgtgaaaccatccgtggccgtaaaaggccttggcggaagctcactcgccggagccaagctctccttcaagccttcccgcctaagcatcaaaaccaaatcaatccggtctggtggtgtggtggctaagtatggagacaaaagtgtctactttgacttagaagatttgggaaacacaacaggtcaatgggatctatacggctctgatgctccttctccttacaaccctcttcagagcaagttctttgagacattcgccgcaccattcacaaagagaggactgctcctcaagttcttgatcctcggaggaggatctttgcttacttatgtcagcgcttcctccaccggtgatgttcttcccatcaagagaggtcctcaggagaagcctaagctcggtcctcgcggcaaactttgatttagatttatgcatgttcgttaccttctctccctctttataatcccataaaacatttctcaatgctacaatctcttcaaaatgatttttgatttgtgt

SEQ ID NO: 94 - DNA, 856 bp, Zea mays
  Peptide Sequence Number=SeqID_13816
  Probeset Number=SeqID_14497
atctctcttcatttccctctctcgaacaagaagacaacaactcaaaacgcagagaagatctccagaacgacaccgtttcgtagcaaagatgctttcttcgtctccaacctccttcactcatccattcctctccacgtctccgcctctctcccccatatctccgccgtctcgctcacctcgcctcccgcctcctctcgtctccgcctcttgctcctacacctgcacggaggatccgccgaggctgcaccagatcccgcggcgaacgacgccggcgaacgcttcgctctacgagattctagaggttcctcgcggcgcgacgagccaggatatcaaatcggcttaccggaggttggctaggatctgccaccccgacgtggcggcgggaaccgatcggagtaactcttcggcggatgagttcatgaagatccacgcggcgtactgtacgctctctgatcctgacaaacgctctgtttacgatcggaggatgcttcgtcggagccgtccgttgaccgtcagcacctccgggatgggcagttacgttggacggaactgggaaaccgatcagtgctggtagcgagttgactcggtgaccgagttagctcgagttaattcgaattaataaaacacggttgtaaaaataggaagcgataaaagctggggttagcgatgtaattaacagtagtattagtgtgctaacatacgccaagagctaaacgtacgctccctctccctgcccacggccacgggcgatcagcgccgtttgcatcgtgttacgtaggatctacgtgtgttttttttttaccttctgaatcctgtaatacttatcaatgaaaacaaaataaacactgttataatt

SEQ ID NO: 95 - DNA, 772 bp, Zea mays
  misc_feature (772)..(772): n is a, c, g, or t
  Peptide Sequence Number=SeqID_13817
  Probeset Number=SeqID_14498
ctcattagacttttctactacacattcccatttcccacatcagacaacattctctccctcagagggaaagcatctcctcttcttgattcacattttgaactttaaccttctcaaactatctccaacaaaaccaaatccaagttattaaaaatgacaaagataggaggtattcttgtttgtttagtcatcgtgggattagatgtggctgctgcaatcctcggaatccaagcagaagtcgctcagaatcaggtgaagcacatgaggctttggctatttgagtgcagagagccaagccaggacgcgtacaggttaggtctaggtgcagccgcggtattggtaatggctcatgtactcatcaatttggtcggaggctgtctctgtatttgctctcaagacgagtttcaaagatcttcttccacaaagcaaatctcaatggcttgtctcgttctcacttggatcgtattcgccgttggatttggggctttagtgattgggacgatgtccaacaacaagtcaagatcctcttgtggattcacacatcaccattttctctccattggagggatcttgtgttttctacatgccctcttttgtgtcgcttattacgtttctgccacagcggctaaagacgcagctgctaagtgacaaagccatgataaggatgggtgaacacaggtgggtggtccttgtacttgactatatattccaatggtaattgtgtaacaatttcatatctattaacaataacatagtataatattttttcctcccn

SEQ ID NO: 96 - DNA, 907 bp, Zea mays
  misc_feature (907)..(907): n is a, c, g, or t
  Peptide Sequence Number=SeqID_13818
  Probeset Number=SeqID_14499
aatcgcttcttccaaacatcgaatggcttctcacaccttcctctccttctcatcgcctccgcgcctcctcgtttcccctccctccactctccgttcccctttcgtcggcgtctctctcaacctccaccgtccccagtccgtttccttctccgcctcgaagaaatcgctgacagtcgtttccgccgcgaagaaagctgtcgctgtgctcaagggtaactccgacgtcgaaggagttgttactttgacacaagatgactcaggtccgacaaaagtgagtgttcgtatcaccggtctcacgccagggcctcatggctttcacctccatgagtttggtgatacaacaaatggatgcatctcaacagggccacatttcaaccctaacaacatgacacacggagctcctgaagacgagatccgtcatgcgggtgacctgggaaacattattgccaacgccgatggcgtggcagaaacaacacttgtggacaatcagattcctctgactggtcctaactctgttgttgaaagagcctttgtggttcacgagcttaaggatgacctcggaaagggtgggcatgagcttagcctgaccactggaaacgcaggcgggagattggcatgcggtgtggttggtttgacgccgctctaagtctgggctaagtaagtactttggtgtctactgtgttggtcgtcttgtctgttgaatcagatgtcaaataaagttggctgaataagctattgatgtttatgttcctagcatcaaactctctttctggagttgtgcctttgtaaacgtgtttgttacttttggtttaaatctgcattcgatcgtttgttttgctattactttccttttaccaagcttagattttggttttaggtaaagaggtaaactgattttaagagagtn

SEQ ID NO: 97 - DNA, 688 bp, Zea mays
  Peptide Sequence Number=SeqID_13819
  Probeset Number=SeqID_14500
atatacatatattaacattttcatacacctaaaaatatatccaaacccatttgatctaatagtaaatacataatttatttggtgaagctagaagaatgggtgcatttgattatatatctagcttttgttcatatacatactctaatgccaaaaccaagcgtaagccattgcagacagtggaaatcaaggtcaaaatggactgtgacggctgtgaaagaaaacttagaaacgtggttcgtcgcatgaaaggcgtgaaaacggtggaggtgaaccggaaacagagccggctaacggtgaacggtcacgtggacccaaacaaggtgttgaagagagtgaagagcacagggaagaaggcagagttttggccttacatacctcagcatatggtctattaccctttcgcgcctggcatgtacgacaaacgtgcgcctgcaggccacatccgcaaccctacacaagcgtttccagccgcaaacgcacctggtgaaaactacgtttccctcttcagcgacgacaacgtccacgccgcttgttccatcatgtgaaatatgtaagaagcagaatataatataataatctatattttcttctttgtgtacacatctacttttgcaagttgcaactattctcataatacagaaaaggtcatgtataaactatgtaataaattatagagacatattttcac

SEQ ID NO: 98 - DNA, 689 bp, Zea mays
  misc_feature (689)..(689): n is a, c, g, or t
  Peptide Sequence Number=SeqID_13820
  Probeset Number=SeqID_14501
aaatactaatatctaaatctcttccttcttccaatcaagacctgactactcttgaagtttctgaaacaacagggcattttaatggcggccatgaactcgagtgttctcacctgcagctacgctatctctggtgctggctcagcagaactgaaccagaaagtgggtttggtcaattcatcagttggttttggtcaaaagaaacaaacgcttccagtgatcaaagcagctcaaagagttggtggtgatgatgttaatggaagaagatccgcaatggtgttcttagctgctacactcttctcctctgctgctgtatctgcttccgctaatgctagcgtcttcgatgaatacctcgagaagagcaaagccaacaaagagctgaatgataagaagagattggcaacaagtggagcaaactttgcgagagcgtttactgtccagttcggaagctgcaagttccctgagaatttcactggctgccaagatcttgccaagcaaaagaaagttccatttatctcagaagatttggcgttggaatgtgaaggcaaagacaagttcaagtgtggttccaatgttttctggaaatggtgatcatcttttgtttctgttttaatccattcttgtataaactcaacaatgtatcaatccatctctctgttcatcaaagtctcatatccatttgaatttaaaan

SEQ ID NO: 99 - DNA, 1088 bp, Zea mays
  misc_feature (1088)..(1088): n is a, c, g, or t
  Peptide Sequence Number=SeqID_13821
  Probeset Number=SeqID_14502
ataaaaatctcatcgaccgatcgagagagaatctttcgtcttctatcgaatgggcggaggaagagtcatggcgacggcggcgaaggtggctggaatcggagtcgccaaaggtggattcaggggaggattcggagtccccgcggcggcgaatgatcagtttatcgtgagaaacacctccgcgtctaagccggtttcggcttcgatttcatcggcggttcatccttccgtggaagaagacgcggtggtcatgcgtaaaccggtctgggaagacgagtgggaattcgcggaagtggagacgaagacgatccctagggttgttttcgacaagcctccgtctcttcaggaggctaaagaagccaccgatgatctcaaagatgccctcaacatggcgtgtatggaagggtcaaatgaagttggttctgtttcaagaatgttttcaagttttcaaccttctgagaacagagctgttgaatcagctgttccacaggttgctcttaaggcttttgcttttctcagtgaaaacaccgccgcgcagtctgttgttacttccattgcgtctgacccaaaggtgtgggatgctgtcatggaaaacaaggatctcatgaaatttcttgagaccaacactgcttcaactaaggatgaagctgacaatgacgacaaatctgaactttctagcgagactgaaagtgaagaagacagtgaagagaagccaatccagctcatggagattctgcgagacatgaagctgaaagctgttcaaatgatggaaaatgtatcttcctactttgggggtttgttcaggacagagactttcacagagggtggacaggagaggaagaggatgttgctcaacgaccctactactctctttggattagctgtttgcgttattttcatggtagttctgaaacgtgcttaacaagttccagtttccttttaaacttgccgatatagcttataactactgtgttctctttctgctacttcattatcgtttagagtttttttttttaaactgttctacttatgtttggaatgatttggaacttgcctttgatattttcataaataaaagtatgctttggttn

SEQ ID NO: 100 - DNA, 551 bp, Zea mays
  Peptide Sequence Number=SeqID_13822
  Probeset Number=SeqID_14503
aaaaaaaatcaaacattcacaatccatctgaatcgacattgttagcgctcgtcatggcaaccgcattccgacgctcatcatcccaacgacgacggtgacacttcgacactcctcccaacggtggcgacgatggtccggcgcgtgtcctcccagcggcggttacagttctccgacgcttgtccttacaacagcggcgatggcgctccgatgctcctcgtctcgatggggcaacaatgctgatcttgaagaaggcgaggatgctgctgctagttttcgagccgatccgatcctatcttcagcgccgcagatgccttacctgcaggtatgtttggtgttcgacaaaatggccaagtgctcacaagcttgacagaaagaaaaaaaaattcgcggcaactgaggccaaggaacaaagatggcttcatggcttgagcttctatgcgatggaataaacaattatagtatactgaataaacatgaatgttctgagcacttgttatttcgaactgggaacaacaatattgaatgacattgaactggaacgttaaaaatca

SEQ ID NO: 101 - DNA, 825 bp, Zea mays
  Probeset Number=SeqID_14504
gaaaaaaaacagaactcgcaccgttctcgtctaatctctctctcgacaatggctcgatcttcgtctccgtctctttctctctcccggtgccgattcgccgcggcttatctcctcccttcatctcgatccatcttcttccgatctcaatcctcgaatcgccgctctaacctcggggagctgattgagatcgatgtcgccgcgtcgcagtcgcagtcgcaatcggatcctctttcgcagaagctggaggacgcggtgcaccggataatggtgcgccgagccgcgcctgattggctccctttccttcccggcgcttcgtattgggtcccgcctcgtaggtcccagtcccatgggatcgctaagctcgttgagaagctggcgaatcccatcggcgatgaagagtcagtctctgtcgcgtcgggtcgtggatggccttgttctgattacttcatcaaaggtgtagagcctgaatcggtggagacggagatggcttcaggtactgctgcatctcactctgaggatgaggaaggctaaaacattaaaactcgttaaaaccattgtctggactcttcaaaagatttgttgattttaggaacgcggatcaaagaagaattgaaccaccaagagcggttttgaagaggtgacatggtttagactttaagagagggtagaggaaacaaaccttttacaacacatgagatcctatcaagttctgaaatgttaaaaaaaaaaacaataagaaaaggcgttgtagctcagccccctgttttcaatgtaatctttcttataacagtttgatgaatcctgtgtatatatatattcgccacc

SEQ ID NO: 102 - DNA, 601 bp, Zea mays
  Peptide Sequence Number=SeqID_13823
  Probeset Number=SeqID_14505
atattctctcattccgatctctatctgcctaatctctatccattttgtttcatttcttcttcccaatcacaaaaatgggtcgccgtagctcaggaggaagatctgcacctcgtcctcgccctgctgctgcacgtgcccccgctcctcaacatgtaaaccgtgcacctcctccagctccagctcaggcgaccagtggtggtggcatgttctcaggcattggttccaccatagctcagggtatggcttttggaaccggaagtgctgttgcacatagggctgttgattccgtcatgggcccacgtaccattcagcatgaaactgttgaggctgcctctgcatctgccgctcctgtcggaagcagcatgttctcgagctcctgtgacattcatgctaaggctttccaagattgcatcagcagctatggaagcgacattagcaagtgtcagttctacatggacatgttgtctgagtgcaagaagaactccggttccactattggtgcctgaatcaagcttgtttcatttcttatctagctttgtctaaacattatgcagctgttatatgctgagggtctggatatcaaataaacaacatttcagat

SEQ ID NO: 103 - DNA, 1132 bp, Zea mays
  misc_feature (1)..(1): n is a, c, g, or t
  Peptide Sequence Number=SeqID_13943
  Probeset Number=SeqID_14506
ngtcgggaagtgttagcattagtgcgtcactaaactcgcacgccacctaatgatttacatttgctgctgcgtctgggatatataaaggaaaaaaagcgtgacaccaacccgacaccggctcccctcgctggctctcctccgcagctccgctcccctgctcgccacctcccgcccattttaaaccaccaccactaccaaactttgcttgcctccccagtccccaccaccgcttggctgccgcttgctgctgcggtcgtctagctaagctagcttacatagccagcttcgacacgtcgcgacgcagattaagcggcacgaggccagcctccgggagctggtggtggagctaggcaggcggcgttgtgcttgctggcttctgtgatggggtcgtccacggatcacgccgccggtgcccgtggcaagaagcaggggtcgcagctgtggaagaaggcgctgctgcattcctccctctgcttcgtgatgggcttcttcaccggcttcgcgccgtcgtccgtgtccgactggacgtccgcggcggcggcggcggggggccgggtgggcagcagccacgtggtccgggcgctgccggcgggcggcgccggggccgtgaaccggagcctgctggcgcacgacgcggggggcggcggcctgccgcgcgacccggcgtccccgcgcccgctcctggtggtcgtcacgacgacggagtcgacgcccgcggcgaccggcgagcgcgccgccgcgctgacgcgggcggcgcacgcgctgcgtctggtggcgccgccgctgctgtgggtggtggtggaggccgccccggacgcgccggccacggcgcggctgctgcgcgccacggggctcatgtaccgccacctgacctacaaggacaacttcacctccgccgacgccgccgcgggcagggagcggcaccaccagcgcaacgtggcgctcggacacatcgagcaccaccgcctcgccggcgtcgtcctcttcgcgggcctcggcgacgtgttcgacctccgcttcttcgacgagctcaggggaatcaggtaccagccagccatcatcattgcttgcttcacggcgcgtacgacgtgtattgttgccagagcaaaactctcatcttcattacataaat

SEQ ID NO: 104 - DNA, 1771 bp, Zea mays
  misc_feature (1771)..(1771): n is a, c, g, or t
  Peptide Sequence Number=SeqID_13944
  Probeset Number=SeqID_14507
tctcctacaactgcattgttcacggcctgtgcaccatgcccaagcctggcgcctgcctaagagcgcaccagctggtgatggaaggcacgagttttggataccgtccgagggaggtgacgtacaaggtgctcgtggacgagctgtgccgtgagaatgagctcgccaaggccaaggatgtcctggagctgatgctgcagcccaccgtccagtgtggccaggacagtggtggagatgcgggtgaggagaccaggacaaggatctacaatgtgtttcttggggcactgcgtgttgtggacaacccgagcgagcagcttggtgtgcttgtgtctatgctgcaggctggatgcaagccggatgtgatcaccatgaacactgtcatccatggcttctgcaagtccaggaggacccaggaggcaaggaggatcatggacgacatgctcagcgggaagttctgtgctcctgatgttgtcacctttaccacactcatatctggatacctgggtgcaggtgatcatgcacaagcccttgatgtactgcgctctttgatgcctaggcgtcggtgctctccaactgtcgttacttacaactgtgtcctcaagggattgtttggcgttgggcaagttgatacagcaatgcaggtgcttgaggaaatgagtgccaataaggttgctgctgatcctgtgactcatactgtggtgatcaaagggctctgcgatgcagggctgctcgagaaggcaaaggaattttgggacaatgtcgtctggccgtcagggatacatgatgattatgtgtacagtgctgtcttcagaggtctctgcaaacagatgaaactggaacaggcatgcgatttcttgtacgagttggtggattgtggggttgctcccagtgtagtgtgctacaacatactcatagacgctgcctgcaagcagggatcgaataagttagcatatcagctagttaaggagatgaaaagaaacgggctagcaccagatgctattacttggaggattcttagcaaactgcatcactatgacgaggaagaacgagaggggaaccagcatcaaatgtttgatgtggatcgaatttctacagaaggcagagtggagcgtcttgtcttgactaaagataagatgcctttgctgccgtcatctgaaaattttcatgaagttaatgaggatgataacgctgctgagactgaggaagagattgactatttaccagatatggctagtaaatctgaagccgaggaggttggatgctcaacaaaaatgacagtggaggaagcaccagataatactaagcaaaccgaagaacagggcaattgtctgagggataatccaacaaggggaacaataattgacaaagctgatataacatggggagaagatggccttaagaactcggataaccaaccttcagtaaaagagccactctctacagtggtaagaaaggtgtttgggctcctgtagaacaggagtttcttccatccttcctgaagactagtttggagggcaatagataagctaattgaaactcttcaggcctagtttgggtactctagtaatgaaatgaattggaatgaattgagatgtattgtgtgagtttttgatctgttagggatttaaacactctttaatccctccaaaccattcaatagggatttaaattctcttcaatctctccaaaccacttcaatccaagagtacgcaaactagggctcagttgtattgtattggcaactgcaagtaggtacacaactctaaaaaaaagn

SEQ ID NO: 105 - DNA, 759 bp, Zea mays
  misc_feature (759)..(759): n is a, c, g, or t
  Peptide Sequence Number=SeqID_13945
  Probeset Number=SeqID_14508
tctaacagcaccaatctcttcatactcaagaccagagatgttcacaaagtcacagtcatacttcttccctcagtcagtgaaaacaatcgctgtgacatcaacagcaaagggtatcacttcaaagcagcttctcattggtaccatcggtgatcagatattgacacttgataaacgatttgtggatccaagacggacacttaacccctcacaagctgagaaagaagaaggaatcatccctctcacggattcattacccataattcctcagtcatacatcacacactccctcaaagtagaaggcttaagaggcatagtaacagctccagccaagctagagtcaacaacacacgtctttgcctatggagtggatctcttctacacaagacttgctccttcaaagacctacgactcgctgacagacgatttcagctacgcacttcttttgatcacgattgtggctctcgttgcagccatctacatcacttgcgccctgtcggagaagaaggaactaagtgaaaaatggaggtgattggatccttcagaagttttaaaccctctctttggcttttcacggttggagaatgttcatggaaaaaaaaaatattggcttaactaaattcttaatgttaggctttggaaattgagtacttaacatattcttgcttgtgacttctgtcacattagtcttgcgttgaaccttttgaaattttgaagtttatagattcactcataattttgaaattgagtacttaacataan

SEQ ID NO: 106 - DNA, 930 bp, Zea mays
  misc_feature (930)..(930): n is a, c, g, or t
  Peptide Sequence Number=SeqID_13946
  Probeset Number=SeqID_14509
acacattcaaactaataactctcaaaaactgagagcagaagagagtagaggagaaacaaatgtccatatccatggcgctattctctccgccgatctcttcttcagttcaaaaccccaagatctcgttccctctcctctccaccaagcgcttctctctcctctccgtcactcgcgcttcctccgattctgctgcagtctctgcaaccaccgtagagattccgaagcccgcgtcggtttctgtagaggaggtgccatctaaacctcctgcggaaagctcctccgacgagactgatctgccaaccacggcgacgggaatcaagtttcaggatgcgaagtgggttaatggaacctgggatctgaaacagttcgagaaagacgggaaaaccgattgggattctattatcgtcgctgaggcaaagaggagaaagtggcttgaagataacccagaaacaactactaacgctgagcctgttcttttcgacacctcgatcattccatggtgggcgtggatgaagagataccatctaccagaagctgaactcctcaatggtcgtgctgcgatgatagggttcttcatggcttactttgttgacagccttaccggagtaggacttgttgatcaaatgggaaacttcttctgcaaaacactcttgtttgtggctgtagctggagttcttttcatccgcaagaacgaagatttagataagctcaagggtctgatcgaagagacgacgctatatgacaagcaatggcaagcggcttggaaagagccggaatcatcatcatcgacgctttcttcaaagaagtgaacaaaatctttctcgctttttgtttcctcttttctcatgtgatgtttgtgatcagtgaaaaaagtctcaagataaacgcaaaatctatttggctttgaaaaaatctctttaaagtagtccn

SEQ ID NO: 107 - DNA, 720 bp, Zea mays
  Peptide Sequence Number=SeqID_13947
  Probeset Number=SeqID_14510
attatcatccacttgctgaagattccccactagaaagaaagaagcatacgattctctccttaccatcctgcttcgattctcaccaaacatggaagccctgattcaccacttcactctcctctccgaccaagcccttgtcgacaaaacattcgaccctgccacgatcgaagacctcatgcgtctcttcgaagtcgattcctacaaggcttgggcagctctcgaagccgagcaacaacaagagctcgaagccgctgaagaatctatccgcgaagccgaagctgaactcgatcgggatatggagtgggggatggaggagtacaggcggacgttggaggagatggagaggatggaggcggcggagcttaaagagcttgaggagaaggcggagactgctcggagaacggggagtttattggagaaagctgctaccatcgccgcgaaaaggcatattgcggcggcgatgggatcagctgctgcgtcgatgagatctgcgtggaagactgcatctgggaacaaagttcatccttcttgatcggagaatatgttcggtgtgtagtgattctgatacatgataattattatcgataatgatcaatgcatgggtccatgtattaggaacgttaggtgatgggttatgtcgatggtgccaaagtggattatattgtattatataattatttcctttaataaacttatcgaaagagctctcttttcaatatg

SEQ ID NO: 108 - DNA, 671 bp, Zea mays
  misc_feature (671)..(671): n is a, c, g, or t
  Peptide Sequence Number=SeqID_13948
  Probeset Number=SeqID_14511
acgaaaagctttctcctctctcggctggctgggttggttggttggttggttcgtagtgtagtaggtaggcgaggcgaggcgagggggttcggccgtcggtgatggagagtaaggagagcggggagaggatggagaaggtggaggtgggcgacggcgggaagaagccggaggaggggaccaagcaggcggcggcgccggtgtgcttcaagaagccggcgggcgaggacaccggcatcctggagaccaccaaggactacttcaagcagctcaaggacaccagcgccgacacgcactgggactgcatcaagaaccggttccgcgccgccggcgactacatctccaacaagaccagctcggtgtttggcaggcagaaggtggagcctgaggccaaggaggagaccccgggggcgaagccagaaggggcaccggcggcagctgagactcagtgaaggcttgtcctgagctcgtgatcgtcttccatgaaccaacctgaagcttcattcactgagagttgcgaggtcttatcagcctggagtttttcttttcgctttgtccttgtgttcgactagttggggcatggtttgcctgagcgatttcgcattgtaaaagacccgttctggctgtggatcttaatccggttggcgccgccgtcatttgcggtgcgttttggn

SEQ ID NO: 109 - DNA, 728 bp, Zea mays
  misc_feature (728)..(728): n is a, c, g, or t
  Peptide Sequence Number=SeqID_13949
  Probeset Number=SeqID_14512
aagaaagaaacattacttgcgaccaaaaattacagattcttgaaactattagtgttgatacttgatagataccatgggcttactagatcatctctgggatgataccgtcgctggtcctaggccagagaacggccttggcaagcttcggagacaccataccttcagtttccggcctagctccggtaatgatcaatcggacggtggaagcgtgagatcgtacggtgaagaatcaccggaggaggccgtgaaagtgacacgtagcatcatgataataaaaccaccgggataccaaggcggttcagctccggtttcaccggccggttcaactccgccagtgtctcctttctctggaggaaaggaaccctttcggtttaggagaaggtcgacgtcggacgcgttcgataagggagcaggatcagagaatggaccaaggaactctcctcctacttacggcctgtgatctataactcaaatctcaatagggagagagaaaagaagaagagtagcccccaaaacgctttcgatcaagtggtccttgcatgcagagttcgtgttgcttccgttttgtaggccaaagaggttctctcttttgtgtgcgtgtatgagtttgttttgtgtgtttgtggttacgtctatgtttttgtttttgtatgtcatctcgttttgggaatgcttctacgtgtctgtacatattttgctgcaatgataataaaaatgtgtagatgccn

SEQ ID NO: 110 - DNA, 1129 bp, Zea mays
  Peptide Sequence Number=SeqID_13950
  Probeset Number=SeqID_14513
aaacacaaagactcaccagctccacgagcagaggagccgacacccaacccagcccggccaggagagagacaacatgcgttcatctcgggacctccggctcgccgtgctcctcctcctcttctcggcgtccgtcctcctcccggtagccagagcccagcaggaaaccgaggaggaggaggagttcagctactcgctggacgcggagaatgggcctgcgcactggggcgacatcaaggaggagtggtccgcatgcggcaagggcaacatgcagtcgcccatcgacctcgccagcccgcgcgtctccctcgtgcgcggcctcggctacctcaaccactcctaccaccctgccaacgccaccatcgtcaaccgcggccacgacatcatgctcaagttcgagggcgacgccgggagcgtctccatcggcggcacgccctacttcctccggcagctgcactggcactcccccaccgagcacagcgtcaacggccgccggtacgacatggagctccacatgttccacgagagcgctcagggcaaggccgccgtgatcggcgtcttctatgagattggtgcccatgacgccttcctgcacaagctggagccatacctggagatgatagcggatcgcaaggacagagaggagaagatgggcatgatggatcccaggggcgccagaggaaaggccagcgtgtactatcgctacgtgggctccctcaccgccccaccctgcgcggaaggggtcatctggaccatcgtcaagagggtgcgcactgtgtcgaggcaccagctggagcttctcagggaggccgttcacgacgacatggagaagaacgcgaggccccgtcaggaggtgaacagcagagatatcagcatgttccgaccttttgagcaaaatagacattgattactagtgttgatcctctggctaattagtctggtgcttcagctattttttatgtacatggttatatcatttctgtacgcagtagtgattttgcatccactttgataacttgtatacggttactgaataataatggaacgcgtccagttcatgtccatgcatatcttcatgtttccatgttgggatctgccagatcgtcgaaatgaaaaaaactggcaaggattt

SEQ ID NO: 111 - DNA, 885 bp, Zea mays
  Peptide Sequence Number=SeqID_13951
  Probeset Number=SeqID_14514
aaaaaccccaagcccatacatccacactgcttagtctatagactctataccatagtttcaccaccatctagctttaccagaaatggagggtcagagatcacaacgctggggttacttgaaagacaaggctatagccaccagccttgctgaagaagaaatggaaaatagcatggatggagaggaggatgatactggagatgaagacaaaaggaagagagtgatggagagagctagaggtcctaacacagaacgtgttcccttgcggctgtgcctggtcgataggtgcactgctaacttaactgaggccaagcagtattaccgcagacacaaagtctgtgaggttcatgcaaaggcatcttctgcaactgttgctggagtcaagcaacgtttttgtcaacaatgcagcaggttccatgagctagcagagtttgatgaaactaaaagaagttgcaggaggcgcttagctggacacaatgagaggaggcggaagatatctggtgacagttacggagaagggtcaggccggagagcggttagcttgacacagactcaagaaagaaacaggatagacatgaaacttcctatgactaactcaccattcaagcgaccacagatcagataaaacaacatcaacacacccaaccgctctctctcttctgtcatctacttatgttatatatctacgttctctagctatccaaataatgacatctaagtaccatgtcaagaaaagtggatcgtggtattgaatcctacaacaatatataactacaaaactctagtaccctttatgttatcatttaaaggatgcatatccacaaatgtataagacttgtcatactcttgtattgtctaattatgtttagtagtctcgtatgtttcaag

SEQ ID NO: 112 - DNA, 877 bp, Zea mays
  Peptide Sequence Number=SeqID_13952
  Probeset Number=SeqID_14515
gtttcttcttcttcttcccttggctcgccgtctcaccgatcgaatcattttctctgtttgttcgtttactcgcgcgcttcgaagctctgattttgacagagaaaaagaagtaagagatgggctcacgacagggaccaccgaagcatcagaacaaattcgcatgggtacccaacgccggcgtgaagatcaacgaaaccgaagtgggcgggaggttccgaccgctgtcggagataaccggagtttgccatcgctgtcgggagcagatcgcttggaagcgaaaatacggcaaatacaaaaagctaaccgaacccgccaaatgtcagaagtgtttaaagcgtaatgttcgtcaagcatatcacaagttatgcactggttgtgccaaagagcagaaagtgtgtgcaaagtgttactcttcttctgagcaaatcatgggaagggatatatatgaagtagaacctgaacagaagctgctcgatgagactatcaagaatgctagggaaagagatcgaaggacacttttgcgtgctatgaacaaagatagcaacccaaagaagtcagatgaagaagcaacgaggagcgatagcagcaaggttggtgatgtgtttccatcaacatcccttgaagaatatgcaaacaagtctggaagagttagcgggattgttggtcatggccatgtcgttgacgatgaagaagatgatgatgatgttgctagtgaacctgaactagatgaggaccacagtggtgatgatgatgacgaactgcaaaagtaatcgtagtttcggttgtagtagttctgtcaattttgataggcttgtgagattttgcaaaactcgttatgcttttaatgttttgataaagttttactttgttacctgct

SEQ ID NO: 113 - DNA, 841 bp, Zea mays
  Peptide Sequence Number=SeqID_13953
  Probeset Number=SeqID_14516
aagagattcgatcggcatcgcatcgacgacggcggcggcggaagtaatggcgaacatagaagctgaagcagtcgatttcgagcctgaggaggacgacctcatggacgaagacgtcggagcatctgatctctccccacgcgctggtcatccgaagcttaggtcagcaatctccggagcaaacgacgaatcagcgaataggaagaccaaaggccgcggatttcgcgaggagaaagattccgatcgccagcgccgcctctcctcccgcgacttcgaatctctcggttccgatggcggtcccggcccgcagcgatccattgaggggtggattgttttggtcactggagttcatgaggaagcacaggaggatgatatctccaatgcttttggtgattttggcgagattaagagtctgcatctcaatctcgatcgccgtactggttttgtcaagggctatgctttgattgaatacgagaagagtgaagaagcgcagagtgctatcaaagcaatgaatggtgctgagcttctgaccaagaatgtcagcgttgactgggcctttagcaatggaccaaacaatgctggatcttacaggagaaggaacatgaggtcggggaggtcacaacggtcacgaagcccgagaagacgtttctgactgtatgatttagagttgtctccacatctctctgtattttggattctctatctgtaactcgagagtgtttcgactcttctttttattggttaagtaggtttggttgttttcaacgttgtgtaatcttatgcatatgggttgttgtgtttttaacaccatgagatatgttttaattctggtttgggagaagat

SEQ ID NO: 114 - DNA, 751 bp, Zea mays
  Peptide Sequence Number=SeqID_13954
  Probeset Number=SeqID_14517
acaacacacgtacgattcctttcctctgctctcctctctctctctctctctacaaaccctgcgatcctcttcctcaagattcgagtatgaaaggaggtaaatcgaagactgaaaccaggagctccaagctctctgtggctaagaagcctgctaaagcagcaggtcgtagcaaagcggcggctaaggatcctaacaaacctaagaggccagccagtgccttcttcgttttcatggaggactttcgtcagacttacaagaaggatcaccccaacaacaaatctgttgctgctgttggtaaagctggtggagagaagtggaagtcgttgtctgactctgagaaggctcccttcgtagctaaggctgataagcgcaaggttgagtatgagaagaccatgaaagcctacaacaagaagctggaggaaggtccaaaggaggacgaggaggaatctgacaagtctgtgtccgaggtgaatgatgaggatgatgccgatgatggtagtgatgaggaggaagacgatgactaaaagaagttgaagctggtagcacaatataggaacgctacaacaaggatctctcggatgttttttattttctttctttttactgatgttttcaacttagtaaaagctgccactatctctctgattatgattctacgggtaatggaaaaagtgtgtgtagaatgtttgaatgggagatatgcacctctatgtaacgatttagcttttttatcattctgaaatatgttatc

SEQ ID NO: 115 - DNA, 679 bp, Zea mays
  Peptide Sequence Number=SeqID_13955
  Probeset Number=SeqID_14518
tttttcaaatggcctccgccgtcgtctccgctgcgttgcgactcccgctcgctacccgccgattctccaactcctcgccgcggattagcttgcaacattccacgatctggattcgtcatctccgtagcatcacaacagcttcctccatgagccaactaaccagcgaaaccgatgcctcccgtactaacgacgagaactcggctgagaaaccagacgacgtaccagacgacgtcgtggttcaatacgtggtgcttagacgagatctgatcgattcgtggccactcgggagcgtcgtaacccagggatgccacgcgtcggttgcggcgatatggtcgttcaaagacgatcccgttacgcttcagtactgtgatccacagcacattgactctatgcacaaggtcactctggaagttaaaggagaaactcagatgttgaatttgtcagagaagttgaagtcaggaggaatctctcataaggtgtggatggagcagccggagaatattccgacttgtattgctacaaagccttatctcaaatctcaagtctctcctttcttcaagaagctcaaactttgcaagtgattcttctccattttatattaaaaaatctcatttataaagggacactcttttgaatgttaagtttttgcatatagagtaaagaaaagaagcagatgact

SEQ ID NO: 116 - DNA, 584 bp, Zea mays
  Peptide Sequence Number=SeqID_13956
  Probeset Number=SeqID_14519
atatagagatcgtgagagaagaagagaagtttgatctttgtgagaacatggctgcttcagtgatgctttcatcagtgacactgaaacctgcgggtttcacggtggaggaaatgtcggcgagaggattgccatcgctcacaagagcttctccttcttccttcaagatcgtcgctagtggcgtcaagaagatcaaaacagacaagccctttggagttaacggcagcatggacttgagggacggcgtcgacgcttcaggcagaaagggcaagggatatggtgtttacaaattcgtcgacaagtacggtgcgaacgttgatggatacagtcctatctacaacgaggacgagtggtcagcgagtggtgacgtgtacaagggaggagtcaccggtttggcgatttgggcggtgacactcgccggtattcttgccggaggagctcttcttgtgtacaacaccagtgctttggctcagtaaaatcttgaaactgtgtttaactcatgtgtactcgtgttcctattatatgttttagtgtcgttgttatcttctatgtaatgtttttaagaagctaagaacatactttgaatc

SEQ ID NO: 117 - DNA, 683 bp, Zea mays
  Peptide Sequence Number=SeqID_13957
  Probeset Number=SeqID_14520
agtttatctctctctctgttgcaatgtcgaagagcggaagatattgcttaggatcaatggaagacatccgagcagtattccagcgcttcgacaaaaacggagacgggaaaatctccatcgacgagctcaaagacgtgatcggagctctcagtcccacggcgtcgccggaagaaacgacgttgatgatgaaagagttcgatctcgacggtaacggatacatcgacatggacgagttcgttgctctgttccaaaccgaagacggtggcgatattcgagatctgaaggaagcgtttgatctgtacgatttggatggaaacggacggatctctgtgaacgagcttcactcggtgatgaagaatctcggcgagaagtgttcggttgaggattgcaagaggatcattagcaaagttgatgctgacggtgacggttgtgttaactttgaagagtttaagaagatgatgatgaacggcagagctactgcttgacttaacggcgaggaatcgtttccttttttttttttttgtatatattcaatttttagttttaggttttatcgattaaactggattaatctttgtttttcctttggttttttaatcttatggattaattagggatttttatttcttaattgtaaggtttaatcgatttttttattttaataattatttattagtatggtt

SEQ ID NO: 118 - DNA, 739 bp, Zea mays
  Peptide Sequence Number=SeqID_13958
  Probeset Number=SeqID_14521
aggatggctcgataccttgcaaacaaatgttccattgcttcacgtattgactgctattcagatatgagtagctccatttttggtgagaagctgcgtgaacaagttgaggagaggctagatttctacgataagggtgttgcaccccgcaagaaccttgatgtgatgaaagctgctattgatggcttgacaaacacagaggatgatgacggcaaagagaatggtgacgcatctgtgaagaaaagcaagaagtccaaagctgaggctaacagtgacgcgatggacgttgagaatgccgcaacagaagctgaaactggaaccgagaagaagaagaaaaagaagcacaagcttgaggagccgcaggatgtggagatgcaagccaatggcgatgatgagacccctaagaagaagaaaaagaagaaccgcgacgccgagtctgttgatcctaagacgggcaccgaggggaaatccaagaaaaagaagaagaaatccaaggctgatgacgacgagtagtagattagtacctaagtacctagcagcgagtgttcaagtcgattgaggatgaaattttttgtaccgactgtttatgtgtgtactgtttgagcctctttgagcccttgacgaggtctgtaatgtagcttcatggactgaagcggcgtatctgtaatacatttgatgttgcagtatgtcgtttcttggggatggcttagctttcctatataaatggaatggcattgttgac

SEQ ID NO: 119 - DNA, 618 bp, Zea mays
  Peptide Sequence Number=SeqID_13959
  Probeset Number=SeqID_14522
aacaaaagaagaagcttagaacgcaaaagcaaagtgtctctcttttcttagcacacacaaaaagaagagaaaagcaagagacaatggtttcggcactgagattcttcacatgtcttgtcttggcagtgtgcatagttgcctcagtagatgcagcaatctcatgtaacacagtggtaggtagcttgggtacttgttacgtttacctaaggcaaggcgggattgtgccgccttcatgctgtaggggagtaagaaatttgaacggtatggctcaaaccacaccagatcgtcaacaagcatgcaaatgcgtacagtcctttacaaaatctgtccctggtctcaaccaaaatttagcatctgggcttcctggaaagtgcggtgttagccttccctatcccatctccattagcatgaactgcgacaacgtcaagttaagcggaactcatatatcatcgtgaggatgaagagtatggtctacaataagtaaaacgaattaatggtttacatactcgctgattcatcatctccgacttgtcttgtttttatattgttgttgaaaaagtttgtttatgttactttgtaatattttgctctacattgtatcttaattatgtttaagag

SEQ ID NO: 120 - DNA, 910 bp, Zea mays
  misc_feature (910)..(910): n is a, c, g, or t
  Peptide Sequence Number=SeqID_14097
  Probeset Number=SeqID_14523
agacattcttcttcgcatcggtttgttgcttagccagagctctgcttagcttcatcagagaagctcttctcccgtaagttgtttgaatctcagctccaactccagatctcactttcgccatctcttgaaaatctatttggtttttcaagaatcgcaaatggacggaagcggcggcggtggtggttctttagccacacctgttcaaaagcgggctcacgaggcgtggaggatttacaagtattacctcgacaagactacgcctcactcgacctacaggtggatcgggacgcttgtcgtctttctcatctactccttgagggttttctctattcacggtttctacatcatctcctacgccctcggcatctacctcttgaacctcctcatcggcttcttgtcccctcttgttgatcctgagctcgacctctcctctgatggtggaccttctctccctactcgaggctctgatgagttcaagccttttatccgccgtctccccgagttcaaattctggttttctatttaattatgcacttaacatgtttttttttttttttgtttatttggatggggattgaatctgtttttcaggtactccatgactaaggccttctgcattgcgtttctgatgacgttcttctccgtctttgatgttcctgtcttctggcctattctgctttgctactgggttgttctctttttcctcaccatgagacgccaaatctcccacatgatcaagcacaagtacatccccttcagcatcggtaaacagaaatatagtggccggagatcttctgcgagtagcggtcgtgctgattgattctgattattagttccaatttgtttcatgttgctctctgttagttccctccaaagtacctcttctgtaaatatgattcatttctacttn

SEQ ID NO: 121 - DNA, 797 bp, Zea mays
  Peptide Sequence Number=SeqID_14098
  Probeset Number=SeqID_14524
ctctcttcctctcagcatcatcatcaccaccaaatcgccgccatgttcagacaagcttctcgcctcgtctcccgatctatcaccgccaaatcggcgacaaaccgtgcgttttcaacggaagtcccgtcgacgatcgattcgagtttcgtggaggcatggaagaaagtcgcaccgaacatggacccgccgcagactccttcttccttcatgaagcctcgtccatcgactgcttcctcgattccgacgaagctcaccgtcaatttcgtcctcccttacgcatctgagctttccgggaaagaggtcgacatggtcatcattcccgcgacaacaggacaaatgggtgttttgcctggacacgttccaacaatcgctgagctcaaacccggtatcatgtccgtccacgaaggtactgacatcaagaaatactttgtgagcagtggatttgcatttctccacgcaaattccgttgctgacattatcgcggttgaggccgtgccgcttgagaacatcgacgcaagccaagtccaaaagggtttagctgagtttacacagaaacttgcttctgccacaacagatcttgagaaagcagaagcacagattggtgtcgaagttcacagtgctatgaacgcagctctctcgggctgatgatgagtgaaagtctcttttttactactacaaatgatggaataaattagaaaatgattttatttttccttttcgtaattgtgttggactttttggaataaatgattttgttgaaggcacaaaccaacagaaagttattattcttctcgact

SEQ ID NO: 122 - DNA, 827 bp, Zea mays
  Peptide Sequence Number=SeqID_14099
  Probeset Number=SeqID_14525
gaagatctggttagtactgaagaagaaaactctgtcggaaaattctatctttctcggagggaagaatccatttctgagaggtgcttcgctttctttgctgatcagcttcggattgattacttcgaaagatggatcctaaccagccgcctgttgaaaactatgcgaacccaaatacatgtctcttccatgttctcttcaagggtgctgcgttggcgttttacattctatccgctctcttcttcaacagctttgtcataatctttgttgtgactgttctccttgctgcacttgacttctgggtggttaagaacgtgagtgggcgtatactggttggtctcaggtggtggaacgagatcaatgacttgggcgaaagtgtctggaaatttgagtctcttgaccaagagtccttggctcggatgaacaagaaagactcgtggcttttctggtggacgctttaccttgcagcagctgcgtggttgatccttggggtgttttcactgataaggtttcaggccgactacctgcttgttgtgggcgtttgcttgtccctcaacgtggctaatatcatcggcttcacaaagtgcaagaaagatgcaaagaaacagtttcagcagtttgcttcacagacaatcgcatcaaggttccaatccacggtacaatctgccttcacccttgtttgaaaaataaaaaaggttttagtgagagcaaagactgtgtacaaagaagattgtcgccataagccacaccatgtcttttttttttttttttctggctgattgttttttccactatataatattaacggatataagaaagaggcttatcat

SEQ ID NO: 123 - DNA, 634 bp, Zea mays
  Peptide Sequence Number=SeqID_14100
  Probeset Number=SeqID_14526
gagattagttttctttcttgagagatctcttcagctcctatggcgtcaaacaccagccgtaattccaagcaaagaaacggacctccgccggggagaaagaagaaacataaggtgaatcagcttaaaccaggtacgagcggtcacactttgacctttaaggtcgtggatcagtattcagttacttctttcattagacctggtcggatcgctgagtgcctcgttggagatgagactgcttccatcatcttcaccgctcgcaacgatcaagtggacttgatgaagccaggaactactgtgaatctccggaatacaaagataaatatgttccacggattcatggggcttgctgttaacaaatttggtcgcatcgaggtcgtcactgaaccagctgatgacataactgttaaagaggacaacaatctatcccttgtggagtatgagcccgtctatctctagacccgtgtctaataggttatgtgtcaatgagttttggccaaatgttttatcttatgatgttgcaggtttgctatttatctaataggttatgtgtttttgttgcattatcatttatcttttgtaacctattctctctccttttgtgaggcttgaatgaaccaaaaagataaagaaagat

SEQ ID NO: 124 - DNA, 818 bp, Zea mays
  Peptide Sequence Number=SeqID_14101
  Probeset Number=SeqID_14527
acaaagcgattgcggcggagagagagaggaagatcggggatttatctttttctcgatactgtagtaacttttgatctatggaagcggtagacaatccagaagaaaccatcccaggcaactcttcaagattagctgggaatccaaactggggaacagcaactgttgttgggatatttgctggaatgttatatggaggcagcaaagaggcttctgcttctgtgagcaaggatgcagaggtgatgttgaagatgggtagtacacaggacaagcgagagcaacacagattgatgcgagatgctatggagaaacgattcacccgggtcactcgtggctccctcattggagggatgcgtctcgggatgttcaccgcttcatacttcagtctacagaactttttagctgagacgcgaggagtgcatgatgttttcaatttcgtgggagctggttcagctactgctgccgtatttggcttaatcatgccggggtctcttgcttggcgtgcgcggaatgtgatgctcggttcagttcttggagctacagtctgcttccctcttggttggttacaactgaagctcatggagaaggcaaacgaaggcaacaaacaagacacgagccacattggcgaggtcacaagtggtgttggtgctgctattgagagactcgaacaacagttaagaaaataagaaagggaacgttcacagtttttttttgtatgctaaattttcaagccgatggagaataagataacgaacataaacactgttcttttgttgtttcgtacaattttgtgagtatacaatatgaaaacgttgatggtt

SEQ ID NO: 125 - DNA, 798 bp, Zea mays
  Peptide Sequence Number=SeqID_14102
  Probeset Number=SeqID_14528
gtagacgttgataattgtttggtagacccttaagaatcttaggtgtatctctttagtttgaaggttagattcagaatctgtagatttagtagcttctcttctctttctgttgtgtatatagttttcaaattgttttagcttgtgaaggtgaagtccttggtatggatatgaagaagcagattatggatgagtctgagaacttgtgcttcaagaagtccttgacgccgccgcctcctcctcctccaccgcttcctccatctccaggatatggatcaagaaagatcgagggagacagcataaccaataaacagatcaagaagttctggaggcagaagcagatcattgaagaggagcatctctttgctgctattaaggctgcagctcgtgtcagagcccgtaatctctctgatgaggactacaaacgctttgaagaaagcttggacatggaggatccagaaaccgaagttgacgagggaattaaagactggtggatgaagagtaagtacgcgtacttgaaccagcctgctcttggatctgcagattcactcaagagaaagaggttttcgtcttatgtaccaaactatttctcattcaagccttgcattcctctctatgcaacttcgcttaatgtcttttaactatgtgcaaattgtcttgcgtatatgtctacatatgtgtgtgtgtgtttgtgtctttgtacattcatgtgtaattgtgttccgtgttaatggatctggactttggtgtgtggttgtttggtttgtaagtgttgaataaaattcaatcttactatggaac

SEQ ID NO: 126 - DNA, 643 bp, Zea mays
  Peptide Sequence Number=SeqID_14103
  Probeset Number=SeqID_14529
aattattcaatcaaaagtatcaaaatcaaacagagagagagaaaacaatggccgcaacagcagaattgatcccagcaggagaagtgatcgcttgccacaccgtcgaggactggaacaacaagctcaaggcagccaaagaatccaacaaactgattgtgatagacttcacagcagtgtggtgcccaccttgccgtttcattgcacccatctttgtcgagctcgctaagaagcaccttgatgttgtcttcttcaaggtcgacgtcgatgaattggccactgttgctaaggagttcgatgttcaggccatgccgacctttgtctacatgaaaggcgaagagaagctcgacaaggttgttggtgctgcgaaggaggaaatcgaagccaagcttttgaagcactctcaagttgctgccgcttaattatccttcgtcttctctacctatttgctaatgtgtttggtgttttaataaaatccttgttgctttattggcactttcacttgagtcatcatcttcctttgtgttgtggtgcctacaagccttgggtgtgtgaataaatgtttgcaaactttataactcgcagctatgctaaattttcatgttagttgttttatcaactctttgaggttattgtgttatgtcgg

SEQ ID NO: 127 - DNA, 800 bp, Zea mays
  Peptide Sequence Number=SeqID_14104
  Probeset Number=SeqID_14530
aatgctctaaacttctctacatcttctctctctaaagccatcatcttggttttggtgtgtgccttgctgtctattttggtgcttcccctagataagtgaccttaagactaatcatcatgagaatgtttctaggtgtcttgcttctcttggccttgaccacatcttcaagtgctatttactgtctctgcaaagatgggataggagacaaccagcttcaaacatcgatagactatgcttgtggaaccttagcagattgtaacccaatccatgacaagggtgcttgttatcaaccaaacaccataaaaaaccactgcgattgggctgttaacagctacttccagaaagcagctcaggcccctggaagctgtaatttctctggaactgccactaccagtcaaaacccaccttcaaatttggttactggatgtatatatccttcaagcgctagctctgcagggtcgcctccttcaactacaccaccaacgggaacaactccaacaacaaacggaaccggaggctttactccatttccgggaactccacctgcgtttggtccaactggaaccggaggctttagcccaagcaaagctgcttcaagtttggtcatttcctctgttttcacgctctgtttctcatcactagcgcttctgatgtaaggttcgtgtagagacaaaagacatccacatgggtccgtcttttgattcccttttgggtagaaaaggaagcttcagtggtcattgtggtttatatttctgttttttcccatttatgtgaaagatgctctaattagaatcttgagt

SEQ ID NO: 128 - DNA, 619 bp, Zea mays
  Peptide Sequence Number=SeqID_14105
  Probeset Number=SeqID_14531
attgaaaattagattttgtccggtggagaagatgggagcagaaacggtcgtggaagctgagaaaattgacgacttgctcgaggcagctagatacaatgatatagatgatctcaaaagcttggcctttgatggtgtctctcttaactctcgcgattcccaaggccgaacagcgcttcatatggccgcggcgaatggacatatgagtatagtggagtatctgatcagtcaaggagtggatattaacgctctgaacgaggagaacaatgctcctctgcattgggcttgtttgaatggccatatcgaggttgtgaagaaaatgatcttggcaggagccagtcttagtcttttgaatcggtacgagcggactcccatggacgaagctattggtgcagggaagatggagattatagatgctatcaacacaactgttacacaaatggaacttgaaaacaccactgtagcctgactttaatggcgtcttcctaaatgcttgttgtctctctctctctctgtagtttacagcgtagtttttataatgtggaagttttgcgttgttatgtagactgatggttagaactggaatcatctgaaatcgaattctaccaaaaagattattgcc

SEQ ID NO: 129 - DNA, 1007 bp, Zea mays
  misc_feature (1007)..(1007): n is a, c, g, or t
  Peptide Sequence Number=SeqID_14106
  Probeset Number=SeqID_14532
tagaatatgattctgggtggtagatataaatgaaaattgcgtctggttccgacgacacctcttttaagttttggttttgtttcttttataccaccggacttttgcttttacaggttccaaaacgcatctcctccacctccgtctcctactcctcgcttcctcgtcacgcaaactttgatccaccggagcaatgaagatcaccgccttgcttgttctcaaggccgcccccgaaacctcggatcccgtgatcctcgcaaatgcttctgacgtctctcactttggctatttccagcgatctagcgtcaaggagttcgtcgtcttcgtgggccgcactgtcgctagccgaacccctccttctcagcgccagtccgtccagcacgaagagtacaaggttcacgcttacaataggaatggcctttgcgcggtgggattcatggacgatcattatcctgttcgaagtgccttttctcttctcaatcaggtcatagatgagtaccagaagagttttggtgaggcatggaggtctgctaaagaagactcctctcagccctggccttacttagccgaagctcttaccaaattccaggacccggcagaggctgataagctgttgaaaatccagagggagttggatgagaccaagattatcctccataagaccattgatagcgttctagcccgcggtgagaagctggacagcctagtggagaagagctctgatttgagcatggcatcgcagatgttctacaagcaagcaaagaaaacgaattcatgctgcactattctgtgagctgcgactctggatggatgtctttgggtatatatagtcaaccaaacttttgctgtggggcgagactgttttccattttatataatatatatttgattccgttctctcgtttgcatgcactcttgaaattccatataagactcatgtcgtgtggcgtgttatccaaatacagtttcaattgtctttgccagattatatgattgcttttgtttatgtn

SEQ ID NO: 130 - DNA, 675 bp, Zea mays
  Peptide Sequence Number=SeqID_14107
  Probeset Number=SeqID_14533
aacctacgtcgataaatctacgagggagcttgaccttgagcaacagagagagagagagagatgggtttcttctcgtttcttggaagagttcttttcgcttctctcttcatcctctccgcttggcaaatgttcaatgactttggagttgatggtggtcctgcagctacagagctggctccaaagcttcatctggctaagtcacatctatcttctagattaggtgtaactttgcctagcgtagaggtaaaacaagtcgttgctgctatagttgcgttgaaaggagttggaggcttactctttgttatcggaaacatcttcggtgcttatcttctggctttctaccttgtggttgtcagtcctattctgtatgatttctacaactacggacctgaggagcgtcatttctctccattgttgactgagttcttgcagagcgttgcactctttggagcattactcttctttattggaatgaagaactcaacacccactaagaggaatctgaagaggactcctaagcccaaagctgcttagtatctcttttttttttataacttttgttcggacaaaatcgtttcttagcactttggttttctttttgttgtgtgattcttagattggctcatgatatcataaaattatcttttacttgatttgattattgggatttcttgg

SEQ ID NO: 131 - DNA, 745 bp, Zea mays
  Peptide Sequence Number=SeqID_14108
  Probeset Number=SeqID_14534
aatttggctctctaccaaccaataaacataagagttctacaagacgaggatgttgcgcagcagctccaccgtcctcccctgtctcctcctcatctccgccgtagcaatcgctctttccttggacaatgatgacgacgtgtgcgtgttcacggtttacataagaaccggttcggtttggaaagccggttcagactccgtcatgagcctccgtctctacgacagttacgggcaaaatgctgttatatccgatttggtgtcatggggaggtttaatgggtccattccatgattattatgagaggggtaatctcgacattttcaccggcttaggttcttgcttatcaggtccggtttgtgcgatgaatttgacttccgatggctctggcgatcaccatggttggtattgtaactacgttgaagtgacgatgagtgagagtcgtaggagaagttgttctcaggagaaattcacggtggagcaatggctggctcgtgatacttcgccatatgagctgtcggccattaggaatcaatgttcggactctgtcgagaatcgatgagtcgtttccacgatgtgagtgtgttatttatttattctggtggggttgtcaatgaaacatgacgtgatcatatatttaattcgagtgtgattaagatctcctgcttttaaaaaataaaagaacgaaaacaaatatgttatatacaatgcttgatattgagtgattataacttataagatgttcatccat

SEQ ID NO: 132 - DNA, 674 bp, Zea mays
  Peptide Sequence Number=SeqID_14109
  Probeset Number=SeqID_14535
gatctttactttctctgtagccgtgatcgtcgccgtccccgttttctatctccggtcggattgtataaccgggagctgttgtcaccatgtttctcacgagatttatcgggaggagattcttagcggtggctgcttccacgagatcggagtccactactgcagcagctgcctcgactgttaagattgcgaaaaaccctctcgaggagttctttgagttcgacagaagccaggacgaagacaaacctgttgtctacggtcgaggttggaaagcttcagaactgcgactcaagtcatgggatgatcttcagaagctgtggtacgttcttctcaaagagaaaaacatgttgatgactcagcgtcagatgcttcaagctcagaacatgatgtttcccaaccctgaacgcattccgaaggtgaggagatcaatgtgccgcataaagcatgtgctgacagagagagcgattgaagaaccggatcccagaagatcagccgagatgaagagaatggtcaatgctatgtgatcaatcccttgtgcttcttttcgcaaccgattagagtcggtgtttgggtcttagtccaatgattgtgactgttgtccggttgttaaaatgtttgttcgggtatatgcacgtacgttttctataaaaccgtggttggtgtttatttcagcaaac

SEQ ID NO: 133 - DNA, 637 bp, Zea mays
  Peptide Sequence Number=SeqID_14110
  Probeset Number=SeqID_14536
atcataaacaaatatttctaataataatcgagcttgtttagttagaaaatgggattgagtggtgttcttcatgtggaggttgaggttaagtctccagcagaaaagttctgggttgcactcggtgacggtatcaatctctttcccaaagagttccctaaggactacaaaacaatgcaagttcttgccggagatggcaactctcctggctccattcgcctcattatttatggagaaggatccccactggtgaaagtatcggcggagagaatcgaaacagtggatctggaaaacaaaagcatgacgtacagcatcatcggcggtgaaatgttggaatactataagacattcaaaggaaccatcaccgttactcccaagggcggtggcagcattttgaaatggtctgctgagtttgagaagaccggccatgagattgaagatccacacgtcatcaaggactttgctgtcaagaacttcaaagagatcgatgagtatctccttaaaaaatccagcgtctaaaactctagaagcttctattatatataagggggttcgatcatctctatcagttttattgttgtctaattaagatgttaaataaagtggaatctccttatgaataatcattttaatgattccg

SEQ ID NO: 134 - DNA, 506 bp, Zea mays
  Peptide Sequence Number=SeqID_14111
  Probeset Number=SeqID_14537
aaaaagagtgattattaatggcgacttcagggtttaagcatttggtggttgtgaagtttaaggaagatgctaaggttgatgagatcttgaagggattagagaatcttgtttctcaaattgattctgtcaaatcctttgaatggggagaagataatgagagtcacgagatgcttagacaaggattcactcatgcattctcgatgacttttgagaacaaagatgcttacgtttctttcacaggccatcctcttcacgttgagttctctgccgctttcaccgccgtcatcgacaagattgtggtcatggacttcaccgtcgccgccgtcaaatctcccgttgttgtagcaccgtgaaaactcatcgtacttgtttcttaattaatctcgttttataatttaatcgaggtttgtgagttgtttcggtttatgtaattctgtttgttaagtatgttttggtttgattccttcagttccggttcggaataataaaaaactggttttgtgggt

SEQ ID NO: 135 - DNA, 672 bp, Zea mays
  misc_feature (672)..(672): n is a, c, g, or t
  Peptide Sequence Number=SeqID_14112
  Probeset Number=SeqID_14538
aaggaaaaacaaatttaggaatctaaaagtcagagatggcatcggtttgcagatcatttctaatgagtggttcaagaaacttagtatcgagatcaagaaccgtaactcaaaagtgcatcaatcttaaacccacgacgacaacgacttcgtctcactttgcttcagtctcccaatccatccctcgcgcttcaagggttctgtcggcattgggaagcgttgaaacgatgataccacttcatagtgcggttgcttcagctcggctccgttcaagcatccgctgttgattcctcctgctggagctggctttccctggagctgggagttcctcggtgacaccaacattagcattggtcctcaatcttgaagcttccatgggttgatactcgatattgagctgcttaagactactacttggtggtaccagattgccagttatggaattgtttttgtttcccagctcttatgttcttctacttaatcatatcatcttattggagcagggaatggatgccaaaatatctcaaaagtattaatcatcatcttagtctagctaagacactagagttgtttcttcttgcatttgaacgaacataatcaaagttaaaaaccctaccaaccaataattgtgaatccaaacattcttgcagtctactcctaaacccatttattaan

SEQ ID NO: 136 - DNA, 686 bp, Zea mays
  Peptide Sequence Number=SeqID_14113
  Probeset Number=SeqID_14539
atatattagagtagagagcagaaaagaagaagttaaaaaggtagatcgaatgaacagaaatggagaggaggaagtggccgagaagaagaggaggaggagggagggggtgcaggtgtccctcagaggaggctgcttggctgcttcagccactgctatagcggtaatgctgatggcaacagagaagggtgtggctgacatctatggcttgccgctccctctcaactccagctggtctttttctccctcctaccagtatgtggtgggggcatgcacggtgaccattctctactccctgttccacctctgtctaggaatttacaggctcctcactggatcacccatcacaccctcccgttcccaagcttggctttgtttcatcttcgatcagctcttcagctatttgataatgagcgctggatcagccggtattggagttacaaacctcaacaagaccggcatcaaacacactcctctccctgacttctgcaagaccctttcttatttctgcaatcacgtcgccctctccctcctcctagtcttgctctccttcatctttctcgcctcctcttccctctttaatgtccttgtgctctccactctctagtctcatggattctctattgttggtgctctatataatctaagacagactctaattattattatttatgatcacttgcattccc

SEQ ID NO: 137 - DNA, 717 bp, Zea mays
  misc_feature (717)..(717): n is a, c, g, or t
  Peptide Sequence Number=SeqID_14246
  Probeset Number=SeqID_14540
aagcaacagtactctctctcctacctcactcctctctctctctctccccctgcaaattcatggcgacggagaccgagtttgaacctcaacaatcaccaatggcggaggagcagccgagtcccttctctctcccaccgtatcctcagatgatcatggaagcgatcgaagcatcgaacgacgcgaacggttgcaacaagacggcgatcgcgaagcacatcgagtcaactcaggcctctctaccaccgtctcacatgacgctcctcagctaccacctcaaccagatgaaacagtccggccagatcgcgatggtgaagaacaactacatgaaaccagatccgcatgctccgcccaagcgcggccgtggccgtcctccgaaggcgaaacctcagggagattcaagccacgtggcggtcccggctcctgctcctcccgtttcctcgccgaggcctagaggtcgtcctcccaaggcgaaggaaccttcgtcggaggtggaaacgaaggttgcagaaccgagtggttccgggaggccacgtggacggccaccgtagaagcagaagacggaatccgaggcggttaaagccgatgttgaacctgcggaggctccggctggtactggggagcggagagggcgtggaaggccacccaaagcgaagcctgcgatggtgcctgttggttgctaaagttgacgcttaagcaaatcgaataagctttgattan

SEQ ID NO: 138 - DNA, 638 bp, Zea mays
  Peptide Sequence Number=SeqID_14247
  Probeset Number=SeqID_14541
atcccaaacccaaagcactagctatattactctagcacgccacacaatcacaatgtcatccaacgctgccctcttcgtcgccctgagccttctcctctctgccgtcgccgcccacggctgcggaagcatctattgccaaccgccggtcgtcgtgccgacaccacccatcgtcgttccgccgccataccatggaggagggcacggccacggccacggcgctgggcagtgctcaatcaacgtgctcaacctgagggtgtgcgctaaagttctcggccggctgctcggcctcaaggtcggcgttccggcgcacgaccagtgctgcccgctgctccaggggttggccgacctcgacgccgccgtctgcctctgcaccgccgtcagggccgacattctcggcctccgcctcaacgtgcctgtggacatcagactcctcctcaaccactgcggcaagaagtgcccgtctggtttcacttgcccagcccattaatggacgtactgttgcttgggcgccgaataagatttgctttccgtgctttgttttttatttcatcaaatgtggatctgctccactcccacatttcgattgtgtaaccagttctgcttttcttggcaaacaagcatatactcttcgtattgat

SEQ ID NO: 139 - DNA, 890 bp, Zea mays
  Peptide Sequence Number=SeqID_14248
  Probeset Number=SeqID_14542
atcccaaaaaacctgtgaaagagcgccgcctctcgaaaacctaaaactaaaccgatcttctcaacatgtctccaacagagggatccgcgacaaaagagatgagtctgctgactttgaacgaaagggacactactaagagaaccaccagaccaagaaaacgcgacattgggagaattcgtgtaatgggatatagcattgaccttccccatgatgacgtggtaaacgcgttgagaaaacatttctcttcatgcggagagatcacggatgtttgtgtccacgtactcacggataatcttctcgacagttttggttttatttattttctgggaggacaaggcacagttgacagggcgatgcaacttagtggaactgacgttggaggatggaatgtcactgttaagccttatcctttcctggaagatgcagactgggaccctgttgccattgttcaaggatatgacacttgtcttgggaaaactgatatcaagagaatgttgtttgatcacttctcttcatgtggacagatcaaggatatcaagtttcagaggagcagcattggtttagcttctgtgtatctttatggagaaggtgcagaagacaaggtgcttgatcttgatgggtcctacatgggaggatgcaaaatacttgttaagcttattccctcgagtggaatatacactgttcaccctcgtagtcgtcatcttggctggcccaggtaacaaggctaggatgactttggaagaaaagctctcggatctactgggagaagagacaataaagacaagctctatgttattagtatttgtgaattaatgcaacgatctactctagtactttctatgctattttctctcttctggattttaaactaaaagctcagtatttatatt

SEQ ID NO: 140 - DNA, 750 bp, Zea mays
  Peptide Sequence Number=SeqID_14249
  Probeset Number=SeqID_14543
atcacgttcaacaagctcatctaccaatccagcaaactagctaaaacccacttctccaaaatggcgtcccagcttgtcgagagccaccgccccggtgccgaggtccacaaggggaacgatatctgcaagaagaagacggttgagcttctcgaagagctcggcctcccgaaaggcctctttcctatggatgacatcgaggaggtcgggcacaactgtgagagtgggttcgtgtggatacttcagaagaagaagctagagcacacgttcaacaagctcaaccagaccgtctcctacgacactgaggtgaccgcttttgtggaaaagggcaagatgaagaaggtcaccggggtcaagatcgaggacatgtctttggtcgaggtctatgtggatgagtcttctgctgataaggttaccatcaagaccaacaccggtctgtctgacacccatgatgcggccgtgttcgctctcggagaatagggagctactatttacaaaggccagaagaataaagtcagaatggttcggcactgcagttcaaatgttatgcagaagtatatgtttccgttttctttgtaatctaataaaggctgttgcatgaatgttgcttcctttcagcccatgttatgcagaaatttatgtttccgttttctttgtaatgtaataaaggatgttgcacgaatgttgcttcctttcagcccgtaagcgtactccaaatgtaatgaataacacttataccgcctcctatatccc

SEQ ID NO: 141 - DNA, 592 bp, Zea mays
  Peptide Sequence Number=SeqID_14250
  Probeset Number=SeqID_14544
ttttttagtttctctccgacgagatttgagatggcactaagaggagtatggcagctccagaagctggtagtgagctactgtaattggggtggcagcagcagaggcataagagcctttatggaatcagagttacctgctctgatcgagaagaatccgcagctcgaagtggtaacggagctctcaaggggacaacatccttacctcaagggcatttacaggaatagaaatgaaagagtggtgtgtgttaagaacatggatcctgatcaagtgcttttgaatgcaacgaggcttaggaactctcttggaaggaaagtggtgaagctgcggactaggcatgtgaccaaacatcccagtgttcaaggcacttggacaaccgctgtcaagttctgacaacctttgcgggtcttttgttcttcttcttattcgttgctgtaatgttgcaatatcaggattcttcctttgttaccaatatttgcaataccaagttgtttccactacttgttctctctggttcgttcctttttttcttacaacaatgttctgtcttgttttggatccggttaatgtctgggaaacatgatcctcttgtgtt

SEQ ID NO: 142 - DNA, 866 bp, Zea mays
  misc_feature (866)..(866): n is a, c, g, or t
  Peptide Sequence Number=SeqID_14251
  Probeset Number=SeqID_14545
atcgactacttccgttttcaaagtctgctcctttttggtgcattttgagattatagagaaatgcagagattgagatctcagctactggctaggcctctcttggaggagagcaggctgcgagggtattgcacgagctcctcatccgaaaagatggtagcttcggtgctttttgagagactgcgcgttgtgataccaaaaccagatcctactgtttacgcctttcaggagttcaagttcaattggcaacagcagtttcgccgtagatacccagatgagttcttggacattgctaagaacagagccaagggagaatatcaaatggactatgtgcctgctcccagagttacagaggctgacaagaataacgataaaaagtcattatatagagctctggacaagaagttgtatcttctcatcttcggcaagccatttgagctactagtgacaaacctgtctggcatttccctgagaaagtctatgattctgagcctactcttcgtaagtgtgcggaatctgctttgaagtcagtgttaggagacctaactcacacatactttgttggaaatgctccaatggctcacctggctatacaacctactgaagaaacacctgatttgccatcttacaagaggttcttcttcaaatgcagtgtagtggcagcgtctaagtacaacataagtaactgcgaggattttctgtgggtaaccaaagatgagcttctggagttcttccctgagcaagctgacttcttcaacaagatgatcattagctgaggctactctcttttttcctcttttttcctttgttatttccttccggctctcttcgtggagatagaaaacaataaaacatgaacttttaagacn

SEQ ID NO: 143 - DNA, 916 bp, Zea mays
  Peptide Sequence Number=SeqID_14252
  Probeset Number=SeqID_14546
aactgaaagataagaagaagatgaagctgaaagtgtatgcagatcgtatgtcacagccgtctcgtgctgtaatcatattctgcaaggttaatggaatcgaattcgatgaggttctgattatcttggcgaagcgtcagcaattatcccctgaattcaaagagattaacccattggggaaagttccaactattgttgacggcagacttaagctcttcgagagtcacgccatcttgatttatctttcctctgcattcccgagtgtagctgatcattggtacccgaatgatctttccaagagagccaagattcactctgtcttggattggcatcactccaatttacgccctggtgcagctggatatgtaatgaatagtgttctagctccatttcttggcggttctctggactcgaaagcagctgctgaagctgagcagatactaaccaagtctctgtccactctagagactttttggcttaagggcaatgctaaattcttgctcggaagcaaccaaccatccatagctgatctcagccttgtatgcgaacttatgcaactccaggttttggatgagaaagatcgtcttagattgttttctccttacaagaaagttgaggaatggattgagaatacgagaaaggccacgcagcctcactttgatgtggttcataaaaccctttacggagctaaagacaaatttgagaaacagcggaagatggggacaacaaccgtatctaaacctggttttcaatctaagatgtgagaacaaatttgtatcggaggctgtttgtgaaaaccccggtttaggggatcactgtaataactcggttcaacatttacactgtaatcggaaccaaggaatgtatttgtaatcacttatcagggctgtttcaaaataaacatataagtgaggcaaat

SEQ ID NO: 144 - DNA, 623 bp, Zea mays
  Peptide Sequence Number=SeqID_14253
  Probeset Number=SeqID_14547
ataaaaaattaaacccattacttacttaagcaaaagaaaaagaaaaaagtttaagattatggagggcttcataaagctgtcaacattgttgattgtgtgcatgttagtgtcagctccaatggcagaggcagcaatctcgtgtggcgccgtcgccagcaacttggggcaatgcattaactacctgaccaggggcggattcgttcctcgaggatgttgttcgggtgttcagaggctccacagcatggctcggaccacacgtgatcggcaacaagcttgtcgctgcattcaaggagcagctagagccttgggttccagacttaacccaggccgtgctgctcgtcttcctggtgcttgccgtgttaggatctcttaccccatcagcgcaagaaccaactgtaacaacatccggtgagcatgagagcatatatacgttgaagtgttttaatttccataaaaataatgtcactagtataattgtgtatcctttcaatgttatgtgttgttttcagaattggtgtgtttcatttctttctttatatacgaccgtccatttaagtggccatctctgttatgtattcctctaaggcgctaatgatgtatggaattactatatgtattgtttc

SEQ ID NO: 145 - DNA, 544 bp, Zea mays
  Peptide Sequence Number=SeqID_14254
  Probeset Number=SeqID_14548
aattcggaagttctccttctccaagcaaaaatcagagggttttagggttctagaacgagcgggtcggcgagaacagccatggacgcctcccccgagctgcaacagttcctggagcaagagaagcagaagatggtgatgagtgagatggtaaccaagttgacaaatgtgtgctgggacaaatgcatcaccagcaccccaggaagcaagttcagctccggtgaaactacctgcctgaccaattgtgctcagaggtatcttgacatgagcatgataattgcgaagaggttccagatgcagtagggcgtctccagctgcagctggttgcgtcatcaaaaaaattccaaactctgaacatgccaacaatggccagttgtaacagtgaaaatatttaatcttctgtcgtaaacgcttggttagtactcagtgtagttgcatctgtggtgaacctttggttagctttcttgtgaagctactgtcattttattctccaatcacttagttggtttcgtttcaagtcaatctatatgaagtctgccaaattttc

SEQ ID NO: 146 - DNA, 749 bp, Zea mays
  Peptide Sequence Number=SeqID_14255
  Probeset Number=SeqID_14549
aataaaaaggaagctgaaaacttttctctcatcttaccaaataagctgatggaggaggaagagctcggtaacgcagtgacaccaagagccaagaaagacgttgctccagggagggtggtcgatacctatgcggcacaatgcgatacttgtcacaagtggagagtgattgatagccaggaggagtacgaggacatcaggagtagagtgctggaggacccttttacctgcgataagaagaaacaagtctcttgcgaagaccctgctgatcttgactatgattcctctcgaacctgggtcatcgacaagcctggtatccccaaaactcccaaaggtttcaagaggagccttgtcctcagaaaagactactccaagatggatacttactacattactccagctggtaagaagctgaggagtcgcaatgaagtcgcatccttcatcgaaaccaatccagagttcaaggatgcaccgcttcgagacttcactttcactgtcccaaaggtcatggaagacacttgtcctcctgatgctaagcttgcctctcctgctgttactactactgatgatgtttcagagaagagcttcaaacccaagccattcaaaggatagttttttttgtagatttgcttttctttcttgtgaacaagctctctgctctctctctctctctctctctaataacgctagtagtttttagaggcaaaacaaaatgttaatactttttagttttatttggatcgttgttacac

SEQ ID NO: 147 - DNA, 687 bp, Zea mays
  misc_feature (687)..(687): n is a, c, g, or t
  Peptide Sequence Number=SeqID_14256
  Probeset Number=SeqID_14550
aattgagtttcccagataagagaatcaatttctaattagtttctccaaagaagaataagatgaagcaacctacgtttcccagcgcggcggcggaggaaaccaaatcagagcaaaaccagaccggagcaaagcagaaatcgaagaaattcccaactgcaaccgagctaatctcacactaccagaagcaagggggactcgaagcagctgaagcctcggttaaggtaatcgaagacctgcaaaacgcgctcgtgcgagtcgcttcgtcatcgaagaacgcctccagcaagagcaagcttctagctgacgcgaggaaaatcgacgccattagtggaaggcttgccgtcgtggacgccaagttggagacgaagcctggatacgtcgagactttcgcgttagggttagcttccggtgcagcacttaacggaattagcgccgtttggcctcacgttaccagagggatcagtcaggtttggtccgccgttaagagtgggacagatccgtcagctgcctcttaaactgaatattctctccagtggttcggttacttggtgttgtattagctaacttcagttttttcactgttggaacaaaaaaaattagttttttttttttgttatcgtctatgtttactgttgttccttttggaaaatgcaaataagaagagtgaattgaaaagtttcagcaatn

SEQ ID NO: 148 - DNA, 972 bp, Zea mays
  Peptide Sequence Number=SeqID_14257
  Probeset Number=SeqID_14551
atcataaacccttctttacctttgtgctcatcttccttcctcgttatcaacagtctcaatcgaaaccgattcattgagaatgacggagatggtaacgcctggagacgtgctcggtaatgcggctgagttaaaacccgggaaaggagcttacgtcaacgacaacaccatctacgcttccctcacaggatctcgccggattgtttctcctcttcccgaatctcttgaccagagagctactgtggaagttactggtcacaaggcgcatggacttatccccgagcctggctctcttgtcttagctagggttactaaagttatggctcgtatggcttctgttgatatcttgtgtgttggttcaaaggccgttcgtgaaaaatttgctggcgtaatcaggcaacaagatgttagagaaacagagattgacaaagttgagattcatcagtctttccgtcctggtgacattgttagagctgtggttctgtctcttggtgactcacgggcttactatctgtcaactgctaagaatgagcttggtgtggtctctgctgagagcgctgcaggtgaaacaatggttccgattagttggacagagatgcaatgtcctttgtctggccaaaccgagcagaggaaagttgccaaggtggcctaatttgaatgacactacagataatctggcttctatcatagatgtgtgtctctacaacaagaaaagacatgtttgattattacagttttgagctcttttgacatgctttaacttaaaagaccatgttttgtcaagtgcaaaagcaacttgcctttgttcctaaactcagaagacatttcaatgaaagggttaagagagaatgaatttgaatgtgagcccttttaattcttttacactgcattgataatggcgacgaagattgccttggttagcaccattttattttggatgctaagcttgaaatttctatgtactatcgtttctgc

SEQ ID NO: 149 - DNA, 899 bp, Zea mays
  misc_feature (1)..(1): n is a, c, g, or t
  Peptide Sequence Number=SeqID_14258
  Probeset Number=SeqID_14552
nttccattgttccttaaatgtctgaacgccaaactgatttattccattgttccttacacggagaattcttcagcaacacgtttcattactcgcaacttccttcatcagtaaatgatttattctagaggttctgaacaaactgttgcacagaaaatttaagaaaagaaaaagcatttcagcacctcagaattaacaaaaggctcgacagaactcccatatctctctgtgaataaatgtctgaggtcacacagttcaggcaaatcaggaaatctagctgcagcaaatattcgagtagacacagcttccaaggcttcttgcgggcattcactgttaaggaacatcacagattcagtgaccaattgcataagaaagtcttactgtaatattaattgaccgttgttgataggttcagcgtgacactttttctgaaaggtagcatgactgtgcttctccctattgtctttgcatagagaattgttgtggccagtacaaatgctcttatcttgccacagacgatttttttgccatcctaccaccagtatcctttttcctagaaggaacttgggacccttctttcttagatcttttaatattaggcagattggacttggaggattgcgcatgtcatttttttcctttatccagttcggtgactttagctgcataagaattagattggctgtgaggcctttcagatcgcgacttgtgcttttccttgtgcaattttttcttgcctttaagagcagtggtcagcaactccagggaaaaccgatgcaagatacctcaaaatcgcatgaccggatctggtccgcccacaaagcagtgcggcatggcggtggagagattactccgacgagcaattcacgtccatgttgtggcttcccatactcgaaacagca

SEQ ID NO: 150 - DNA, 570 bp, Zea mays
  Peptide Sequence Number=SeqID_14259
  Probeset Number=SeqID_14553
ccgcagccagctcacgtctccctcttcatccaccatgctgagggtcgcgggcaggcgcctctcgtccgctctcgcctggcgccccgccgccgccgcctcaggctcccggggccctctcgccggtacactacccggccgcgacgacgacgacacacgcgactgcagggcgcgtttcgccatcgaatctcccttcttcgccgctgccaggtagtgtaccggcgagagggcgccgggagcaccttggatggcagcgtacgtggccatcagcagcatgcagtcgtcgtcgtagcagagatgtcctagctacgtgtgtgtcatgcatcagactggcacataataaagaagtagatcatgcacccactagtgatcacttcgtctagtgtccctccgttcgctgttgtcgtcgtcgtcgtcgtggtgtacctcgtacgtgacatgccgtagcacgtacgctagcagagcagcacctcaatgtccttgggtttgctttgctggctctctgttttcgtctcgtgttgcttttaatctggcacaggtttctaaattataataatgaatacttttttgtcc

SEQ ID NO: 151 - DNA, 907 bp, Zea mays
  Probeset Number=SeqID_14554
agagaaaaatctggagacgaaaccctagctagctagcccgcttccccggcgccggagccggagccggagccaggccgggatgggcgccgaggaggacgctgccgcccgccgcgagcgcctcaaggcccttcgcgccgccaaggagctcctctccacccccgacgcccccgcccccgcgcccgacgcggaccagcagaatggtgaacatgggatgacagaagaacaggtggtccaaccagaattgccaggtcctgtggatgcacccgaggatgcttccagggagaacgttagccccactaaggaatctgatgaggttgaagacaatggggaggtaccactgaagttcaggaactaccttcctcatgatgagcggctccgaggtggcaaggtggctccgctgtctcttcccaagtttgaagatccgatagctgctgatgctgctgaaccaaagcagctggagaacccctttgggaacatcgccccaaagaacccgaactgggacctgaaacgagatgtgcagaagaggattgacaagctggagaagcgcactcagaaagctctggcggagattgcattggagcagcaaaaggagaaagaggcgctggaggagggaggcgatgcagctcaagagtgacgtggtactggtgctggtccaaatgtttgtgtagaactgaggaagcagctatacgaggtcaaacagtgatgtgtttgtaatgcacggtgtggactgaagactaatgtaaggaaattgtagtcgtgtgtttgtaatgcacggtgtggatgatgctttcagttcagtatccagaattttttagttctactgatggttagtgtcttggtgattactgaattaactatgattcatctcgcgaatctgaagggtatatatagccatggagttgtcatg

SEQ ID NO: 152 - DNA, 721 bp, Zea mays
  Peptide Sequence Number=SeqID_14260
  Probeset Number=SeqID_14555
aaacatcaccaccacttctaacacagcctcctcctcctcttcgatctctctctctctcgatcaaaatggctaacccaagagtcttcttcgacatgaccctcgacggcgcccccgccggccgcatcgtgatggagctttacaaagacacgaccccgaacaccgccgagaacttccgagccctctgcaccggcgagaaaggtgtcggaaagaaggggaagcctctccacttcaagggatcggccttccaccgcgtgatccccgggttcatgtgccagggaggcgatttcaccgccgggaacgggaccggcggggagtcgatctacggcgataagttcaaggacgagaacttcgcgaagaagcacaccggggcggggatcctctccatggcgaactctggtcccaacactaacggatctcagttttttatctgcaccgcggagacgtcgtggctcgatgggaagcacgtggtgtttgggaaggttgttgaaggtatggaggttgtgaaggcgatcgagaaggttggatcgtcttctgggacgacgaagaagaaggttgttgttgctgattgtggtcaggttgcttagatctgagtgatctgatgatgatgaatgttatcttttgcttttttaatgtttttttttctgatcgttcgagtttgtaaaaccctgagggttttttggatttgactgcctttgaataattatgaataactatgagcttg

SEQ ID NO: 153 - DNA, 744 bp, Zea mays
  misc_feature (744)..(744): n is a, c, g, or t
  Peptide Sequence Number=SeqID_14261
  Probeset Number=SeqID_14556
tcgctctcgctctcgctctcgtcaggcacaggcacgcacgcacgagtgaacacaggcgcgatctcctgctccctgcctccctcgttctcctctgcccgtgcgcgctccagggcacacacgtacggagcgtgcgagcaccgtcatggaggagggcggcggcggcggcgccggcgcgcggcgcgtggagcggtgggagggctacgtggactggaggaaccggccggcgaccaggggccggcacggcggcatggccgccgcctccttcgtgctcgtggtggaggtgctggagaacctggcgttcctggcgaccgcgagcaacctggtgacgtacctgatggggtccatgggctactcgccgtcgcattcggccacggcggtgaccagcttcatgggcacggcgttcctgctggcgctgctcggcggattcctctccgacgccttcctcaccacctacaccgtctacatcgccagcgccttggtcgagctcacggtacgcgacgcgcgtcgtcatataacataacgtccgtccgtgcatgctatgcgataccgtaccacgcacgcacgcacgctgctgctactactactaccgtacagaacagtagtgtacatacatactccttactctacatcaccactctcgatcgtacgtgcgtgcgtgctgtcatgcaaatgcatggccccctcctttctatatacgtcacgttacgtgccctgctatatattatatgctgtccatcgtctgtn

SEQ ID NO: 154 - DNA, 805 bp, Zea mays
  misc_feature (1)..(1): n is a, c, g, or t
  Peptide Sequence Number=SeqID_8116
  Probeset Number=SeqID_14557
naatgtaaagattcttgtgtcacatacagatgatgtagctagtaatctcagcatttattgattttttatccatctgtcgccaaaagtagaaatgtgtacacaggcacacgcgccaaacacattaacaaaaacgaaaaacattcaatatttgaaactgtcgctggtctgccgctgttctaccactccgccactgctcctttctcacggctataaaacacactctacctccagcctttaaagcactcaccagcctgaggttggtggagtctttccttttgttcctccacatcaaatactccattcttttgatctaaatatcccaatggatgaacaacaagagaaccttaatgattatggggtttatgccgatgttgacattgtgttcgatcaagatgagttgtcggattcagaagacaatgaagaagagcatgaaattcagcctggtagactagatcactactcctcctccttgcagtttaccggtgcgctgctggtgggctgctgctccctccttgttgccgctgccgccgccgtgttgggtcttgctgctggccgtcttcatgaagcagaagcaggagcagcagggacactggaacaagagcttcatcatgcccagagctctggatcgagatcgatcgtctttgttcctctcggccgtctcagctagctagcgctatggtctggactagcctctgtatgtatctctgtaccctctcaactctaatcaaatctcaacctggctggctagctacgttttccttcctaatcaacgcaagatcgagctagctagcctcggcaacctatc

SEQ ID NO: 155 - DNA, 667 bp, Zea mays
  misc_feature (1)..(66): n is a, c, g, or t
  misc_feature (667)..(667): n is a, c, g, or t
  Probeset Number=SeqID_14558
nnnnnnnnnnnnnnnnnnnnnnnnnnnnnnnnnnnnnnnnnnnnnnnnnnnnnnnnnnnnnnnnnntgtctcctgctcccgctcgctgctggggggcgcaggctaaatccgtgcatttcgtagtgtaatgatcgaagtcctttggtgcctggctctggctggctgcatctgcatgcaggtggtccccaagtcgctggcgccgttcctcccggggacgacggtgccggcgacggtgacgtggcacgggtggtccctgggagatgcggttcacgggggggcggcagatcccagcgcctggagggccgggtggcggggcttcgcgctggacaacggactgaagctcggcgacgggtgcgtcttcgaggtggtggacggcagggcggagcgcgtggtgttcagggtgcaggtgctccgcgccgacatccccgcggagatccgggagcgggccggcgggtacactccgtccagccccatcctcatcgactagctagctcattgctcacctcatctcatcagctgctggtctgtatccccccgtgcggccgtctgccactgttactgcagagggtgagagtgcaatccgatttttttgcattttagtccttcctcggaaaaaattcacgtttgaaccctaaaaaaaaaaaaaaaaaaaaaaaaaaaaaaaatn

SEQ ID NO: 156 - DNA, 626 bp, Zea mays
  Peptide Sequence Number=SeqID_8117
  Probeset Number=SeqID_14559
attttttcccactttcctttgagaaaacagagcaaaatggcactgagaatgtgggcttcctctacagcaaacgctcttaagctctcttcttctacctccaaatctcatctccttcctgcgttctccatctccagatgcttctcctcagtgttggaaggactcaagtatgcaacttcacacgagtgggtgaaacatgatggctcggtggctaccattggcatcactgaccatgcccaggaccatctaggagaagttgtgtttgtggagctgccagaagagaaaagctcagtgagcaaagaaaagaactttggagctgtggagagtgtgaaggcaacaagtgagattctatctccaatctctggtgaagtcattgaggttaacacaaagctaaccgattcacctggtttgatcaactcaagcccctatgaagatggttggatgataaaggtgaaaccaagcaaccctgcagagttggaaaccttgatgggttcaaaggaatacaccaagttctgcgaagaggaagatgctgctcactagagggtttcatctgtctatgtttcgtaccctatctctctcagctttgtatctctgtaatactaatttggttgaaagatgatcattcaaat

SEQ ID NO: 157 - DNA, 628 bp, Zea mays
  Peptide Sequence Number=SeqID_8118
  Probeset Number=SeqID_14560
aagacattccatttcattctcctcctcaataaaaagcgaatctagggttttcataatttcgaaggaagatggcgatgcagaaggctaaagagatcgtttccggcaacgccgtcgttgttttcagcaagtcgttttgcccatactgtgtgagagtgaaggagcttttgcaacaattgggagctaaattcatcgccgttgagctcgacaaagagagtgatggtagccaagttcaatcagctctggcagaatggacaggacaacgcaccgttcccaatgtgttcataggtgaaaaacacatcggtggctgcgattctgtaacaaacctgcacagagacggcaagttggttcctatgttaactgaagctggagctattgctgcaacagctggaactacttctgcttaaagcgcacaatcaatttgtgatttgcttctttcaggaataaaatatgtttgagcaataaatctgaactttatctgaaatgttttaaagttaattgttgttatgtcgaagtcggtattgaacttctgatacatttatgttataattatcagcatttgctagtattgtatgggtatgaatggtgaaagaataatgctattagatcatctatatatatttggttatgt

SEQ ID NO: 158 - DNA, 651 bp, Zea mays
  Peptide Sequence Number=SeqID_8119
  Probeset Number=SeqID_14561
attcggtttgttaattgtgtcgctgtttgttatcttcaaacgatagcgttgagctctaggaaaagtgtgtttgatcgcagaaaaggcttcgtcttttgtcttgcaacaggcttataaggaatggcaaagagcacattcaaggaagagcatgacctagagaaaagaagtgcagaggctgctcggattagagagaaatatccagataggattccggtgattgttgagaagggggagaagagtgatataccaaccatcgacaagaaaaaatacctagtcccagctgatctgacagtggggcaattcgtgtatgtcattcgcaaaagaatcaaactgagtgctgaaaaggctatctttatctttgtggacaatgttcttcctccaactggtgcactaatgtctgctgtgtacgaagagaaaaaggatgacgatggctttctctatgtcacttacagcggagagaacacatttggatctccatagagatctcttgctggatatttcgtttctattttacctatttcgcctgagtatttcatatcttattattagttatctatgtactactttctctaagaactttaagatggccgttaatgtgtacagagaacataaaaataatgtagtatatataatctcaaaacctactttgtc

SEQ ID NO: 159 - DNA, 943 bp, Zea mays
  Peptide Sequence Number=SeqID_8120
  Probeset Number=SeqID_14562
cctttctttcttgaggccgccgctccgcatctcgctcgccgcggaagccgctgtcgccgatgtccgccgcctccccgctcatgggcggcccctcctccgccgacgcgcccaccgacggcgagcaccggatgggcaccaccatcgtcggggtctgctacgccggcggcgtcgtcctcgccgccgactccaggaccagcaccggaatgtatgtggcaaaccgtgcttcggacaagattagtcagctcactgataatgtttatgtctgccgctctggatctgctgcggatacacaaattatctcagattatgtacgctattttctccaccaacacacaattcagcttgggcaaccagctaccgtgaaagttgcatctaacttggttaggttgctggcctatcagaacaagagcatgttacaagctgggatgatagttggtggatgggataagtatgagggaggccaaatttactcagtccctcttggtggaacgattctgaggcaaccattcgcaattggaggatctggttccagctatctgtatggattgatggaccatgaatggaaagaggggatgacccaggaagaagctgagaagtttgtggtgaaggtggtttcccttgctattgcacgtgatggtgctagtggaggggttgttcgcaccgttactataaatgaggagggcgttaagaggagcttccatcctggtgacaagctgccactgtggcatgaggagatggagccccagaactcgctcctcgacattctcgcggccgggagctctgatgccatggcccagtgagtttgctgaatgttgacttgtacctgatgatgacttgttctagatttgagccggatgttgttaagaaattgtgccgaattgttccacaccagcttattttcctccttgttattacgaattaatactagtacattccttgttcg

SEQ ID NO: 160 - DNA, 853 bp, Zea mays
  Peptide Sequence Number=SeqID_8121
  Probeset Number=SeqID_14563
agctgattcaatttctcttggactaagagatttaggaaaatcctgcatatggatgcactgtacagttgcgcatgtctcaaagaaaacccgaaaaggacatgcttctcttcagcctgcacatgttcttcagtttttcaagaacacaaaccgggtgtcgcgcccaaacgaatcagtttgctgctagccagagtatcattgtacatgttactgaagcttagctggaatggaagtgttctgcctcaaagcctggtcggtcagaagaaagggccaagttggctcttcggcaacattgaccggccgtcaggcactagtacgctgttgttggtggcacgcgcacggatgagttagctcactgaccagaccagttcttgttgttttctatactagagacgaagctgggttggtaggtaggctccgtggcctgcggtcgtgttgctttctgagagtgttaatttccgtgcagagtagaatggaatttatatttagttcgtggacaacaatcagagcagaacggcaccgcacaggcgctgaaatacagtaacagggcgcaagaaatccacgagcgcagctccactttctcccacttccaatcaccagtggcttgctcaacacaacaccaggaacgatcgaatcgatccaaaatcgcgactgaaatggtggaagaaagagagaacaaagaaactcacgtttccagggtaaagctccagaggatttaccgcccatgccttttatggagccgataaggggaggagacaaacggatgagcatcagcgctggaagctttcgccaaaggattcggagccgttcggccagccgccgtcgcgcagcttccaactccctctccccatggctg

SEQ ID NO: 161 - DNA, 607 bp, Zea mays
  misc_feature (607)..(607): n is a, c, g, or t
  Probeset Number=SeqID_14564
aaagtcgaaggctcgacaatctgcttggccaacaaggcctgcggggtctggttttctccagattccggaagtggtgggtgacttgcagatagacataggcagtggacagtcctgtagaagtcagattctgtttaagcctcaggggggtgatatgatcaccagcccaagcgattacaaaccgatggttatggaaaccagggttggcggtaccatcgatctgcaaagttggaccactgagccagacgaaagacttggtggagggtacaggtcatacaacattagattttggctacatggcactcattatatacgctactctttccggtctctccggtcgctcaatggcgatactgtgaatgttcccttgtcaaatgaaagtgatgatctcctcgatgctcccgtcgtaggagacacctcatcttcccaatgtcccggatagctgggcggcgggatctcatcagcaggaagttccaccggatccatgttctgtgagggaagttcttgtggtgcactgctgtcgcccatcatctcatgacgcgccgattcccctagtacctctgccgcgggaacctgcctagtatctacctcactcgtctgcgactcgggn

SEQ ID NO: 162 - DNA, 500 bp, Zea mays
  Peptide Sequence Number=SeqID_8122
  Probeset Number=SeqID_14565
aaaacggccgtccctatctatcggattgcttccagttccagctcgagcactggggcttcgcaggcgagatgaagaggctgcttgctcgtggcaagtccggttgcccctcccggagtttggttggcagaatccctgccctgcctgtactttgcaacaacgttcttcccggccatagggtgagttcaccaatctgtcagtcactgctgctacttccccatgcatgttctttgaattttaagcaagcacaaggagagagtcgtgttgtacaaacgttttagataacagccccattccaatcgaagtggttggtcgtcgaatggtttttgccactcctaatctgtgcgtgtttgcaatcttctgttttttttttcctgtgaaactgacagtactatttcagccgagaaacacgatgacgacaccacgctaggtgagatcggggacaaggcaaggtcgacagccgaggagttcctgagggtggccaaggagaaaaccgacgacgt

SEQ ID NO: 163 - DNA, 776 bp, Zea mays
  misc_feature (1)..(1): n is a, c, g, or t
  misc_feature (776)..(776): n is a, c, g, or t
  Probeset Number=SeqID_14566
naaaacccttgttccccttccttctccagcggcggcggcaaaggcggaggcggaggatcgaagatgatcatcccggttcgctgcttcacctgcggcaaggtgatcgggaacaagtgggaccactacctcgatcttctccaggccgactacactgagggggatgctctggatgccttgggcttggttcgctactgctgccgccgtatgcctcatgacccatgttgacctcattgagaagttgctcaactacaacaccctggagaagacggagacaagttgaagttaattgaacccattctgcctcgaagcctttgttcctttgtacttttcaagatgcagtttcttatgtcagtgcttaggaggtgcaaaatgcgaggtcctgaaatgaagttggtttgttcatgaatctccaaggactgttagtgtgaccatgcgtttctactagtaatagagtattaaccaacaagtctatgcattctccagtttcaaacttattaagctccaagcgttgaacatgttattcctgtgctttctgttggatcttgttggttgtgggcacccatgggtatcttaacattgaatcgtcactagtgatatgcattgaacttccagcatgtaccttcatgcttgatatttgtttgttttctattcctctgatgatatcgatgtatctaaaatcaagatagataactattgcggttttgagcgcatgcaaacaatgctcatcgatgatttgtttgtgactgctgttaaattgaattatcatccattcatcn

SEQ ID NO: 164 - DNA, 806 bp, Zea mays
  misc_feature (806)..(806): n is a, c, g, or t
  Peptide Sequence Number=SeqID_8123
  Probeset Number=SeqID_14567
ctgtgacacgcaagaaggcaagtgccacgaccgctcgtccgcagtaatgccttgctccgccgatagtaccgcgcggaggtaggcaccgctacttcttgccgcatgaactgatggatcatgccacctccactggtcggatgttaccggggtcatgcactgcacaagacaacgatgcaacaaatcctatgtcgcttgtcatcatggttgcacttccctaatccggtttgatcccgacggaggtttgcacactagaagcgtcctttttctcgattttgatgagaatcatgttggcaggaaaaagcattagcccttgccttgtttgtgcatgccatcgacatccatgcatgcatatgagagagacttgcaatggacgatcttacaggagactgaagatggggccctcgatgatgccgttgacgcctgagatggcggcgactcgactttgcagatgtggctgttgaaggtcacagcgatgaaggcgatcaggattggtgacgggccctgcgattcgccgccacacacattcttgcactcgccagttcttgcgtccggacggcagaaccggtgatacactccaattctttctcacgatggagcgtctagttgtctctgtttttgcgagcaaacgtgctgataacgtgttgaagtatactcagtggcaaaccagtagagagacagaaagaatgacagttgtttcttttttgcagcaggagttatgtttatatgaaagggtgagttctcaaggggtgtgtcccttgggaattatctgtctcacaccttagattgatcacaaatacaataattgn

SEQ ID NO: 165 - DNA, 519 bp, Zea mays
  Probeset Number=SeqID_14568
gatcaaccattccccaaaacccccagccttcctagggttttgctcagcgagtcggagtcggatccagttctgcgggatcgccatgtcatcgcgtccgtcgttcaagttgaagcccagggtcaagggcgggaagaagggcgccgccgccgacgaggacgccaccgcggcatcgaaggcgatgcggatcgtgaaggagtggacctcatggacgatgacgaaggcaaaggtggtggtgcactatggcttcatcccgctcgtcatcatcaccggcatgaactccaatcccaagccctccgccttccaggtcatctcccccgtctgatcgtttctccccgacgaggcccggatgcggtcggttcgtctgcttttatagtagtttgtagctagtatttttagttgatttgctattgtccgagatcgagttgaaggtgtctgatgctttctggcccaaatttgaaggtgttttctgactatgtctactatagttcggatcaaaatctcttggctctgtgatttgct

SEQ ID NO: 166 - DNA, 589 bp, Zea mays
  Peptide Sequence Number=SeqID_8124
  Probeset Number=SeqID_14569
ctctctctcccaaatcctctcactgcgaatctgcgatggccgttgcgcagcgtctcaccgcgctggagctccaccattgctgctgcccaacacctcgtcatacgtcgcgcctagacttgagctcgctgcgcgctgggagccccgccgagttcgctgttgagcaccgccgcggaagactcttcctgccgtgcgtcgtcgcaagactgcgatccatttccgagcttcgaggaatcaacagtcaagcttcggcgaccaagagatcgaactcttcgagttctacgaggctgaagatcctgagcatctgtttggtgaaggttacctttggtgcaatctatgcttaggtaaagaagaaggcgtcgaggcggatctccaggagttccggggcttcgatgagttcgaggattaggctagcgactacccccagtcagctgcctgtggtgggtttatttacgttggctacgtttctattctgggtactttgattatattatgtaaatgactctagtcttttatattattacttactcttttattgtattcgaagcatttgtggctatgatgagtcatttatgtaatcgctgtgtacgcg

SEQ ID NO: 167 - DNA, 602 bp, Zea mays
  Probeset Number=SeqID_14570
gtgttctgtggcgcagtctcgtcctttgcactcacaaaaatatctatacatttcttctgtatccctatttgattgaaagggaaaaatgtccagttctcctgtgtttgtagaagacgatttaggccgaaaatgggataaatgtatcacagatgctctgctaaaatttggtggaggagttgtgcttggatcagtattttcgttattgttttttaagaggcgacgatggcccataattatgggcggcggttttggaataggtatggcgtattctaattgcgaacaggacctcaacaacagcctcaagggcccatgctcgccgaattgtgaaatagaaactaatactaagaaataggataatttttgttttcttaatcatctttctttcccaacaagtacattatatagaagtaatactgcctacaaaaatttaaatatattatattaaacaaaaaatttgtaattcttattttctgcctggttttatttaattgaaataaatgaaaaaagatccatcgatttccaattacttttattattacttggtttataattccaaaaataaaaggcaaaatacatgttatttagtaataaaaaattgttat

SEQ ID NO: 168 - DNA, 738 bp, Zea mays
  misc_feature (1)..(1): n is a, c, g, or t
  Peptide Sequence Number=SeqID_8125
  Probeset Number=SeqID_14571
ngcataaagcatgaaatatgatataagcatcaccaaagaatcatttctattttattaacatggaaaaacagaaatgatcccaaattacaaatgtaccttcggtcctgagagaaggtggagagtacaagcgtgacgccaaaagcaaaatgacaagtccgcgtgaacagtacgggagtactgttcatctatttatagacgcgggacgcagcccacgtaaaattacatccatgtccattacatttgttaacggtttatggaaatctattgaggaccccgaagtctttttatctttaagtcggttcccccttgtgctatcgcgccgaagcttccctgcgtacagcttcggctgccttcgaccttcgcctggctcagccttcgtcctggtcgtgctccatatccataattctgaatccgaaaatacctgttcatataattcacttggaaagcattgtcaaatcatgtttttgaggaccttcggaggacgaaggcccccaacagaagcaaaccctattgggtcaccttctgaaagacctttaggaacaccttcagttggaggaaccttagattgaggagttgactcctcttccacttccacttcaattccttcttctaggtgctcactgaatgggttgaccacggtgaggtgagcagtcgacctaagtggtcaccatgatcttgattcagggagtgaaagggtgtgtttagggcagtgacaagtaatgaaacatgggttctggg

SEQ ID NO: 169 - DNA, 601 bp, Zea mays
  misc_feature (601)..(601): n is a, c, g, or t
  Probeset Number=SeqID_14572
acataccctaatatttatttgtaatagtttatattcatataagtattctatctagtttcattcgaggagctgatcgacgttgactcgcggagtcgcggtcctggcaccgcttcgcgaactggaggagacgagagattggtaggcagctcgtccacgcggccggcgcgcgctcgccgcctgatggtcacgccgctacgagtctgcaacgaccccgagcccgagaacgcggcgggaagagcttgcaaaggtggccacgtcgttcgcaatgcgtgcgtgcatgggcgccggatcggcagctggccgagttaagttgagcggccctcttcgtccggcactgaaccaatcaaatgccactacaccccgacggcattcatcaatctcacaagaacgcgtgatccgcaacgcgccactaggacatgtacccagaaaggaaacgggtcaatcaagtcacttattttctctagataaggatggtgctttcaccagtttatttggataaggccatggtttttagaagttcaacacttaagccaagagacggacacagtcacgtctacgaggtcgtctctaagctatttaacagaatagatcgatttcactn

SEQ ID NO: 170 - DNA, 601 bp, Zea mays
  misc_feature (1)..(1): n is a, c, g, or t
  Peptide Sequence Number=SeqID_8126
  Probeset Number=SeqID_14573
nagtgaaatcgatctattctgttaaatagcttagagacgacctcgtagacgtgactgtgtccgtctcttggcttaagtgttgaacttctaaaaaccatggccttatccaaataaactggtgaaagcaccatccttatctagagaaaataagtgacttgattgacccgtttcctttctgggtacatgtcctagtggcgcgttgcggatcacgcgttcttgtgagattgatgaatgccgtcggggtgtagtggcatttgattggttcagtgccggacgaagagggccgctcaacttaactcggccagctgccgatccggcgcccatgcacgcacgcattgcgaacgacgtggccacctttgcaagctcttcccgccgcgttctcgggctcggggtcgttgcagactcgtagcggcgtgaccatcaggcggcgagcgcgcgccggccgcgtggacgagctgcctaccaatctctcgtctcctccagttcgcgaagcggtgccaggaccgcgactccgcgagtcaacgtcgatcagctcctcgaatgaaactagatagaatacttatatgaatataaactattacaaataaatattagggtatgt

SEQ ID NO: 171 - DNA, 1275 bp, Zea mays
  misc_feature (1)..(6): n is a, c, g, or t
  misc_feature (1275)..(1275): n is a, c, g, or t
  Peptide Sequence Number=SeqID_8255
  Probeset Number=SeqID_14574
nnnnnntcccttccttggctgcaggatccaagcaacacggaaggagggaggtgagcaccatgtcggcgctgttcaacttcaactccttcctgaccgtggtgttgctggtgatctgcacctgctcctacatcaagatgcagttcccggcaatcctcaacgaccgcaccgggtaattttctttcttccgccgctaccctaccaaatcacaaagaatctgggaatttccatcttgtgcgctctgttacgcccagttgtagtaattgttttcgttatcgtggcaaaatattgaagtgtcaacatcagcgtgaaggatataaccgtctggttgtagtgagttgtgtttaacgccgtcaggcgcccatccatgagctgattcagagatattttctgtctgaacttatgattcagagatagttaaaacctgtaataaggatgaaacttactgtgagagaaagtaaagctaatttattttgactttgattgataccagcaaggtattgtttattttgacctagattgataccagcaaggtgttgatgttcatagtacacctaaggtatttggttagcacaggacctaaagttgttctattttgcactgcctttggtgtgccaaaatgaattgggtgtattagatctgcgcaagtgttttatttttgtctactttctttcttttttttgggggcaacaccagttgatttgcacttgtgaataagggaaacctcagttttgacaaagttgatagcttgagcttcatattttttatccatacatatgactttataaggaacaagatattgcatattgtttcctgttctttgcaaccattaacttccgctgtacttttaaacaattagatttatttttaatttttttaatggccggaatcccaccaaattaagaggcaacatagggctgtgaaggtaccaacatctgtacatggttagttgtagttatcatttgtttttcttatatcctcacttacccccgaaatctctaatgacagattccgtggtttcttttggaaagctgccaggataggtgagcgattgagcccttgggtatcagtcgggtgcttggctatgggaatatccactattttcttctaaggccgaattgttaatctccacaaatttagtctaggacgcagcaccttgtttcacttgtagagaaaaaaaaaactattgtaatcattttgcttcagtttttaatggaatgggcattgtaagatctgtatatgcactgagatttctgagactaacaaaaatgttttctn

SEQ ID NO: 172 - DNA, 550 bp, Zea mays
  Peptide Sequence Number=SeqID_8256
  Probeset Number=SeqID_14575
ggcggtcataaattacaactaaactaccagcattcgaaattgccaaaatacaaggataaaattacacatgtgttcgttactgtctactgctgaagcagcgacagcgaaatgctccctaatagagcattgatcgctagcatattttaacaacatgtgaaacaacgccaaggaagtacatgtcggttgtttgtgacaatgataaaaaaggaaggaacacatgaactcccggtgccttccgtgcctagctactcctcagtttccaaccagcagacgaccaactcatgttcaccatcagcctgtttggttgcccgtacaaccgtatccagactcccgacgtgctttgaccgcacgcaagtgcgtgtttggttggctgtgcctccatccgcgagcctgcacgcacgcattcaacttaagctgattttcaccgttcagcctgcacgcgtggggatgtggaaaacgagcttcgctcgcgggccaggccagcgcgaggctggagcgctggagatcagcaaccaaacatacggcatgtgtttccttgcacccacaactt

SEQ ID NO: 173 - DNA, 584 bp, Zea mays
  Probeset Number=SeqID_14576
cgatggttaaatcgaattgttgaactggtccagacaaatggcaagcaatggtacaggtgtcgatccctttctcgagggaaagaacaaataacagggcaccaaattaaacaggtgcattagcgataccaattcgttaaatgaaaatcaagtagtagaaagaggaaagggaaaaaacaaacaaaaggaagacgaaggtgtgccaccgccgtggccaatcagagcacgcccacgcatggggaatgcgcgggagcagcagcgcaggcaagtctctccccccttggtctcttccctccggctcctcgtccgtcggctcagtgaaggtagtacgcgaagaaggaggccacggcggccccgacgacggtgggtgcgaccgcggaggagccgctggtgggggacggagccggcgcctccgcggccagcgccacggtggccgaggcggcgacgaggacggcgcagacgatcttcttcatctccatccctggatgcggcggcttattagcgaccgtagagacggcggcggcgggatgggatggaggcgaggaagtctctctctgctccgacgatcgcttgcctgggtacggact

SEQ ID NO: 174 - DNA, 698 bp, Zea mays
  Peptide Sequence Number=SeqID_8257
  Probeset Number=SeqID_14577
cggaaacaagcacattctttcttcatacttgctgtactatacatctggacgttgggtgtgggcagggcctgcccggcgccggcgcggtcgtggccagcctagcggcggcgaccggttcttcaatcacaggttcggtcctctcgtccttggcggcgcgagcaaacaagatctcaacgaacaccgagaatcatgcacatgggtaaatgtgtctcctcaggtgctaatgcgaaacactgtgtttggagtcccaaatatgcaattgtctcattcaataatttccaaggccaaatcctgcaatccaaaagcatgcggtgaatttggcaacaaaagcagcaggattttacaaatccaaattaattaaaagatcatcatcaagtcaagtcagcagagctgtgcccgcggccaggggaggcgagcccccagccaagccagcagcggccgcagccaggggtccacgcgcccccgcaacatccgcgactggatgcaagaagtcgaccaggtggccacgggagcagccacggtgccagtccgcgactccggccgccaggggaggaagaggtggagaatcgggtagaagaaggggatggagcgccgagggaggagcgtctgtgactccggtcaccaggaagaaccaggaggcggaggcggaagccgcgcaaagttttttttcattctttccgcggggcgcgggcgtggag

SEQ ID NO: 175 - DNA, 752 bp, Zea mays
  misc_feature (752)..(752): n is a, c, g, or t
  Probeset Number=SeqID_14578
atagaagagctggtgttcaggcaccaggcgttcgtgcgccattgccttgtctttgagttgctgttctttcgtcttcctcctcccaacgtccattgttcttgagcgctagtgagttccaacaaacctctctctctctctgttccggtccgtggtggaggggcatccgacccagagctccatggttgatggcaagtgtgacggaacctcccaagtaattagacccacctacagttggccttgtctaacagacatcagacaccctgtagatgttcctaagtcacttgacaagttcggtatctttccttaccttaccaggaacgtttcacccgtcttgcagacattacagaacatcggagataaagacatgcggaagcgattacataaattacatttattttaaaagcaagcttaagttgttttattacagaccagaactaaaaaggcgagtgctgagtagtaatattatacaaaccaaaggaggcacaaactcctcccgataagttttaagcaaaagatcctatgtggaggaccaagtcctcccgcacttcagtcttgtttttcttcatttggtaccaccttggagcaaaagcaacaaaaatttgttgcttcctcacctaaaaacaacaaagggataaaccctgagtatggaattactcagcaagtcttacccgactaaggaaaagactctcaagggtatgctggataaataggagtcaaggagagggttaagcaaaaatcaacttatacttttn

SEQ ID NO: 176 - DNA, 752 bp, Zea mays
  misc_feature (1)..(1): n is a, c, g, or t
  Peptide Sequence Number=SeqID_8258
  Probeset Number=SeqID_14579
naaaagtataagttgatttttgcttaaccctctccttgactcctatttatccagcatacccttgagagtcttttccttagtcgggtaagacttgctgagtaattccatactcagggtttatccctttgttgtttttaggtgaggaagcaacaaatttttgttgcttttgctccaaggtggtaccaaatgaagaaaaacaagactgaagtgcgggaggacttggtcctccacataggatcttttgcttaaaacttatcgggaggagtttgtgcctcctttggtttgtataatattactactcagcactcgcctttttagttctggtctgtaataaaacaacttaagcttgcttttaaaataaatgtaatttatgtaatcgcttccgcatgtctttatctccgatgttctgtaatgtctgcaagacgggtgaaacgttcctggtaaggtaaggaaagataccgaacttgtcaagtgacttaggaacatctacagggtgtctgatgtctgttagacaaggccaactgtaggtgggtctaattacttgggaggttccgtcacacttgccatcaaccatggagctctgggtcggatgcccctccaccacggaccggaacagagagagagagaggtttgttggaactcactagcgctcaagaacaatggacgttgggaggaggaagacgaaagaacagcaactcaaagacaaggcaatggcgcacgaacgcctggtgcctgaacaccagctcttctat

SEQ ID NO: 177 - DNA, 799 bp, Zea mays
  misc_feature (799)..(799): n is a, c, g, or t
  Probeset Number=SeqID_14580
atttttcctccacccgtgcgcagagccgcagacgcacgcagtgccgctcatcttccagccaccatgcgttttcagctgcaagcaccggccagcaggactagagtagcagctcagcagcacaagttccccttccccaacccctcttctccatggcacggtgagctcggttccagcaacccctctcaagcatgccaggccaagctcatccatggcgctcggctatctctccgcgcgctcagccttcggtcgagcctctcccgtccgcagcgccgcactcggcgttgctctcctcgccgtcgacctcagcacccagctccgcagggagtcctttcttcctcgcgacccagctccatcgcagagaagccgacgttcctgcgcacactacatgctgttgttgtgtgctgtgcgtgcaaggaccgagaggtgacgatcgtgcaagcgatttggcgacaaccacaaggtgcagttggtggacaacccaaagaaggatggacttaaccagtggatgctcgccaagcgagtacccccaacaaacactacctaagtgttaaattaaaggtactccttgacttggttgatggtgtgacttggcctccatccctgccaccgggatagacggtcaggtgggttattgcttccgcaggagaggaccaggaggagtagcgtggccaggcttcgccatgttactcggttttctccgttagttatttctgctgcattaaaatttatgattattatttctgaaactccgataatgtaatcactaatgatacttattaaatttgtggtattatgtttn

SEQ ID NO: 178 - DNA, 1219 bp, Zea mays
  misc_feature (1219)..(1219): n is a, c, g, or t
  Peptide Sequence Number=SeqID_8259
  Probeset Number=SeqID_14581
agcaccacctccaaatcttctcgggcctgcctctgcctctgcctcctgaggtgctgaacgacagctctgctacttctgatctgcatgatggccgggaaagcagcatgccggagtcatggagccagctgcttcttgggggattagtcggagatcacgagagatacaacgctgccacagctttactgtcaaaaggattagaggagcgacctgcagcttacaattgctatgaccctggacatggtggtggtgaggagatccagacatcggggaccaacattaggtctcatcaggtgagccaggcgctcttagcgtcgtcctctcctaggtcctgcatcaccacaagcctcggcagcaacatgctggacttctcaaacaccaccgtgccgccggcaccggatctgaagaatcatcactccgataactcttctgagggtaacagcgctggaagtggttcggctccaaagaaggctagggttcagacctcttcttcagcacagtctaccctaaaggtaagaaaggagaggcttggggatagaatcactgcacttcaccagatagtgtccccatttggcaaggagactattggctacattagattcctcctgagtcaaatcgaggctctcagcttcccttacttgggccatgacaacggggactccatgcaacaacataatactaataacttgctgctaaaccatagcactagcgatgccatggtacaagttcaaggtcctccgatgaccaatcaggagggggaggtctatggcaatggcattgaggagggcagcaggaaggatttgaggagcagggggctgtgcctggtgccagtgtcgtgcacgtcgcacctcgccgacgacaacggcccctcagacttctgggcggtgtccgcggcgccgtccccgcctcctccgcctccgccattcgccggcatcatctggcgatagagtcgtgtccagaccggcgtcgatccacccatcagtcgcatgcattattcatgcatgcatgacgtaaatatatacatatagtatcatgcatcactataccattggtttttttttaaaaaaaaatgtttggttgcttgccagggttgctagctagctatagctttgtttgaccgatgagctgaggtatccatcgagcatggagctacctgcagcctataccaggctgctgtatactgtacgtatgtagtacaccgtagtatatgtactgtacgttn

SEQ ID NO: 179 - DNA, 1157 bp, Zea mays
  misc_feature (1)..(32): n is a, c, g, or t
  misc_feature (1156)..(1157): n is a, c, g, or t
  Peptide Sequence Number=SeqID_8260
  Probeset Number=SeqID_14582
nnnnnnnnnnnnnnnnnnnnnnnnnnnnnnnngaagcccgccgttcggagttctacaatcccaaatagcatcgtcatcgcaaaatgcaggcgctcctactccccgcgcgggccgcgccgccaccgccggcgatccttcggcagcgtgcggtttccgcgtccacgtgtgcgtcgcagggctgccgcctcctactcggtgcctctggttgtctcagctgtggggtaagatatcggctgcgcctcacagttgtggcggcggcctcgtcctcgtcggaaccgctatacccgacgcctctacccaccgaggaggaggtggagcgggtcaagctcgagcaggttatgaggagactagagaaaacagcaaggtatttcaagaatttgggtaccctggggttctggtcccagttggtgtgcacaattgtctctgctggaattttggcattctctacagttgtgacagggaaggtgacagcaccctttacattctatgcgactgctgctggtattgctgctgcttttatctcatccttctggtcatttggttacatccgtctctctgaaaggcttagaagaacatcaaaggaacctgctaaggctcctccacgcgctaatgttgttaatagcctgaaaaatggcattgtgctgaatattctcgggatgggcgccgctgttctgggcatgcaagccactgttggtgctttggtagcaaaagctctcacaacctctgcagtaccctattatcaggctgctgctccaggccaaagccctgtgttggccttagatgttttcctagttcaggcttcagcgaacaccatcctgtcgcatttcctcgggctggcgagctccctggagctgctgcgctcggtgtcgctgcctccagcagaagctgccgcccatgcccgggcctgagccattgcgtgggcggcagggtaaagctgccgcccctgcccgggcctgaccttcgttccctcggcggcggcctgtttggttcagcttttttctgaccggcttttctgaaaatctagctgttggtagaatctgagtaccattacgattacgtgtgaaggaagataaagttgttcatagggctcaggatctagaaagtgacggattcctactattacaacgactcaaccgattatgtgtttatgttgatnn

SEQ ID NO: 180 - DNA, 1731 bp, Zea mays
  misc_feature (1731)..(1731): n is a, c, g, or t
  Peptide Sequence Number=SeqID_8261
  Probeset Number=SeqID_14583
agaaacactttacattagattttttgtatgaaacgcccgcaaccgacttgctcctcaagcctccctgcctgccagctcactcgccttcttcctcccattcccctcgaatcaaccagcagcgattcggatcgaaacgaaacgaaccaaaccaaccaactcgccaccctccaaagccgcagccccaatcccaccgccggccaggcaggcagagcgcgccccgcgccatgtcagccacgtcgtcgttcacagcgggggagtcgtctcgagctggcgagcaaccggagcgcgacgaggtggtcgagttcctggactgcccttgggtagcactctcctccgccatcgtcgtcatcggcgccaacgacgagcgggcacggatgctcgcgcccggtgcctccgacatctttctcgacctccagcccccgctggtcggcgcctcctatctggtcctgcccgagcgcatcgtcgcgcactacaggtattcaggctaccaaccctgcgtcttgtccgcctgctccaactgcctcctcttcctggctatccaagccgagggcgtctcgaacccggccttcttcctcggcaacgcccgcgcccgcaccgtcgtccgcctccccgacgtccccgcccacctcggcgtcaacatcatccggcgacagagcattggtctcatcgccgatcagcgacacgatggacattacatggtggcccagctccaccccacctggacgaccctccacaagaccctgctatgctactccaccgtcaccgaccagtggactgccaggccgctggcctccgccgaggagcaccctcgctggggcgcccacggcgttctcgcccacggcggcctcctctggtggatcgacgtctcctacggcatgctcgtctgcgaccctttcgccgcagacgacaacctgcacctccgctttatcccgctcccggtcggctccatgctcatggcccagccagagctcatggcccatggcctccgctttatctcccgctcagggctcatggcccatcaacgcttcatcaggcccagccagggcaagctgcgatacgtggagatccaaggagcccccagcggtatgcttactaccaactaccagcccccgtcgaacccccaggtccgcatgttcacgctcgtcagccaagagggccagcatcactgggtacacgagtacacggcgaccttcctcgacatttggagctaccgcagctacgccgacgccggtctgccccggggcgtggtgccttcgctcgccctcatcgaccccaacaacgccaacatcatctacttcttccagggcacgacgctcttcgcagtggacagatacgccaggaaggtcttgcaccacctgcaatacttggtagacgtagtagactccacatacgcggacctcacgttgcagaactcccgctacgttagtgcctgggagctgccaccaggagttttcgtcaacggtcatgggccaaacggtgggagctgaagtcagggtactaataacgaaggaacagatggatcagactgggatcgagaggccacttcttattcgtctgaacaagtggagggttatgcaacttcagcgatggtttcagacatgcgccccctggaaaatttaaacccatgttaggaacagagcctgtggccattccgtgctccgcgactgtatgagaaaacattttgttttgtgttgcatatcgctagctgaaagaaaaatatgtcattgtgcn

SEQ ID NO: 181 - DNA, 1466 bp, Zea mays
  misc_feature (1466)..(1466): n is a, c, g, or t
  Peptide Sequence Number=SeqID_8262
  Probeset Number=SeqID_14584
gatccagcaatacccgacgcgcaagccagtgccgcgcccagatctccgcgacagatcagtcgttcgtccagctaactgcactgcacgcaatggccaccacggcgaccaagacgactgcaccggcgcaggagcagcaggccaacggcaacggcaacggcgagcagaagacgcgccactccgaggtcggccacaagagcctgctcaagagcgacgacctctaccagtacatcctggacacgagcgtgtacccgcgggagccggagagcatgaaggagctgcgcgagatcaccgccaagcacccatggaacctgatgaccacctccgccgacgagggccagttcctcaacatgctcatcaagctcatcggcgccaagaagaccatggagatcggcgtctacaccggctactcgctcctcgccaccgcgctcgcactcccggaggacggcacgatcttggccatggacatcaaccgcgagaactacgagctaggcctgccctgcatcaacaaggccggcgtgggccacaagatcgacttccgcgagggccccgcgctccccgtcctggacgacctcgtggcggacaaggagcagcacgggtcgttcgacttcgccttcgtggacgccgacaaggacaactacctcagctaccacgagcggctcctgaagctggtgaggcccggcggcctcatcggctacgacaacacgctgtggaacggctccgtcgtgctccccgacgacgcgcccatgcgcaagtacatccgcttctaccgcgacttcgtgctcgccctcaacagcgcgctcgccgccgacgaccgcgtcgagatctgccagctccccgtcggcgacggcgtcacgctctgccgccgcgtcaagtgaaaaaaaaaacacacatactccctccggtgcagtaaaagaagtcatcctgcgcgtgagcgagagtgcacaaaagaagtcgtagcgcacgtgggtctgggatttttgacgtcgctgcccctgagtaattgcatcgggaaaaaaaaaagctgcgctcaagggaaatcgagcttgagacctccaatctagaatgcctcgggaggtactgcaacaaccaatcgaacttgattgttttggtgatgttaatgcactcatatccctatttaataagggcaaacatagaaaactccatgataattaatcactccttggtatgcacaatcatgtcctaaacgactacctttactgcaccggagggagtaccctgcgttcctgccccggctgtctggcccccactgccaccgacggcgccgcaccccccgttccaatcatatcgtagacgacgcgcagcattaaattatcaatcaccggctctggctctttcttggccctgtactgtactgatgttccttcttgtttttttttcttgggaattgtcgccgtttcagtatacgtaaaatctcgaggtcgataatacagtaatactaccaattn

SEQ ID NO: 182 - DNA, 958 bp, Zea mays
  misc_feature (958)..(958): n is a, c, g, or t
  Peptide Sequence Number=SeqID_8263
  Probeset Number=SeqID_14585
atgacaaacgttgctaggtaatttggattttctacggatgacacttgcaacacatggtaaacgttgcgagttgattttcttgcaacatataaatatgtgtgttgctagcatccgttgctacctaatttcttgcaacacataaaccattttgttgcaatgtatgcgttgctataggggtgtttgtgttgtagtgaactaaccttcggagaaacaagacctccgtgcaacatgatacgggggagcccgagccagattgccttggctgaatttcgagtaatttcagatcatattggcactagagacttagtgcaggaatttttggccttcagagtattccctactatgaaggagtgggaaatgccgaagctagagggggaaaagaagaaaggggagcttatttggttgccctaccactataagttcaaaaaacatttcaaagtaccctgccaagagtggctggatacaattgaagtaatgtgcaacgaaattcttggaaattattctaagaaagaaggtcaattgatgacagcggctttggcacccgtccgaaacgaaggctaaacagagtgatggatgctataggctttgaatatcctgactatgagcgactggacaagggtgctgaagggcaaaaaagaaaaagagtagctagtgctttgaataaagacaacgaagatcaatcaaagaagaagaaacaagaaaccgaggtgaaagcagttactttgaagaaaagaaaggcctcacactagtacagagaagatttatactggcggtcgtaaacctatttttagtggcgtttatcgtaaccgccagtactaggggccagtaaaaatcatcatttttacaggagggtaactgaagaccgccagtgaaaatcgattttcactggcggtcgacgtaataaaaccgccagtgaaaatcgtttccaggaaacataaaacagattttaaaaatagtn

SEQ ID NO: 183 - DNA, 1440 bp, Zea mays
  Peptide Sequence Number=SeqID_8264
  Probeset Number=SeqID_14586
gtggcgttgtgcggccgtgcaagagaaaccgctgctctccatgggcaaggtggagctggagtggaggccgaggcagccgctgatgctaaaggagtggctggagctggagtacagtgcggagctctcccgcgacggcttgggctgctacccgcggcacctcgccaccgagccccggagcgccggctgcaggcggagccacgttatcgccagggtctcggctgcgctgagggccgcgctgtcccgcccgccgtcggcacgacaggtggaggcggttgcgctccccgggagcctcccggcgaggctgcgagtggtggggttctggaagaagcggaggggggagatggaggagacggacaggcaggtggcgagctgctccgctactgccgcgagctctggaaggagggatggagcgtgttcgctggcaacgtctccgcggcgcatgggtcaggagagtcgccaggccggtggcgatcgcgtaggtctcggcggcggccgtcggagccatgaaacagtgaagaacgagggatgcaactgcgaggcaacgtgccacctggacgaggagagggagcaggagcagcggctgagcccagtctcggtgatggatttccaaagccagcaggatggagacgacgattgcaacgacgacggccatagcgaggacgagggcacgtcgccgacgtttgagccaagcctggccaacatccaaagatcgagcagccaacaattgcttcagaggctccgacgattcgagcagttggcggagttggacacacccgacacgggcaacggagaactggactcggtgcaagacaacccagacgctgaacgtgggctcgtaccggaagcaggctcgccgtcgccgtgtcctgcccaccgcttcaagaagcttctggaagatttctttcgtgagggcctctccccctgccattctgctggggcttcggacgatccagagctcgagacgtcgttgctggagactgccaaggcgtggctggatgggcgacgttgcgcgctgatcaggtcggatcaagaggcggaggtggaggaggagatcgagcggctgggacggtggaggtgttttggagaagatgaccgtgagccgatgagctcagacgtggagtgtggtatattctgctgtcttgtggaagaattagttgaggatttgtgctgatggtggggattcgtgttgcgggtcttcgagacatcggttcagaggtaattccgaacatgagcacaattgcttgccgatctgctatcacacgcataaatgtaaccagaagatcaaccacagactcacagtccaggtttgttgggtatggataaaagtatgactcctttccaaacacactgtctgtcctgcgtccgaggagaggatgaagtaaaaaaaaagtgatgtaaacttattctcaaattaataaagtgtgtctgatagcttctctg

SEQ ID NO: 184 - DNA, 505 bp, Zea mays
  Peptide Sequence Number=SeqID_8265
  Probeset Number=SeqID_14587
gaaccctaccgtgaaacgattctagaaaagacacagggggaggagtgagattcgccaccgccatagttcatcggtgtcgacagagcacgaccacggggtagccgagggtgtaaaccaaggcttgcgggaccgatgggcggggtttcggggcacggtgatcgaccaagacctgtcgaattgctcgccgatgatggaaggccgccgcggttccgtcttggccgtggattgctatgctcgccgcacctaactctgacgagcaagtgattgaggagcccgaagctcagcaggtagaagatactaagcaggagctcattgaaggtgaagagcaggtagcccaggaggaggactactacgaggagtttgatgaagtctaggtagtgtctcccagtcagcttaatggcgccaaagaaataatattagttcgctttatttgttatcatttatttttgtaagacacttctcttatgtaataatgtttgtgatatttatctctatacacttggtc

SEQ ID NO: 185 - DNA, 697 bp, Zea mays
  misc_feature (1)..(1): n is a, c, g, or t
  misc_feature (668)..(697): n is a, c, g, or t
  Probeset Number=SeqID_14588
ncgaacgggaaatccaaatcttcaacgtaacagcagtcggtacaagttgatacttaccgcgacggataaaagtgcccacgatgacaaatttccaaacggaagcctattataatactaagattccaattgcaaggttgggggtacctaacttctgaagcccgccgttcgggatacctcagctccaataaactcccctcctttcccccttctccacgacacatcgcgatcgcgccgtcatcctgtcggcaaggtcgctaacatctggtatcagaggtcgacatcctggatccgctcggtgtcgtgccccgtcggccccgatcctccatcatggagaccgccgatgcaactgcacgcagggtgctcgaagaaatgcaactcatggaagctcgcctcacagagaagattgtcggtcgttgcgagggcatgcaacagcgggtggagcagcggtgcgatgaacttcaccaacacttcacgcaccgctgcgacaccatccaccagcaagtcgatgtcgccgatgtaaggcccaaaatcagtttacaaatcgtcgagaagaacttggagtctcgtcgtcgtcgtcgagaagaatcctagctccgcccgtgaggcgggacaagagcagttcgaggcgacgaggaccgaggaaaccctagcacggcaagagggctggnnnnnnnnnnnnnnnnnnnnnnnnnnnnnn

SEQ ID NO: 186 - DNA, 1377 bp, Zea mays
  misc_feature (1377)..(1377): n is a, c, g, or t
  Peptide Sequence Number=SeqID_8266
  Probeset Number=SeqID_14589
atggcgcttcatccagggcaaaccttattctcgccgaccctcttccaaggcaaatctcctccaaaaacagctgccatcttgcttcatgccaacaataatggcagtatcgatgaatgatccatcaatcttcctagcccctcgcgaaatctccctatcgccgaaagacccttccccgtccccggtagcgctagctccgtcctgatgcgcatgccgcggctgcccctcctcctcaaggtagccgcggcggcggctgccggggcgctggcgctcattgtcgcggcgcgcctccgcagggaggacgccgtggcctcgctccgccgggagatccgcgaggcactcacggcacttgtcgcagacgacgaggacagcgacgacgccgaggagaactcctcctccccgccgccgccgtccgtgctgatcacggggttccgcgcccacggcaagagctcgctggtcaacacggcgtgccgggcgctggcggccgaggacggccctctgctgctgcgggcggaggcttcgccgcccggcggcgggagcgaagggccgaggaagctccggatggtcaaggccgtggtggccgggaccgacggcgacggcgcgggggcgggggagggcgacgtggtggagctgctggacgcgccgccgctcgccgagaccgggaagctgacgagggaggacatcgacgccgccatcagcagcggggaccctgagtgcgttgtgttcattctgcgctgcaacgcgcccaccaaggaacggaacgccgccatcaagcgcctcccggagatttctgccgccatcagaaacaaagggcttaatttgatcatcgtgttgacttttaagaaggccatgagatccattaggcaggctgaagagcttctacgggaggtctcgttcagggccagaactgattgtgtctacttcatcgagaactacacctggagcaacaacggtcccaacctccaccatccccccgtcatcaggaacgacttcgagactcatttcacggtgctgacaatcattcgccagtgtcttgagttcatcaagctaaacaggagccagtccaagagcaagaaaaagacgaacggcaagcaggaaaaagcacccgagcctaaacttaagaataatccacccacagaaactaacaagcagcgccagaaactcaacgagtccattgtaaaacctttcctcagcagttcagaaacttgaatcgcccggctatacgtatgatgtactgatcagactgatgtagacatacttgtatagcactgaggtagtctgacaagctgcataaaatgtaacgatcatccattcgttttgtgaagatacacgtcctctttatgtatcataaatcaagatgtgctgctggcttttctcgtn

SEQ ID NO: 187 - DNA, 1493 bp, Zea mays
  misc_feature (1493)..(1493): n is a, c, g, or t
gagatggtctaacgtgatgtcatagggtgattgtcttctgttctgtctggcagttttttttttttgagaatccgatgcgatcaaggctagaattgtttatcgctcgcgggcgggaagtgtggtgacgcgtctcgatccgcgcaccgcttgggcttctcgtaggagtagtggagtactgctcagcctgtcaccgtcagcgtatgttcttgttccagttcctatttttactccaagtccactagggatcctatccagattcgtggggacactctcttcgagttccaggcttccaaggtccaagggccgtagcatttgtctggttggattgggttgttccgcttgggtagccgggtgggatcggaatctgtgtggcacccatggcggcggtcgaggggacgaagaagaaggtaatcatcgacaccgaccccggaattgatgacgcgatggccatcttcttggcgctgcggtcgccggagctggaggtgctgggcctcaccactaccttcggcaacgtccacaccgccctcgccacgcgcaacgcgctccacctgctggaggctgttggcaggactgacatccccgtggcagagggatcccatctaacgatcaagaaagccaccaaattgaggatcgcaagcttcgtccacggttcagacggcctgggaaatcaggacttccctccaccagctaccaagcctgtaaatcagtctgctgctgccttcctggttgagcaggcaaatctgtaccctggtcaagttaccgttgtcgccctcggcccacttaccaaccttgctctggcagtcgagcttgatcctgcgttcccggagaagatagggcagattattattcttggcggtgcgtattcagttaatggaaacgtgaaccctgcagctgaggcgaacatcttcggggatcctgacgcggcagatatcgtgttcacctgcggtgctgatattttggccgtgggactaaatgtaacccaccaagtcgttctaaccgatgctgaccgggagaagcttgagcagtgtgacagcaaatacgcccgctacttgtgcaagctaatgggcgtttattttgattaccacagggacgcctacttcataaaaggagcgtatcttcacgatccaacgacggttattgctgcggtgaacccatcgctgctgacttacacagaaggcgttgtgagggtacagacggtcgggatcaccaagggccttactgttttcgacaacaccaagaaaaggtacggagagatcacggcctggagtggcatgcccaccgtgaaggtcgctgtcaccgtcgatgcccctgccgtggtagagctgatagtgcagaggctgatgaccgatgactagcaacaacgccaccagctgatccggttgggatcatcatgtggttatgtgcgtgcttggtgtttacgtacagtttatatatgcttgacacgtttgctgatgcttctgagagaacgtgattaaattaaattaaacttgatn

SEQ ID NO: 188 - DNA, 1493 bp, Zea mays; identical to SEQ ID NO: 187
  misc_feature (1493)..(1493): n is a, c, g, or t
  Peptide Sequence Number=SeqID_8392
  Peptide Sequence Number=SeqID_8392
  Probeset Number=SeqID_14590
  Probeset Number=SeqID_14591

SEQ ID NO: 189 - DNA, 1259 bp, Zea mays
  Peptide Sequence Number=SeqID_8393
  Probeset Number=SeqID_14592
gaaatttttattggattcaatggaacgagctgcttgcgtccgtgttcccgatctcacgaagtctcgcctctcatggaaagcagtccagaccccttctctctctctcttctcctcgcgaggccgcctccacctccggtcctgggtcgtcatgctgcttgctctgtactccgaccatccgtcgtttgttgttcgcctgctcgccgtggggatatgcgactgcggcagcgcggcggtggcgatcaaggaggaggacgcgtgcggggcgcagcggccgtcgacacgctagcgcctcttgcagcggccgtcgatgtgagctcgggctccgcttacccgtcgctgccggcatcgctcgatgtgctactgttcctcttctctagatacaggatggtcgtgctccttgcgaccttgactcaccaagtgcctcggtgagctacttgttgtgtgtctgtagggatcttactagctactagctcatcagttcatcactctctgaacaaatgttaacatgtcagagtagggttgcaactatgaatttttgtccaaggcattcacattcattggttctgcagtaacggagagtgcctgaatgtaaagttggtcatctatggtcggctattgcagtagctacccctgatctgctatatcaaataatgttgaagaacatgtgatatgcagtatggtctgctttggctgcaaaagaattgccgcagatatggagggaataggctggcggtttaaccataatagtgattataggctctcttattggagtactaaatattgttgggcctctaaatcatctaaattgagtcctattttaaaatttaggacctcaatttaggactccgtgttggagatgctcttatatgggggcagggcaaagacagaacgggaggttgcaagagtgtggagccatgttcagtaccttgatatacaagaattagaatcctataaatcatgatacctgcatggatggtccctggggcgccaagagtgagacaactcccgacaaagcgccagcattggccccggtactgtcatggtgttcgtgaccccaagatcaggatctacgatgtcgggatgaagaaggttgttgatgtacaatagttcagctctcttagtctgcatttgacaggtcccatggtttcaagtaagtaaatcaagataactgacttatatgttaaaatggaagcttttgctgctgctattatgttgagtgtatgtttaccttctgagtttatcataatgagattgttttt

SEQ ID NO: 190 - DNA, 661 bp, Zea mays
  misc_feature (661)..(661): n is a, c, g, or t
  Probeset Number=SeqID_14593
aaaaagaaaccagaggcgagaggaggcagctgcagccggccgctccagctgagagcctcgagacggagagggatctccggatagctatgggtgacgcgaagacttcggtactaatcacgatgcccagccgcgaccgcgaccgggaccggctcgtgcctaccgctgccgttgccacccatgagtccccgtccgccctcactgtcggcgactccgatgacgacaagagcaagccctcctctgcttccgccgccgctgccgccgcgcagaccggccgtgaggcgttccataaagttgtgcatagctgggcgtccaagaagttcatgaccggatgggtatttctgtgatgtgcgggcgcacatacgccaggcgcgcgcgtgatgtgcgcaggggaacagagcgcgcagccaggacacaggaagggaaggcaagtggctagaaggaaagttagccacctaatcaattgtttcctgtgttagttatttccttattagtcgtttccttgttagttatttccttgtgagttatttccttgtgagttgtttccttgttagttatttccttactagttgtttccttgttagttatttccttatagctgccccctctgtggctatataagcatgtacgagacatcatttgggataagcaataattcagtctn

SEQ ID NO: 191 - DNA, 1310 bp, Zea mays
  Peptide Sequence Number=SeqID_8394
  Probeset Number=SeqID_14594
catttaccactgaccctgtatttcgtgtcaccttgcgactccgacgaaccccaatcccgcgcgccggtgaccatggagttcatcgacccctgggactcccagtcccgcgctcgcgtcgtccattccggcgccaactccacttcgttctcctcctccaccgccaaagcacccctctccctccgccacgccgcatcttgcgccgccgcggccgtcgcacttctcgccgccgcgttctacctcctcccgacctaccagatcctctcctccctcctcatatggatcgcttcgtccctgctcctcgctcccttcgcgcccttgtcggccactggcggcgacatctccgtcggccgaggccgcgtcgttccggctccagaaccggccccagaacccacgccggaacccacgcccgccccccgccgcggccgtcgccagaacccagtcccgacgcccacaaaaccctcagatccgggcactccccccgtccaatcggccgcatcactgcatccgttgcagaaggcgacaactgcgggtggagccgtggtggacggcggcgagagggaggaggacgccggcgagtggactgaccaagagctggagctgctccggcggcagatggtgaagcacccggcgggtgagccccagcgctgggagaagatcgccgcggtgtttggcggccgccgcacgccggagaatgtcatccgggcggcaaagtcgggcgctcccgcggcgggaggaagctcgttcgagcagttcctacgcaagcggaagccgctcgatccgagggccgaggttgctgacactgcggacgatgcgggaggcgccgagagtgcggacgccgcttggagcgccggggatgaccgggccttgctgaatgctcttaaggagttcccgaaggacactgcaatgaggtgggagaaggtggcggcctctgtacccgggaagacaaaggccgcgtgcatgaagaggatcaccgagctcaagcgagacttcaggagcaccaagacggcatcggaagcagcaccataggcgaaacctgagaattttggtaggggtgccggactgaatgacatgcgctgcactggtttggctagcgaggaagaactttacatggctagctccagtgaaccatggaaacggcagaggattaactacactacggagagggccggagctatagaacagatcatgtaattttcctattgaactagagacagggtatcccttgatataggagaaactttgacttactactggacacatggcatgagacaggaagaacctgttcttgtttcaaactaaagcatgttttc

SEQ ID NO: 192 - DNA, 731 bp, Zea mays
  misc_feature (731)..(731): n is a, c, g, or t
  Peptide Sequence Number=SeqID_8395
  Probeset Number=SeqID_14595
aagcaaggataggaatgggagaattgtcagcacaaggaatagctgcagaattgatgtttggtgagacaagaatggcatggacagtgatttccagacatcgccacgcgctccatacagtaacctttctctgtttttttctttctttctgtcattaaagcgcaccaccggcagcgtctttaaaatgccaccgtgcaagttgttcttggctctcacaagagcctttcgctgcatcaacacctgccgactgctgcaggcaagtaaaggtactcctctcctcccctctgctgcagtcctctgcccgctgcagatcatggaggaggaagcatggcaggagtgtctgcatgggtcctgagagtcgcgtgagcagcgaagcagtttcacggatggttggatggagggcaatgaccagctgctgagctgctgctgctcctcctggtcgaccatcagtttgtatttgtccatgcctcgtgtagccggccgtcttcttgccctggcttgtccagttccggaaggcgggcaagcccggtgaggcgtggacagagaccggcaagtcagagatcggcaatagtgagctccagcaggagcctacttgtactccttatttacccgttttaaggttcccttcttcgtgctgttcctcgtcttccttcgtttcttcttgtctgttccctcctgccccagagctgtaccggtgagagcagaagatttcagtagaaagtcctgctttctgn

SEQ ID NO: 193 - DNA, 845 bp, Zea mays
  misc_feature (1)..(5): n is a, c, g, or t
  misc_feature (606)..(845): n is a, c, g, or t
  Probeset Number=SeqID_14596
nnnnntattagctatcttgtttggttataaagtagctaaactttaacagaaccttatctattactcccttcgtttcgttttagttgtcgctggatagtgtaaaattgaactatccagcgacaattaaaataaaacggaaggagtattcatttagaagtctttagagaactattagacttgctcttagaagtataaatttgaacttttagaaaacaaaatctaaaaagatgtcgtctcgtctgctttaaaaaaccatacaacaacgaacgaaaagcgcacacacacgcgcatcccggcagtcagtagcgcagctgcctctcctctctttggcccccggagccggagcaagagcgccgccaacagccccgctaccggcgccgtgtcatggcgggggcaggagacaaggtggactacgtcttcaaggtggtgctgatcggcgactcggcggtgggcaagtcgcagatcctcgcgcgcttcgcccgcaacgagttcagcctcgactccaaggccaccatcggcgtcgagttccagacccgcaccctcgtcatcgaccacaggagcgtcaaggcccagatctgggacaccgccggccaggagaggtaccannnnnnnnnnnnnnnnnnnnnnnnnnnnnnnnnnnnnnnnnnnnnnnnnnnnnnnnnnnnnnnnnnnnnnnnnnnnnnnnnnnnnnnnnnnnnnnnnnnnnnnnnnnnnnnnnnnnnnnnnnnnnnnnnnnnnnnnnnnnnnnnnnnnnnnnnnnnnnnnnnnnnnnnnnnnnnnnnnnnnnnnnnnnnnnnnnnnnnnnnnnnnnnnnnnnnnnnnnnnnnnnnnnnnnnnnnnnnnnn

SEQ ID NO: 194 - DNA, 583 bp, Zea mays
  Peptide Sequence Number=SeqID_8396
  Probeset Number=SeqID_14597
cagccaacacgcacagccacatccttacatggcgttcgaggacgaggagctgctgcagctgctctccagagccgaggcggtggaggcgaagcagatcgaggtgatgtcgctgctcatgctggccactgccgagagcctcgcgtcaggggagctcacgcccggggacccggagtggaaggcccttggctcgaggtgctccgcaaggcagcggaatcggtggagccacgtggatggcggccgagtacgccgtacgcggctggcccggcggggagtcggtggcggtggatgcgcatcggaggctggccgtcagcacggtggcgctgggcacacgtgccgacgaggggtgcgtgctggtcgactcgggctcgagctccagctcgcactgcacgctgggagaagctgtcagcgatccactgcactgcatgaaggtggtgggcgggggattcacataccgtgtgtttggtctgtggaccaggagagcctggctactctaatccgtatgtagagaaccaaactcccacgagacagatttaatatatgcgagagactcttgtttggttacatgtgtaaatttatgcatact

SEQ ID NO: 195 - DNA, 608 bp, Zea mays
  misc_feature (608)..(608): n is a, c, g, or t
  Probeset Number=SeqID_14598
ttagggtctttatgccttagggtttagggttctctgctcattcgttcgccacctcgctccaagacgtctcgctagggtttcgccacagccgccgccatgcctcgccgcaagcttaggaaggtccgcgtctcacgcctggctccacatgctgctccagtgaggaacccaccacagcctgcgtgctaggctcctccagctcttggtcgtgatggtggcggtggctccattcttggaggaattgggtccaccattgctcaaggtatgtcatttggtacgagtagtgccatggcacacagggctgttgatgctgtaatgggtctccggactgttcggcatgagattgttttttcagaagctgctgctgctgcccctcctgctccagtgatgaatgctaatgcttgcagcattcattctaaggctttccaagattgtctcaacaactatggcagtgagatcagcaagtgccagttctaccttgacatgttgaacgagtgccgccgtggtggtgtctgcctgagcttttcctccaattgggattattcatgatttctcttttcgctcccatggtatctcattaataagacaccgcgaaacttttaaccgtctcn

SEQ ID NO: 196 - DNA, 673 bp, Zea mays
  misc_feature (1)..(1): n is a, c, g, or t
  Peptide Sequence Number=SeqID_8397
  Probeset Number=SeqID_14599
ncagtgagcgagaccgctgcattccaaactcaatatatatactgcctgtaacagtattattcttattacatcacttggaggaccattaatctgagacgtcatggcacggcagcagcagcagcagctagctagctagctagctagccagccaagaacatcgtcccgtctggacgcatcctctcaaaacagcagcaagggagaagagaacggggggagagggagagagagagaatgaaaaataatacagctagctaggagatctagattagtagtagccggcactagttaagatacctagagatatttttatatatatctcggaccatgaagcctcaattccccacaacagctcaaaaccatctgcgtcgtcgtctctttcctcctggtgctcagctcagctcatatatggaccgagcaagagcggagagttccagccggcaggcagtgggagccaacgcgcgcgtgtgcacacgcgcccttgcgcttctcctatctgtgcgggtgcggccgcacgttttctctcttgtcggcgcacattattggccagctgcagctactccgtctagagctcgccatgaactgaggtgtagatgggactgtgggagggagggagaggcctgcgatgcaagaggcccggagggagcgctgaggtgctgatgaagatggaggaagc

SEQ ID NO: 197 - DNA, 1273 bp, Zea mays
  misc_feature (1)..(5): n is a, c, g, or t
  misc_feature (1273)..(1273): n is a, c, g, or t
  Probeset Number=SeqID_14600
nnnnntcattccacctccgcgccaccgcgttacccaaacgcgctaggatttccgaaccgcagcgcasccgatccgtacctcgcttccattccaccccaccccaccggcgacatctccgggtgggcaagcgaggcaaggcagcagccatgtcgctccgcgtgttgaaccctaacgccgaggtgctcaacaagtcagcgcgcggcgctgcacatgaacatcaattgccgccgagggcctccaggacgtgctcaagacctcccttctcctgccgccgccccagctcgcttggcctttagccgttatctctagatcaccctttctatgatcctttacttttagtgccgcagtatgggtctaggtttcgacgtttcgtggtgtatctgttcacttggcagtgcatttgcttatttgtagcaaaatggccagttgctggttttagttgttcagatttatagcggaaaggtattcagtattctgattttggcactgcctcgtgtttttttttgatttgattgtgtatttttggtaattacctaattgattacagaaggtgcaacaatttcttgttggctgcaaatgttccttagaatttggtttgtggctttgtgctgctcaggctcgtgggtggagctggtgacctgaagctgactaaggatgggctggaaacaccctccgttgacattctgatgataataatatgtacttgttggtgtttttctttgatctattgtgccatttattcgcagcaaattcagaacccaactgcaatctcatttggcaagcatagggcgtgctggtgcttttgatgttgctgcaaagaagcatcttattgacaatgtgaagagaaccgtcaaaggacgagcacaacttggggtggaggcgtttgcggaagctcttcttgttatacccaagactttagctgaaaactctggtttagatacccaagatgtgattgtttctctccagaatgagcatgaccgtggattagttgtggggttgaaccatcactctggggagccgattgatccccagatggaaggcatctttgacaattactctgtgaagcgccagatcatcaactctggacccatcatcgcgtcccaattgttgcttgtggatgaagtgatcagggcaggccgcaacatgaggaaaccgtcttaatatttgttaccacctacccgagcctaattcgttttaccttttgtttctgttttgtgcttattagtagtcatctggacgatacatttaggggctcttgcattaaaaccctatn

SEQ ID NO: 198 - DNA, 749 bp, Zea mays
  misc_feature (749)..(749): n is a, c, g, or t
  Peptide Sequence Number=SeqID_8398
  Probeset Number=SeqID_14601
actgtgttcttccgttcctctcgcgtggttgtctggtgccgacgactgggccgccgccgcctccgtcctacgctcggtgctgaggccttcgggacttccgccggcgacgcgcaccctccgggttgaaatccctcgagaacaatggggcgcacggttctttcagatgaagaagaagatgagttcgaggctgacgaggaggatccgcggccctcgcggaggaacagggacgatatggacgagcgcgatgacgacgacgacgatgaggacggtcaggatgaatttgagaaggatgacttcatagtggacgacgaggaagaagaagaagtggaaggagaggaagaggaacagaagagtgatgacgagaggcgaagaaagaaaaaggwaaatgaagagggaatcagacgacttcatctcgatgaggatgactatatgttgctccaggataataacatcactggcatcagtcgcccaaagcctggaaacaagtttaagcgcttgaaaaaggctggaagggaatctgaaatggatgagcactctggtttttcagatggtgatggaacaggcaaaaaacgcagttgcctgtacacttcattaaatcgagcacttgcaaaaaagaaagccagagagaggaagacgaacatcactagtcagcactagattgtgtgttttatgttgagttgcaaattcaggtcctgatttttgtcctgccatgaaccgttaggcgatattgtattggaaaggatgcttcn

SEQ ID NO: 199 - DNA, 664 bp, Zea mays
  misc_feature (664)..(664): n is a, c, g, or t
  Probeset Number=SeqID_14602
aagcttcttctatgcttgcaattcttttctgcttcggtgccaagaagctgagtagtcagaactgcaggtctgtgttgtagctgccaagaaatgagcttggggactgtctgacgcgacggttccggcggccccggctgtgtgcgcacaggctgacgtgcgggagctgcttgccaggctgcagattaggcacgcagaggcgaagcaccgggctgtggatggcctgctcgatgctctgcgtgaggacgagaagagcgtactgtcggcgctcggccgtggcaacgtggccgccctggtgcagctgctcacggcgacggcggccaaggtcagggagaaggccgccactgttctgtgcttgcttgccgagtctggcagctgcgagggcctactcatgtcagaaggcgcgctgtcgccgctcgtccggctggccgagtccggcagcctcgttgggcgggagaaggctgtcatcacgctgcagcggctgtccatgtcatgcggcggctagggtttggttgggcggagactcggttgggcgtggacggcagcaagagcgagcagtaggcctcacgtatatggtaacggaaatatgacggcgtgagtatgagatcgttgttacctgttaatggagttgtcatgtccattttagagtgttggctatactcagttn

SEQ ID NO: 200 - DNA, 1498 bp, Zea mays
  misc_feature (1)..(1): n is a, c, g, or t
  Peptide Sequence Number=SeqID_8399
  Probeset Number=SeqID_14603
ntagatcaaagaaattcatattccacaacacccttaagccttgttcggttacaagagaaagaggactaaaaccccttctaatcaattttgattagtgagggattcaatccatttcaatgcagacacaaccgaacacaaacaagccgtgagttgtcaacttcatgagaagctagcaaacgttttcagagcaccaccacaagcttctcttggaggagctggagaagctgcgtaagactaatcctaccgtgactattatctatgctgactattatggagctgcaatggaaattttccgttcccctgaacgatttggtatcgaggaacctttggtggcttgctgcggtggagaaggaccctatggtgtgtccctttctacagcctgtggatacggagattacaaggtgtgtgacaatccagacaagtatggctcgtgggatggtttccatccatcggaagctgcatacaaagccattgcaatgggccttttgcgcgggacatacacacaaccatctattgcttccaccaccagttcctgtccacagctcactgagctcggctcttctgttgaatacaaggtcctctacgatttatagttttatagctacatttagttgttagtgttattatacatgcaccgatgcacgtggttagagattcaatttattttttggatgcatacagtatggttacagatgtaatgatttggataattttgcctgattacagagctgcggtactgtactgcacttctcggctgtggcccaagcgattggttgggttttgttttaaaaaaaaaaaaaaaaaacggcacgagaagcttttttttttttttttttagaataaacatcattatcacttatgtccaacataaatcaatctacatatggacatcacaattcagatggcagtggcactactgtgcacatgactatttgcgcatcaataatctgactgacatgctacacaaattagaaaaaagcaagatcgattacaaggcctactccctgatcacaatcagaattaacaacagtcatgtattaatacatgtaatcagacatcaccgtcgagggatcagcactgcccacaatagatcgatgtacagatgccgatggtgtgctctgtcgactgtcgaaggtgccaggttctactctccctatcgcatctagggcagcaagcaaggaggtacgacgacgctgctgtggttgcggcggcgcagtggaggggggtttggagctgtggcggcgctgtttggggtgtggcgccccttggtcgacgggatccatgcgggcggcggcttcaggcgaggagacggccaggcggtggcttgggggaggtggccaggcggggggattctggagaggcggccaggcggaagggcttcgggtgaggcggcacttcgatggcttcgggagagtcgcggccaggcgaaggggattcgggagagtcgcagcaggaagcggaagaggatggagtcggttgggttcggaagaaaaaaaag

SEQ ID NO: 201 - DNA, 651 bp, Zea mays
  misc_feature (651)..(651): n is a, c, g, or t
  Peptide Sequence Number=SeqID_8400
  Probeset Number=SeqID_14604
ctcaagctgcgccgtaaagaactcgtgcatggagggcggatggtccttgtatttctcagcaggaagaacgaagacgtgtacagtggcgacctcaaccagctcttcgcgtttgtcgcgacagcgttgcagtctcttgtttcgaagggccttgtggagaaggaaaagctagagtctttcaacctaccgatctacgggctgtcggtgggagaagtggaggatttggtcacgggtctgttcagcatggatctgatcaagcagttcgagatgaactgggacccgttcgacgattcggagcgctcgcagaagcatgaatgtcgccaagtacatcagatccgcgctgaagtctttaattgtctgccattttggagaagccataattgacgcatggtttgccgagttcaggcgccttgtcgctgagcacctcgagaaggagaagaccaagttcaccaccttcgccatgtgcttgaagaaagaatagtatggtcttatatacatagatctatttggacgcgtgcgcgcgcatatggttcgtatatatgtgtattatattgctcacagggtatatgcgtattatattactcatagggtgtagctagctactcgcatgtgtattatatttctagctttagagtgtatatgggacaatagagn

SEQ ID NO: 202 - DNA, 593 bp, Zea mays
  Peptide Sequence Number=SeqID_8401
  Probeset Number=SeqID_14605
aaaactgtttcatcgctgatggcagaatctctcggcttccgcagctcgcttccgctttgctgtcctctgtgatatctgctcgaggaatggcatcgctggttcgctgcaggtctctggcgcgggggtcagtgccgcagccttcgctgcgaaggggaaggcctccatcgatgcgcactggcttctctcgacggtgaccgtcggcgaggtccgcccggcgcggcgggcgttccgcggcctcgtcgtcagggccgccaccgtcgttgccccaaaggtgcgtgcccaggcaatgtagctcggtggtggtgttttgaggggaacggggtactgggattggttgttattggcttttgccttattgagcgctgctgcatatgcttgccgaggaagaagaccgacgagacgaagtcattgattagagtgttggtggcccttggctttgattgtgatcaaatagaggcaaatggttggggtttggagatgctggtttgttaggttatggttagcttcttaaaattccaacytctggtgtattgtgatgtgaactgaatcacaatgatgtgaactgaatcacaataatgtctggttgtggtttc

SEQ ID NO: 203 - DNA, 620 bp, Zea mays
  Probeset Number=SeqID_14606
aaggaatagctctgatatctctcccaacaatgttatagagccgactaggctgacgaacagcaatattgtacatccagctcgccatcgaggatgccacggcaacgactggaccgggcaaagtggcggcggtcgtgcttgtcggttgtcgctggcagctgcacggtctccctctcgccggtggctgtgcgcgctcgtgcttgtcgtcgacgatcgcgcactctcctcctcgccggcgactacgcgcgctctactgctccccggcgcacgcgcgtcgtcctccactccggtgcggccgcggcagggcacaacgacggcttcaagcacgcaaatgggatacgttccactgtagctccgatcatgccgacggtgaagctccatggaccgaagctgctgcttccgaggagaggcaagaaagtcagagtggtattatttgccggacgaccgtacgagccggtattttagggtacgaaccttgctgcagcgataaagtagctaagaacgtgctatatttagctgacaggatggtttatagtatattattggagagagtagtcttagctcatctccatcagatcgtctgtattattttctatctcatcatttatttcaaattttacttt

SEQ ID NO: 204 - DNA, 551 bp, Zea mays
  Peptide Sequence Number=SeqID_8402
  Probeset Number=SeqID_14607
ctttcccctcgaaacactgccactagcgccattgtgtcctgaggaagctcagggcacgacgacatcgccgccgccgcaaggggattccatctcttgtcgtcgggcgcactcggagtgtggtgtagaagctccatcaacacctatgtgacctgcgcgcggcggattgaccaggatcaccaaccaacatcaatcggaacttctcgccgtcgactgaagtctgccgtggatccgcctggcactgtggccaacccccacccgcactccaaacctcgaagagctagtggtcgaggatccgggtgttcaacaggtagaagttgctgagcaggggctcattgaaggtgaagagcagatggtcgaagaggagctgccctacaatgaagcatacgagttgatctaggtggcgtctcctattcagctttgtggcaccagagaataagacattagttcgctttatatttatcatttattttgtaagacttccgctatgtaataattacttttatgatactgtgacatttatctctatacactttgtcattatatgtgttgtt

SEQ ID NO: 205 - DNA, 641 bp, Zea mays
  misc_feature (641)..(641): n is a, c, g, or t
  Peptide Sequence Number=SeqID_8533
  Probeset Number=SeqID_14608
actcccactagattcaggtgagctcatcgataggtgctctcacgccattcaccaagcccggccggcagctcccttggtactttggtagtgcgtctaacggccatggcgaagcttgctgcgcagctcaagatcaagttctttggcctcgtcggccgcatcgccagctgcggccggcgccggcgccgcttacaaggatgccgctggtgcgacggcagagaccacgtcagtggcaactcagcctgttgagatcaggtcaaggggaggtgctccgcgcgtggatggaggggccaagggtcatatcaacagcgaccctatctagaggaggaggaggaggaggagaagaagaagaagctcgtggccaagacggtgcttggacatcatcatccagaggaggagaagcttagttaattacctgtctgaatgaactgaagctgtagtaatataaacggaaaccattcgccgttgcctgtgctattctcccatgcatgttttaccatatccttttcacctttcctagtgtctgttatgcttgctatgtctcctactttcaagctctgatgtgttaatggtttggtaacacacaaatttctgaccagagagcagccttttgcttatcatcaaataaagccaaacctgcagtn

SEQ ID NO: 206 - DNA, 857 bp, Zea mays
  misc_feature (857)..(857): n is a, c, g, or t
  Probeset Number=SeqID_14609
attaaaaaaaaaaggaaaagggaggccagccgggtgggctgctatcaggccttttggccgagctagcccaccggctagcacttccctatggcaccgagaagccaagcgtagcgagtgacagagaagggagtagcgaagaggaggttgccttccctggcggcggcgcttgaagccggttctttcggcgctcgcaatcttctcgccggtttctgcgcaacctcctcaaggacgcctccttaagtatggagacaagctccctgctaaggatcaggcacaggacacagcctatgagcaattacaatcatacccctcataaaagtttacaacaacgactcaagctcttatggactaaaaggacattctatctttaagtcagtttgtaattccgaagcttcatgaacggcacccttcggtatcacgtacagacagcttcagccgaagctgtttcttcctgcaggaccttcagcgacgaagcatggtcccaacagtggttaactccaccccaggggatacagcagcgcaccagtcttgatgggaaatggtgttccggcagcagttcgaggtactggacaggtctacctgaagttaacttcaggaaagacgctcgttctgaaggacatactctatgtgccatcgatgagccggaacctcatattagtgtcgctgctatgtcgacagggtctcaaattagtgtttgagtctaataaagtggtcctgtctaagtttggtactttgttggaaagtcatatgagtcaggcggtttgttccgtctttctgttttgaataatcattcttcttaccatgttaatgtggtctgtaataacgattccattaataatatatggcattcccgttcn

SEQ ID NO: 207 - DNA, 687 bp, Zea mays
  misc_feature (687)..(687): n is a, c, g, or t
  Peptide Sequence Number=SeqID_8534
  Probeset Number=SeqID_14610
ccatttcgctcgcggttgccttctctcctcctctgtctctgcctccgccctaacccagtccagagccagggcagggcaaccaaaccctaggccctcgctctcgtggtatccatgggctaaccgcgtcccggtggggagcccagatccagagcaagggttccgtcctcggtggcaacaccatggagtgggatagcgagtccgacggcgctggcagcatcggcgtcgacgagcaggaagaggagcagcaggaggaggaggagcggggaggcgagagaggaggtgtcgacgccggtgggatgttcacgctcgcgactgaaggcatgctgcgcgcgtccggtccgtgcgggctcgtcgtcaccgacgcgctcgagcccgactgtcccatcgtctacgccaaccgcggcttcgaggaggctacgggctaccgcgccgaggagtttcttgacaaataaactgaggactagaacaaatcagcaggtaaggcagaagaaactgataaacgcataaacatcatctttgcccttccttgcatccaaagcaactcaagggaattttcgtgacattcaacattcttcatgtccaacaatgatagatcgacagttttgtggctgggagagtgtcgaatacttcttcatatactatttcttggtctgtcaaatctgcttgacccaaatgcaagttttgctn

SEQ ID NO: 208 - DNA, 562 bp, Zea mays
  Peptide Sequence Number=SeqID_8535
  Probeset Number=SeqID_14611
caaattatcaatctagttacctaggaatgaaacatttctttggtatgtattatttcgagtgtttgctaacactctatattctgcagatcgttgatcctaaaactggagaggagaaggaagttgtgatattagttgatgatgggattaggccatctacttacctgctatattttttctgagcaaagtcggttaaacttgtgattctttgtatgttcaggtgcccggtgcgtggctactcttctaaatgaaatgaactgccggggcagagactgcagatttggtgttgtcaccatgtgtattggatctggaatgggggcagcaggtgtgttcgagttgtgttcggcccgggtggaggtattgaccatcactcgtcactgtaacccgatggtgatcggcgaccgtgagcttccatgttgcgttctgatacttgagacttttattatgactatgtatgagdkattgkctctyattagkactagatgakgasaygtgtckkattaygactatggatgagacttttgtgatgtaattgatgagactatggatgtgacttttgtgatgt

SEQ ID NO: 209 - DNA, 950 bp, Zea mays
  misc_feature (1)..(2): n is a, c, g, or t
  misc_feature (950)..(950): n is a, c, g, or t
  Peptide Sequence Number=SeqID_8536
  Probeset Number=SeqID_14612
nntcttgttggcctcccagctcccacctcgacgccgacgcgccccaccacaccccgttcctttccttccttccactcgccttcccctcccttccctcgcttctgcatcccacctcgcccacccacatctccacctctctctctctccctcacgccgccgacgtttcgtttttcctcgccgcccagcgaccgcggaagaaactggtgacgcactcgaacacgtcagtctcaactcgcatggtgattcagcgtgtggctggtacgtgagctggcgcgagggtgacgagaaaactgtttccccgacgcgctttactggtcaagggatcggagaggaggaagtctgaccagaggctgccggagatgcagcagctggtgcggtcgctcgccgtggacaacgagaggctccgcgaggagatgcgggatctacagggagcttgcgagggcgctgtccaaggaaaacgacgagcttgagacaaggttagggcaatcgagccctcagagcgaggtcgcttcgaaggagcagagaggaaaggatctgcttgatccgcggcagcccgcacgagacagcttcgcgctacctgatctcaacctcccaccacaggactctgccgatgcctcaacagtttcattgatcgctccagatcgtttgcagctttgttaatcgaacaacaagtgtacagagaggaagcagggtagcagtctacgtggtactcactccgttcttttttagttgtcgtagtttagtttaaaaataaactagcggacgacaaatattcgagaacccatttagtatttgataagctgttactagatggcagagttttacttccactatagtcgtaagtgagataagccacatctgtagggattctaattttaactcacccgacattaattgtttcagctccagctgatcgccacgctgtagtgggtttagatggattttattcn

SEQ ID NO: 210 - DNA, 361 bp, Zea mays
  Peptide Sequence Number=SeqID_8537
  Probeset Number=SeqID_14613
gagaaagaccagattaggaacaacgcatggaaccgataaggaacaatagtgtatcagtagcaaccagacggaatcatcactcacgatcacggcgagatagcagagtatctacaaggggatcagaatcagatcacacaaccgacaccacgacgcggtacaaaccctccccacccaccaaggacaccagatccaaccgagtcccggcgtcctcgtccatgaggtcgtcgtcatcgaggtcgaagtcgaccacctccacatcggcgttcgtcgccgccgccgccatcgccgccgggactcggttggatcgggtgggtgtgggggtggggagggttcggaaatcgctgagatagtcctttatttc

SEQ ID NO: 211 - DNA, 1455 bp, Zea mays
  Probeset Number=SeqID_14614
acagaaattcttcacacgcgcggcatcgctcaatgcctaaaaaaaatctctccaaccgcgctcaaatctttatgccgccgctcaggaagaagatcccgccgccgttcactgatattttcctccacctgcgtgccatccttatctctcctgcgcggtcttcttttccctgctcagattttctttcccagcggctttatctgcacgtgcatagcttgctccagctcggtgtcctcctctgccgcggcttcctccagctcgtcttccacctccgtccgtcacctcgccctcggcgctcgcccctgatgcctgcgctcggctctacccgtcttcctttgccgcacgccatacgcccagccgagcggttcttccccacagcgcgcccttctccccatcgcgacgctccggttctgctcatccatggcggctccagctcctgcgcccggctggatctcccctcggctcgccgcacccctcagctgcctactctgcttgccgcacgcgctctccctgctgctgctattccccggcgcgttcctgctccagctccggtgccgcggagctcccgcgcgcgagtccctctgatggccgtcgcgctccctagtgggtgagctcgccgagctccctctcccgtggtgccctggcctccatccgagctcaccttggtctgatagaggtccctgcgagctccaccagtctgatccaagccatcatgtgcctctggtccctgctctttgccttcgactccatggctgcggtgctcatttccatcgccgtggagctccttcgcacacacctctgctcagcctctgctcgatgcccagcacgccgtttctgctccctcgccatggtcacccagcccagccatgcctgttttctccctgtttctgcgcgcagcgcccagctccctgccgcgctcgttccatggccaccgcgccgtggattttcctgcgcgcgcgtgtctccttgcgcacgcaccgccgtcgagttctctggtgtctgcgcgccgtgaagttcctctagcgccgtggcttcccagtctcttccaaccgcgcgtgcaaattttctctgctcggtcttaatccccatggtgtcgtcattcgtcgtcgcgttgtgcgtgcagcaacccggatctgtgccgcccggtcttgttgtcgacatcgctcaccttaactcagcttgctagttcgtcgttgtttcgtcatctcgtcttgatgccagtccctacgtgttgtcttcgacttgtgttcgcgccgacaaaaacatctcaagaagatgtggagaagcaattccctagtcgatgccccaagtactcggcaaaaggccagaacaagaatcatcgcgagttgcggagttctagttaatatggagaaattccaagaattgtggatggaagagaaagtgaagctctgttctatactcatcaactattctgatcgaagattttattcggaggct

SEQ ID NO: 212 - DNA, 1292 bp, Zea mays
  Peptide Sequence Number=SeqID_8538
  Probeset Number=SeqID_14615
aatctacgcaacacaaggtaggatcaatcaatcaagtccatcatgctgccaagttctctcctccagaggctggcaagttggtgcccgtggttgctgagagatgagccgaagcagcctgttaaggttctcgtcaccggcgctgcggggcagattgggtacgccatagtcgccatgatcgcgaggggtctgatgcttgggccagaccagccggtggttctccacatgctggacctccctaagtcaacggacgccctgagcggcgtcaggatggagctgatcgatgccgcgttgcctcttctcagaggtgtcgtggctacgagtgacgaggccgaagcgttccgaggcgtcagcttcgccgtcctgatcggcggatggccgagaaaagaggggatgcagaggaaagacctcatcgccaagaacgtccccatataccagtcccaggcctctgcgctgcagcagcacgctgccccaaactgcaaggttcttgtcgtggcaaaccctgcgaacacgaacgcgctcgtgctgaaggagttggcgcccgcggtgcccgccaagaacatcacctgcctcacgcgtctcgaccacaaccgcgccctgggccagatctccgagaagctgggcgtgcacatcggcgacgtcaggaacgccatagtgtgggggaaccactcctccacgcagttccccgacgccagccacgccatcgccaggacgcagcacggggagaagcccgtcagggagctcatcgccgacgagaaatggtttaaggaggagttcgtcagcgtcgtgcagcagcgcggcgaggcggtgatcaaggcgcgcaagcagtccagctcgctgtccgccgccagtgcggcctgtgatcacatgagagactggatccttggcaccccgaagggcacgtgggtgtctatgggtgtgtgctctgacgggagctatggcgttcccaagggcatcttctactcatttccggtgacatgcgagaagggagagtggtctatcgtgcagggtgagttcttatcattataccagattagtagcaacagcagcaccaccgttcttgacatgatttgtttattgttcgaggtcttgaggttgatgacttcgcacgatccaagatggagctttcggcgaatgaactcgatgaagagaggtccatggcgtatgagttcgtcgccagctctgaaagccatcagtagatcacttgtgtatacatgagtcatatgtaaacgaaaaaaatgggtgaacaacagacagttgcttcacaacaaccaataaagcagaaatattgcttg

SEQ ID NO: 213 - DNA, 1196 bp, Zea mays
  misc_feature (1)..(1): n is a, c, g, or t
  misc_feature (1196)..(1196): n is a, c, g, or t
  Peptide Sequence Number=SeqID_8539
  Probeset Number=SeqID_14616
nattgccatctctagatccgatcggaacaaagccaacagtcccaaacgtggatttgctactcgacgacccatgaagcagatgttatcttgcggtctttcccaattgggctccgcatgacccacctaatgggcagcattgagccagcgcctgtctttgggccatgtatcgccggaacccgggcaggcgacctagcgagcaccttgtctccaagctgcgacggcatgaagccctgcagaggcggtgcggccccggcaccgcagcctactccagcgcactggagcagctcaagtccggcaagaacaccggcgtgtcccccgcggatccggagtgcaggtacctggtgtccatctcgtatcgcgggcttgggaaccggatcctcgccgcggcgtccgcgtttctgtatgcgctcctgaccgaccgcgtgctcatcgtcgactccagcaacgagatgggtgagctgttctgcgagccgtttcccgacacgacgtggctgctgccctggaggagcttcccgatgtggaacttcagcttcgacacgcgcccacaatgaagaaaccgccacgacatccacctcccatttcctcgcgcccgatcggtggtctgccccgcgccagcctaggccgaggcccaccccacgtgctcggtgcctctcgcccagcggcccaggccattgctagaggtgcgctgcccctggcagcagggcccaggagctaccgcgcgcgcagagcgcttgcccgcgtgccagctcctctttatcttctccaaactgctaggcccgagccgcacgcgcccacaacagagaaaccgccacgacatccacctcccattccctcgcgctcggatcggcgtagcttcttcgttgtttcggcaaggcttatcggctaccccaagattcgtctgcgtagcgtgttctatcctgccggattcgtcgagcgctgccacgttcgcgtcatttgtgctcgctgctcgcctcaccattcatcatcatctcgagaccaaatcacaatggatatagaggtggaggaaggaaatgtcgatgttggcaatactgctgaaccatcgtatgagggtgtggctagtagtgattgtttagcacaagtgcatgctaatgacactgacgaacatgaactgggtaagtgctattattaattacaaaaacctaaggtctgtaataataaatatttgtttgatactn

SEQ ID NO: 214 - DNA, 1207 bp, Zea mays
  misc_feature (1207)..(1207): n is a, c, g, or t
  Peptide Sequence Number=SeqID_8540
  Probeset Number=SeqID_14617
aaggccaagttctcgataccccgacgccggacggcccaaccccagccacagtcgtccacgacaaaccctaacccaatcttcctccctcagtccctctcgctcctggcggctggctccctcctcccggcggcggcgcgtctgggcacggagtcgttcctgtacgtggcggcgcggagtgcaactacctcgtctggctcccctacaacggcctcggcaatcgcatgttatccctggtcagcaccttcctctacgcggtcctcttcgaccgcgcatgctcgtccactttcccggacttcaccgacctgttctactgcatcgccaaggtgagctggctgctgctgttcagcgacatgtactttgtgtcgtcgctgctgctggccgggacggaggaggccaccgaccggcggctcaccacgagggagctggtggacgagtgcaagaccttcttcttcggcgggcacaagaccacgccgttggcgctgtcgtggacgctgctcatgctcgctgcgcatccggactggcaggacgcgtttgcgggctcggactggcacgggccactaaatgggtcgtgctattcaggccggcccggcacggtcaggcctacaccgtgccatgctcgggaagagatttggacccgtcgggtggcacgacacggttaagtggccgggcctaaccatgccgggctcaaacgggccgagccaagtcgggctcgggccggaccgggccgtgccgtccgtttggacatctatactcacgacgaggtggctacttcggtacttcccagtctatcctcgcagatgctttagtagctgccaggtctgcagccctcattgctcgccagcgggagcaagccgccgctactgcgcgggagcaagagtaggtggaggcagatattgccctcgagcgctagcttgatgaggccgagtgccacctcatgctcttcaacgatttacctgtcttatttcacattttatcttatattttaaatctcactctattaactatataatatataatataaaacaatattttgtatcaccataggtacgatatgctagcgacagctttaggggtatttagtacgatgactctgccagggccgtacctgaagaggtgcggaggatgcggccacacccggcccccaaaaatagtgggcccctagccaccggacgctagcactttttcatgttaaatctatctattctan

SEQ ID NO: 215 - DNA, 701 bp, Zea mays
  misc_feature (1)..(1): n is a, c, g, or t
  Peptide Sequence Number=SeqID_8541
  Probeset Number=SeqID_14618
naaaaaaaatcactagaactgtattaatatactactaaccattagactcttttttcccaagagtatataagatttattgcaaacacttgcaccaataataatgagcaaagactacacagcaaccaaaaacaggaggagtgaaattaaccataatttaaccacgtcatagagtaattcatagctactccagcgccgaacatacacatgcttgcatggatgcgttcttctttaaactggacatggacggatgaatcaacgcccgcggtttccagcaacagcacccgcaccagcgccgccacctgcgcctgcgcctgcccccgcgcccaacccgactccgacgccaacgccaatgccgatgccgaggccgcccccgccccctccaccgagaccaacgccatgtccaaggccgccgccgcctccaccgcccaaaacctgcttctgaataccagacagctttgggcgggaggccatatcggcgctgtaaagcaatcatcaaagccttgaagtagtaccaaagaatgcttgcaaacagatctattgtgctgccaaccgtgcttggaagagacgacgaagagattcggcgcctgcacgaggagatctcccagcggagcaccgatctggagggggagggggtccggttgcgccgcctacgtgcgaggggagacgagcgggtgtcggcctgtcgggtcttcgtagttcgt

SEQ ID NO: 216 - DNA, 1647 bp, Zea mays
  misc_feature (1)..(1): n is a, c, g, or t
  misc_feature (1647)..(1647): n is a, c, g, or t
  Probeset Number=SeqID_14619
naaaacacctgtggcagcggccgcgctgcttgcctcgccttgctctcggttcgtggggcatggcggcttcgccggcttgtgctccggggctcatctccggccccaccctccctcccctgcccgttgccttccgctgctactgggcccaaaagccctcctccgcgtcgacctcctccaggcgcccgtgccgcaggcggttcgttcccgttgcagctgcctccacccgcacctcctctgcggctgctcggggcctcgacgccgacgacttccgccacccgctcgacaagcagaacactcttctgctgagagcaattccagggctcaacgacgtgggcaaagctttgctaggacccgtctcggagcaagttatggtactccagaacattggaacatcagttctcgtctccccgaaccagcttccagatctccaccaactgctggttgaggctgcgaagctcttgaacaccgaagctcctgacttgtacataaggcagaatcctgttccaaatgcctacaccttagcaatcaacggcaaaaaaccattcattgtcgttcacacaagccttgtggagctgcttactccaagggaattgcaggctgttttggctcatgagctgggtcacctcaagtgcgatcatggtgtttggctcacttttgccaatatactcacaatgggagcatacactgtccctggttttggcatggttgctggcttcctggaagagcagctatacagatggctacgagctgcagagctgacttgtgacagggcagctcttcttgtggtgcaagatccgaaggtagtcatctctgttctgatgaaattggccggaggatgcccatctcttgccgacaagctaaatgtggatgccttcctggagcaagctcgttcgtacgacaaggctgcatcgaacccagttgggtggtacatccggaatgcacaaaccagagagctttcacaccctttgcctgtgatgcgagccagagagatcgatgagtggtcaagaagccaggagtacaaaaccgtaatgcaaaaaatgcttaagatggggctgaacagagtatagttagtgatgacacatacgaagaggtctgtacacggaatccatcatgtttctttgcaaggatttagctttagatcatgggcctgtttggttcagcttttttctaaccagcttttctgaaaatctggctgtggggagaatctgagtatcattacgattacatatgaaggaagataaagttgttcatagggctcaggatctagaaagtgacagattcctactattacaacgactgaaccgattatgtgtttatgttgattttggatggtttttgtcctcaacgaattttatagaagttggctgaaaagctgagcgtttggcagtctgcagcagcttttggtggtcagaagctaccagaagccgaaacaaacaggccccatgactgtcctttcctgtatatctgatcatgaatttgtgattttctcctgggtggctgggcaccgttttttttcaggactgtagagtctgtatatggagaatgtatgtatatggaagggaatgtctgtatatggagaaggctggtgtttctgaaaaaaaaacagatacaaacatagacatactgtatatatttgcagttgaattn

SEQ ID NO: 217 - DNA, 669 bp, Zea mays
  misc_feature (1)..(67): n is a, c, g, or t
  misc_feature (668)..(669): n is a, c, g, or t
  Peptide Sequence Number=SeqID_8542
  Probeset Number=SeqID_14620
nnnnnnnnnnnnnnnnnnnnnnnnnnnnnnnnnnnnnnnnnnnnnnnnnnnnnnnnnnnnnnnnnnncggtttgacggagagttgatgcagatctgatctagccgcagcaacgtcgaggtagagcgtgctgataacgtgttgagaactacgttaccacggatcaccagatccgctcccttccctcccgtcagcagtagaggcacaagaagatgtatagaatccgtctcccttcctataaacaccacagaggaaacacacgagacactggatatagagttgggcctctggcctctttctgatctctatattatgagggggtgtacaggttccttatatagagatgtgagatctctcagggacaaagcaggtatttgcccacataaccctaactaggggtkacctaacaccatcttccacgtgcagcacttagattgcacattaacgaagagtcgtatcgcaaaagtttgaagccttgacatgctttactgttttagcaggttgtctgccttgcaatgtgtcctaaggcctatgaagggtttctgtttaggcagtttcctgaaatggtgttttgctctaggacaatctcgcggttattgaaccttaatatatcgtgtccctgggttgtgtttttttgacactttataagtaatttcatttggatgagacnn

SEQ ID NO: 218 - DNA, 669 bp, Zea mays
  misc_feature (1)..(2): n is a, c, g, or t
  misc_feature (603)..(669): n is a, c, g, or t
  Probeset Number=SeqID_14621
nngtctcatccaaatgaaattacttataaagtgtcaaaaaaacacaacccagggacacgatatattaaggttcaataaccgcgagattgtcctagagcaaaacaccatttcaggaaactgcctaaacagaaacccttcataggccttaggacacattgcaaggcagacaacctgctaaaacagtaaagcatgtcaaggcttcaaacttttgcgatacgactcttcgttaatgtgcaatctaagtgctgcacgtggaagatggtgttaggtkacccctagttagggttatgtgggcaaatacctgctttgtccctgagagatctcacatctctatataaggaacctgtacaccccctcataatatagagatcagaaagaggccagaggcccaactctatatccagtgtctcgtgtgtttcctctgtggtgtttataggaagggagacggattctatacatcttcttgtgcctctactgctgacgggagggaagggagcggatctggtgatccgtggtaacgtagttctcaacacgttatcagcacgctctacctcgacgttgctgcggctagatcagatctgcatcaactctccgtcaaaccgnnnnnnnnnnnnnnnnnnnnnnnnnnnnnnnnnnnnnnnnnnnnnnnnnnnnnnnnnnnnnnnnnnn

SEQ ID NO: 219 - DNA, 1697 bp, Zea mays
  misc_feature (1697)..(1697): n is a, c, g, or t
  Peptide Sequence Number=SeqID_8543
  Probeset Number=SeqID_14622
acaggaagcgcctcccctcccacactgcatgggcaaagctatctccctcctcctgccaccgcaaccagctcgaaagggcgagacggagatgatggagctgaggaagcgcccgaggccgcggcgcgtcgatcgggactacttctcgtccccgcatcccctgccgccgaggaagcgggcgcggaaggaggcagcggcgcagaagctggtcgaggccgccggggctgtgaagtggcagccgccgaggaagtggggcaagcgcgccgtggtaggcatcgggtgtcccgtcgcggggcttcatcctgcgacgtgcggccggcagccgccgctgcgcacgtcgactcgcgtcctcttccgcccgcgccttccattcaactggtacgagccggacctgtggacagaggtggccaagcacctctgcggcttcgacctgctacgcctctcctccacctgccgctggttccgccgcctcctcgccgacgactccatctggcactacgccttcttccgcgacctcaacctctccgacgccaacccgcgcgctcatcacccgctctgccggtcctggcgctacctctactttgccgcattcaatggctcccacgccttctcgttctgccagaacggcgagcaccgaagttcgtggcggatcgggtcgtttgtgctggacacgccgagcatggtgctgatcgggaagctgccgctgccgaagtggctgccgtcggatcccgaagatgtgcggctcaccatcgcgatactgggcgcctgcaagctccttaacgtccgccccgggatctggatcactgacatgcatgtgatgcgatgcaccttgtgcaaccgcaacggctgtcgagggaacaagcagatcctggacgcacgccactccgagctgttcctggagaaggcgtactgggatgagaccttggagtacgagagcctcggcgagcacttccaggacgaggaggtcgccgccgccttcagcgccgtcgtcaacgcgaagcaattcgcttctccgtccgcgacgatggatggactggtgaatcgtgatgacatggctggcgttggtgttgcctacttgcctttcagctgttctcaacatggcctgggccgggaagcgcgacgaccggatgaccaggcactgtgcatccacgaccgccgccgccatccacaccaacctccagggcaacggaggactgctctcgacgttcgaggcgatgcgggacacggccagggacgggcagatcgtgtccgccagcatctcccaggtgctcttctgattggaccctccaccgtagactggactggaccgatgctgcatcagcattgctgcacccaccaccgtagacgaatggcatgtttggtttcttagctaaggcaccacaatctgactaaccttagtcgctcgaattgaagaactaaggttagacagaaaagttaggcacattatggcgtcttagagagcaaaccaaacagccccttaatgcttccttggctgctgtgatttatgctgcctagacgtagactgtagagagaaagttgagctagtaatgccgtgcaattttcactgcgggaatgctggagcgagagagagcttgtgacgtgacaagtccttgatttcactatgcctgctataggacagactcgcaagttttggcgtcgacttttgtccatccgattaattattatgattgttcttgccn

SEQ ID NO: 220 - DNA, 608 bp, Zea mays
  Peptide Sequence Number=SeqID_8544
  Probeset Number=SeqID_14623
aggatgttataggctagctagcggtacaatggcagaggatagttttacgatattcaatggagttgggaaggggaggagccagtgctttttttggaaagggaggaaaaaggaaagtacttatcagagtgaggaaaagctatagtgtggttgttgggggccctatattgtcgaaagttctcaaaacattatggtacaaatcattttcaagcacgtttcagatgttccgaatctaccatgaaatcatttttgttcgaagcaatgtatgtaaaagaatgaagctaaagagcttcgactttgtgacagcgatgcgaaacaggaaacatgcgaatgcagagaagaaggatgtagaagcttgaccagcacatccgcaaagaagaaagacaatgttatccctacaagattacagtactcatatgtatagaaactgaaagtatgtctgtaattttatatgaagatgtactatgagtcaccactataagtagaggtacagtgacatgcatagatgaatcttcaggaggcgactgaaattattccaccttcaaagttgtgatatcttctatattagtattgttgtttctacctgtgaaggtacatatgtatttttttgt

SEQ ID NO: 221 - DNA, 764 bp, Zea mays
  misc_feature (764)..(764): n is a, c, g, or t
  Probeset Number=SeqID_14624
ggttgtatagttgcttacgcatggaagtgagcaagagataaggattttctcatctagtttgttaggcaagaaacgagggagtgagaggaacaaacttgtgtgcttcatgcgtgacacaggatgattatcgagggaaaagagatggtaagttgggattaatatacaaccatcgagggaaaaagatgggtagtttggaattaatatacgacgacaacaatgaggaggaagcacttatggcggttacatagttgattacgcacgcaaacgacaaggcgtaagcctatttttggaatataggaatttcacaggaatgatacaagaatttcacaggaattagtttaaaaacatataaaaaacaaggctcaagaaattatcttttgatctaaaggagtttgttagatgagaaacgagagagagaaataaacttgtgcacttcttgtgtgacggaggacaatcatctacgtaacgtcgaacgaacatcgaaactgatgctttatacaaatagaaatgttctatttgtgttggggacttgttctcaagtgctaagagttaagaacaaggcaacacagaaaatgttaatcgttatagtccttcgtcctccgaagcattatttcccttaggatataatgatttacggacgaaggttatgaaggacgtaccttcataaaatcattaaacggtgatgaaggtaaaaatgtaaaggatataaaagacaatatgaacgattatatattattatcaggcataaacagaaatattattgn

SEQ ID NO: 222 - DNA, 770 bp, Zea mays
  misc_feature (770)..(770): n is a, c, g, or t
  Peptide Sequence Number=SeqID_8672
  Probeset Number=SeqID_14625
ctcgatccctcctctcctgacgtggccaggtggcatcttcaaggcacccagcggcgcgcccaccaacgtcatttgcgccatctccaagctcggcgaatcctttgcctttgtcgacaagactgctattttatccatcgccggttaactcctagaacggttcctgcagctacaaatgcagaaatggttaattcagatttgacctccaaggaccaaatatcgtctttaccgcaaacagatgatagattagctgatggcattgagtacaaatcaggagaagatgtttcacatggaagagtgagctcttcagccgaagttggcacaagaaaccagatgtcatcaactaatgtctccaacttaacgatgccatcaaaggtaatgtcaacaccatctgctgcatcagtacaaccttcattgacaaccattgctgacaatgataatcaaagcaacgagtgggttgtacctacacaagtggtgaacatatctgggtgcacaacttggaccaggacaactgaacacaacaacttgaaggtgcttgttgctcatcaagggaagtgggaagtagcagcacatccaccttcactctcataataacgctgcttaggcgcagtcatgatttaatttgaagcttcttgtcaaaggatgtttgtttctaactagtcgtgcgcattggttaatttagttcatgttgttagggttgtcttcccattgctagcagattattaatgtcgattatgttttcttatcatgatatctatttatactttgttgcn

SEQ ID NO: 223 - DNA, 1837 bp, Zea mays
  misc_feature (1837)..(1837): n is a, c, g, or t
  Peptide Sequence Number=SeqID_8673
  Probeset Number=SeqID_14626
gccaggaaaggagtcagcgccgccccttcgatgcccccgtccccatgatggccgccacccccaccatctcacgtctagcgtcgcgaactcgcgatggcgggcgctgcccctcctcctccgtcgtcggcgtcgtgtggcacggacgctgcctacctgctgttccgcggggagaccctgctccccccgacggcgttcgcgcctccctctacaccgtcgctctcgcctacttcttcgtcgggctgtccacggtcgcggcccgcttcttcaaatccatggagcagatcatgaggcactcccgggaggtggtggtcggcgtggacccgcgcaccggggcgcccgtcgtgaggcgcggcaaggtgtggaactacaccgtcgcggacattgctctcctcgcgttcggcaccagcttccctaagatctccctcgccaccatcgacgccatccgtaacctcggtcaactcacagcaggaggtctaggtccaggcacactcatcggctctgtggtgtttgatctgtttctaatccacgctgtctgtgtggttatgccaagggcgggatcaaagaagatctcagacctgggtgtttggttagtcgagctcttctggtctttctgggcctatatctggctctatgtcatcttaaaggtgtggacgcctagagtgatcaccctctgggaggcatagctgacagtcctgcagtatgggctgcttctgctccatgcgtatgcgcaggataaacggtggccatttgtgttgatcccatttttcactagatcgggagaaaccagaacaggtgcgcaggacagattatctcaatggagctggtagcaccccacttcactatgctgcttgtcaagtatgtgccgcgatcagtgcgagaggtgagaggcctgaagattgggttccaccagaagatgtttctgctgtttattacgccaaatgtgatggcattgacgagacactccctatgggtgctgatgggaacgatgggattgtagacatcttctctgcacattcctactatgatgcagcagagtgcagtcaacttgcagaagaggatatggaaggatcgtcaacaatggatcaagttgtaaagaacacacaagagaacatgttctggctttctatttggtggcaacaatttgttgatgcttcaacggtaatttggttcgtcgttggtctctttatgtgtactgaatagcaagtcatttattgttgcatttggcaaggacattatttttttccctgctggcttcctgctctgcgagaagaagcaagtgacacaggtgcatgattttgcttgctgtcgcagatgcccctgatggcaagcttcagcaatcgtcaagtacaaagacatcctcccgtgcgaaattcaatttgccaaatcctaatctcttctatatagcctcacagatcgcagcgatggagccggatccggtcgccgctagggcatcctcctcgccgccgccttcaccagcgccggccacgtccccaccgtggcaaacacgagcaattgcgtataggttcagaaaggacaatctccatgttgtctgcgtaagtgtacaacatttctggtatccaccccatcctcatcacacaaaggccaaaagttatctaatgcagcagccttatacgagtcattcaaagcttatgaagaagactccaggagcaactttaagaaacaagaaagaaattatcagtgccgtgtgtcggtcatcaaacaacttttcttgaccgccaactccaagcgatgtaacagattattgtataattgcgccgttggaattgtgtctatggtctgtagcctgttcggcgtgactcaaaatataaacctttgn

SEQ ID NO: 224 - DNA, 570 bp, Zea mays
  Peptide Sequence Number=SeqID_8674
  Probeset Number=SeqID_14627
ctggaattgtgccaagaaaaccagctgcgcgtcctcgtcgtagcgagcctcgccatctggctgaggttctccatctggctggcctacctgggcagcgacgccgtgcccatctacgccctcgccaccctcttcaactcccaccggtgcgacaccggcagcagcagccgtgccggcgtggagttcctgtgggcgtcaatcatgttggtgcacctgggcggccaggacagcatcacggcctacaacatcgaagacaacgagctatggcgacggcatgtctttacagcggtgtctcagtaaaatatggatgttgggaccatgcttcgtcgccaaaggtcctgcaggaagaaatagcttcggctaaagttgcttatacatgatgaccgaagctaccactcatgaagcttcggtgttatagcatgtccgaagacgaaggatcgaaccgatttaaaaatagaatgaccttttagtccataagggtctgagtcatttttataaacttttataaggggcatgattgtaattccttacagactgtgtcctatgtctataaatagtgaacaatattccttt

SEQ ID NO: 225 - DNA, 1794 bp, Zea mays
  misc_feature (1)..(57): n is a, c, g, or t
  misc_feature (1794)..(1794): n is a, c, g, or t
  Peptide Sequence Number=SeqID_8675
  Probeset Number=SeqID_14628
nnnnnnnnnnnnnnnnnnnnnnnnnnnnnnnnnnnnnnnnnnnnnnnnnnnnnnnnngtagggcctaagcttttgctgatcacttcaagatggctctggactgtttcttcgctgtatggtttgttgtgggaaatgtgtgggtgttcgatggacattcttccgcccatgacgcacccaacctgtacaggtgtcggtgagaggtattcaagttggaattggaattgtaggttatagtccactagaagaggttttttttgtgcagtggagcaaaactagctgactcgctgtcagagcaagacttccgcaaggggaactcaaactattacctatatgtgcataatacatggttcaactatccttgcttttaaacatctccttgatctttgatacattttttggattttgctcaagtatttgacatatacaagggtcccatccacgatgcttggagcaaactgcttgatatatgcaaaatggaactatgcatatacgagcaaaatggaactatgcatagttccagttttctctgtctaaaataaccattaactgtagttgattaatgggcttgttcaagtacagtgacgagataattatttctctgtctaatcgtagttgctgaatcaataaggaaaaacgcaacagaccatgataataatgaggcattgttcctttaaacctttaccaataaatgtcgtgcgtgcctaaaatattgatcttgcattgattagaaaagcataatgtattcttaatttctatcttttcaaatttccagttatcagatttaatcacccctgcgtgttgtatactcgtataataggggttgcctcatgggaaacttggctgggccattgatgaggattttggttcgtttgaggcacttgtgtaaagaagatgaatgcagatggcgctgctttacaagggtctagatgggtggtatgtatattatgctttgtttatgtttatcgagaatagttgaaggtgtgttctgttgaccattaacctcatgcttctctaaagtggttagctttggataaagaggcaaaaaagctttcagttaaaactactaaaactacaactaatcaggtgaaacatgtcgtccatatctgtttgttcttcatatgatacaacatggctattcccaattatcattcttgaatcttgatcgaagtcgtgttagtgacaacttccctgtacctaggtgcccataggcaagcttaatagacacatgtcatctttcatgttgcaattgttgttccagaatgtgtccatctttaaaaggtaaggaattggttaggcttttacttccatggaattttttacttgctaaaatgggaacaagtggttggtgatgaaatgtagatctgctcctaaaaacttcgaagcaatcctgaggacatacatcagtaagtcattcattttgactgtgttgatatttgtagtatgcctttttggatagatggtgttgcattcctcttataaccatacttgctattttcttatatgattgaataaatatgattgtagtttactgttgttctcccgttatctgaatcttgactctaatcccttggtgagctcatatgggatataatgttgtagcattgagggtttcatcccaagttgtttacttcagtgctcgtgcatgtaccgaataaaactagaacagctattgactcatttcaccttttagatgattgtgtgtgtatgtcgtttcactttttattcatttgtgatccaatttggtgcatgtactgattgaatttgatccgtctgttaataaaatactaatgtttn

SEQ ID NO: 226 - DNA, 1005 bp, Zea mays
  misc_feature (1005)..(1005): n is a, c, g, or t
  Peptide Sequence Number=SeqID_8676
  Probeset Number=SeqID_14629
acctgcagctgccacagcgggtggtgcctggcttggcggcctagcatagctgcgctgcgcatgctagtgaccaatggcgtccaccaaggtgccactgttcctcgtcctcaacctcctgctcttcgcggcggccaacgcctgcccttactgcccgggcaacaatggccacggtagcagcgggcaccatggcggcagtgggcatggcggcggtggcagcggcggttccggtggcggcagcagcggcggagggtacggtccgatcggtggtggtggcagcggcggcggcggcggaggagggtacggtccgatcggtgacggtggcagcggcggtgggatcggagtcggacccatcggaggcggcagcggggggatcggacccataggaggtggcmscggtggtgggtacggtcccatcggtggaggtggaggtgggatcggtggcggtggcagcgacggcacgagcggctggtacggccattgcccgacgaacgcgctgaagctcggcgtgtgcgccaacgtgctggatctgatcaaggccaaggtcggcgtgccggtgaacgagccgtgctgcccgctgctgaacgggctcgtggagctcgaagccgccgtgtgcctctgcacggccatcaaggccaacgtgctggggctcaacctcaacatccctgtcaacctcagcctcgtcctcaacttctgcggcaagggcgtccccacgggcttcaagtgcctttaaccatgcatgcacattatatgtgtgcgcgcacgtacgtagtatccaaaagaccacgcaatgcgtgagtatgacgaagaatgcgcgcgtgctatggttgccggccggggatacggtgtttttgtgggaatcttgttagtttcgcttcttctagcattaatgtgtcagtgtagtatgtagccagggcttgcatgcatatgtgtccaagttcgactttgggttgcttgtacttctccatttcataactgaaatcatatttcagatttgagttaaaaggn

SEQ ID NO: 227 - DNA, 1696 bp, Zea mays
  misc_feature (1)..(1): n is a, c, g, or t
  Peptide Sequence Number=SeqID_8677
  Probeset Number=SeqID_14630
ncatgtgtccagctacaataatgttgtactgaataatcctttctgtttttgcttgggatgtgttgcttgcaggtgcccagaaactggcgcgcatccgtgagaacagcaacttcttcaggtcagagctcaagaagatgggctttgaggttcttggtgacaacgactctcctgtcatgcccataatgctctacaatccggccaagattcctgcgttttctcgggagtgctttagacaaaaggttattagtgctagagtttgtcgacgaaacactctgaagatccgaatagcaattgacagaattttttgtgctagctgcaggttgccgttatcactgtggcgtttcctgtgactcctctccttctcgcaagagcacgtttctgcatttcagcttcgcacactagggaggacctgtttcttgtctgtgcaacccccatatattaccaggttatcagcagagttggtgacctcgtgggcatcaagtacttccctgcacaacgaccaaagattgctgaagctggtcacggcaattgaggcggtagagaggaatgagcccatgatatggtggtagactggtagtattcctggccccacagcgtacccgccatcagccaagtaaaagttccccttctggtatttaagaccatttggacgagaaagagcatcatgtcatgcatgtgcagatccctccaaccagctaggacgtaggtggaccgaaggtcaaagtcaataacagctagtacattttgtgttgggtatgacttgcgacctctaaatctatccaccattttagcaagaacacatgccctgatgtgggtgtcatctagtgctcctaaacatccctatgtcagaaatagtaaaatagaagataatgtcattttttaaaataatttagctaagtatcaaatgcgccaacatatattaatttgatatacctcagagtaagggtaaaatcggtttagtatgctgataattttagcatgtgcagtagtctcacataaacaggttcacgggctaactctcccatggcaaatagcacaatattaaaatatctgctcaccatctcaccagacttccacatggaaaatcctacgcctgcattggtatgatgttgtccaacaatttcagaaacattgcaacttgctccgatcctctacgaagacatgaaaggtgtcccctaaaggccctctttgcctagggcgagcgcatagagtgtagccagtggcggaggacgccggaaaatttaggtgttgctaacgaagactaaaaatttatgacacggtttagaacttatagttataaaataagtaatagatgttgaaaaataccttatttaatagtaatcttgattgcaatccatttacaaccaaatgacatatagcgaataaaatctttgacttgatcattaacattttcaccattggcatcttcattattattctcttgaactccaacttgtatttcgggttcattgtaaactccactagcgcgagtgcttggtctacttccactagaagcttaactgaaatagctctttaaagttttttggtccatattctttgccttgtttttgtttatatccaagactgctatttagaaattggaaaatcgagtgcgaggctccgagcggctggaggctggagcgccggcaggagcggccggcggccgagcgggcagctgtgcgggacgcgcctctgc

SEQ ID NO: 228 - DNA, 1536 bp, Zea mays
  Peptide Sequence Number=SeqID_8678
  Probeset Number=SeqID_14631
aagccaccaacgtggtgcttgtaccaccagtgccgacctctctgcccgtccaaggggcccttgcagggtcgactcctgacgcctaccttattgtgatgccttccctggtgtttgtcttgagggagattctagtagccggagtgactccccctagcaaagcttcaacagtagacgaggcgactctggtcgtgctgccaccgccgccaacctcgggtgccgcagtgttggccgttcaatctaaggcggcgccacctctaatcaccacttcctctaccctagctaggctcgcggttcctttgccgccgagagagcgtcatgaggattgtccttctgccccctgctaaggcgccgagggtagatatggaggattggaggcaggtcgaattggcctcatctcggggtgatctgagcctcaggactatcgaggaaacgctcggtagcttcagggacacgatctcaattattcgggcattgatgacacgtgatttttatccctttcggccaggtgtacgctgctttgtagtcattcattcttcttttctttctcaccattgtttaatctaactaccgagtttacctttcgtagagtcttttcacgcggttgatggccaaagcagaggtgctattggccatccagcgggaggcggagtagctctatgtgttagccgcgcactctgaagcaaaacaatgtgagcgtgccgagctccgttctaggaccgaatggcttgaaagcgaggtggccaaggtacgctatgagggcgaagagtcccgggtcaaaacctatcgcctctgcgaggagatccagctctagggggccctctgtgaggtgagcctttgagctaaggaggtcaagtcatccctcggtgaggccaacatccacctagagagggtggatgccgagctctcacgggagcacgacgccacttgagaacttcggaagatgtttcatcaagccgatgaggctaagaaaatagtggaagaggcaaaaacagtggcagaggacaagatatgagagcttttgcttgtgcatgatggtgtcatcgctgcaaaggccgagtcgacagctgcgctctctgagcggagcaccgagctcaaagagtatctcctgatcattggcatggtgtctgctcaccattcgccctcgcctctaatcaaggtgtccttggtcgaccggcttgggcactacctagccacatggagcacatagtcgtcgagggcgcatttcacgagagtggtctagctctggggcagatggtctctcactttcatgagatcgatgctaccatgatcgccgaaggtttcgtcgcagaccagacagactaggaactggacaccattgaagatcaggtccaccctcaaactcaattgatcaccgaaggggttgacgtgaagaccctgatgactggctcttggagcctggcaccacctgctgatgaccctcctccaggcgcttagacgtcctttttatttatgcgccttctgtaacaaaatctctggactgacaagattcatgtgtggtatattactcctgctccc

SEQ ID NO: 229 - DNA, 1722 bp, Zea mays
  misc_feature (1722)..(1722): n is a, c, g, or t
  Probeset Number=SeqID_14632
aaaaacaactcttccttcgttcagtgtcgaactatcgatgcggccggcccgcgcggcgtcgcgtgggggatgggcgttatacgagctgtacaggacaacgagccgcgtggcggcgccggcagtgctattgtggcggcgactgcaagggctggagcacccgacgcggtggccggagcggctaggacggccgtccgcggcgcggcctcggccgggctctccgctcgtgtggtttcatgccgtatcccttggcgagggaatggccgcgcttcccattgttcgccactgcgtccgcctccgtcccggcctccccgtgcttttcaccaccaccaccctctcctcgtccgaagttatcatggatctactccctgatggtgtcatatatcagatagttttattggatactggaagccaagtttggtacttcttctggaaagtgaactctggccaaacctcatcatgtctgcagcagcaaaagggattgcagtggctcttttaaatgcacgcatatcattgaaatccttcaaccactggtcgatgcctctaatgttcccattagtttctttgatgctctctaaactatcacttgttgtcccattgagtactattcaggctgttcgttttcagctgctacatacaccaccaggaatcatacattttgctggagatttaaaatatggtatactcaagttttgtctagtctttcctgagaatagattttaagtgatcatatgagtgatttagttttaaagattgtcttgggagcttgaaagataaccaggtttacaaatcaaatgatttattagatgattcatgtaattcacatagctgttggagatgttaataccggggagaatcaggtcaacgaaataaaagatttgcaacggcagtttagcaataggcccctctggatggctgcttctattcacagaggtgaagaagaagtcatcctccgcattcatgaagagttggtcaacgtgtatcccgttctactactaattcttgtgccaagacatcctgaagactgtaagaatatttccttggcactaaagaaacagaaggtcaattttgtgctgaggtcaactagggaagtggtctcttcaatcactagggtatatatggttgatactttaggggaattaagaatgctttacagggtcaccccaattgcagttgttggtggttcatttctacctggcttagccggccataatttttctgaggctgctgccgctggttgtgctgttatgactgagtgaactctggcatgcaggaccccacgttggacacttctaccatatgctggtcgaaatgtggcaaataaatcctttagctgtcaagcaggtgtcaggagaatttgaactgctgcaaacactaaaagaactgcttggtgatgccagcactctgggagcacgtcaaagagctgcaaaagatgcattttcgattatgtcagatggagttgtgaaccgtgtatgggatttagtctgcaggttgggcattgattctcaaacaaatacgttgagcagttgacttagctgaggcttattcttgtaatctctgtgggactgtaggagtggaaatgcacagggagactgaaaccagaaaccggcgattgtggcatgctggcgacctggtgagtggtgacaaaggactaagctcacatgatagaacatatatccacgtcatttgctcgacttgctcctgtcggaaatttagatatattcn

SEQ ID NO: 230 - DNA, 515 bp, Zea mays
  Peptide Sequence Number=SeqID_8679
  Probeset Number=SeqID_14633
atcggcaccgcacccacgcccctggaagcgccccgaaggcatcaccaccgaagcgccggcgtgcggaacagaggaaaatcgccgccacaaaacttcatccacaacgttgctcggcatgcgggatcgaaccagggtgctgcaccgagccatacggggacgttcgcgccgtttcctggcgagatcgacgaccttgaggctggtaatcgctcatcgcagtgattccatcgccgtatagctactcgcggtcgtggctgggggtctatagcgcgtcaatcgccgacgagcaagtgaccgaggaacccgaagcaccgcaagttgaagattctgagcaggagctcgcagaaagcaagttatgtactttatcactttcttttacctaataatatcatgttaatcaccgtggcacggttaggttaagctgatgagacctaataggttccctagtttgtttaccctacaccttgcaaaccaatgaatcattgactagtcttgctattgctctacctgattttggg

SEQ ID NO: 231 - DNA, 659 bp, Zea mays
  misc_feature (659)..(659): n is a, c, g, or t
  Probeset Number=SeqID_14634
gttagttcttttcgttgcctatagccgtcgcaaccgcgactagtcttccccaacccctcggcgtgcctcctccatgtcccctccccctctttctccattccctagccatcgaagctgcggctcgcggccagctcgacgtggtggccctcagcccgccagcgtggtcggctcatggccgatggctccactccccccacgcgccctcatccctagccttggtggtggcggcgcagcccggtgtggcttcccagcccacggtggcttacagccagccgacacggctcactactcgtctagcatggacgagcggcacatcctgtaggagatctcgcccatggtgagcgcgacaggtgagtccctcagcacggccggccagccagatctcccccacccccgcgcgagaagcttccttacagtcatgtccatccctgmaggcccgtttctcagggaggaagaagaagtggtctcatttgatcccaccaattgtgttttcctgcgtccgtggcccatatggccctgtgtatggcttgtttcggccaataaagacgtgccacgttgctcaaattcagcggaattgtgttttcctgcgtccgtggcccatatggccctgtgtatggcttgtttcggccaataaagacgtgccacagttgctcaaattn

SEQ ID NO: 232 - DNA, 772 bp, Zea mays
  misc_feature (772)..(772): n is a, c, g, or t
  Peptide Sequence Number=SeqID_8680
  Probeset Number=SeqID_14635
atcgagtcgatacttccatacaccaagccaccatcctcgacatagagggagagaagagagggtttcgccgcgtcgtcgcttcaagcttccgtcgccatccacaattaagaaggagggccgaggaagatggctagaaggatttgccagggagtgcggagtcgtgtgtagggcttgatcgagtgcaagggacatccagggcagaggcgcacctcgccggagtccatggtttgtagtcgatctgcgtcgagtcgtggatggggctcccgtctctcttagcaatggtgagccatccctctattgtgttcgcttttgtctctgctccctgttgtgtatagtaaccgtcagactagagccctagatcattggtgggccgagcgccgatgacagcaccactgaagtttacatcgtctgctgtgtccaagcgttggatgaagaagaagcacgatcatccattgattatgtagtggacaactccgattagaagtcctcgtaccccttcggtgggagtgaatctgggccttcgatcaagatccagcggctcagggctgagctccttatgcarccaagccaatttcttaaaagaacccatatcctattttgttttgctttgtagtcagggccggtcctggaggggggcaagtggagcggtcgcaccgggcctccggttttggaagggccccaagtaatgtacatgtatatataatcttagatgttgtgtctagtatggctgtttcacttgcctcttttcacaggacagttctaacgttgaggn

SEQ ID NO: 233 - DNA, 1160 bp, Zea mays
  misc_feature (1160)..(1160): n is a, c, g, or t
  Probeset Number=SeqID_14636
gcgcgggcaatggggtggttgaagaagaggaggacgacgacgatgatttcatcacgaatgaggtgaagcggaggctcaaggagctcaggaagaacagcttcatggtgctcatccccgaggacgagtgcgccgaggtcgaggaggatggcgacgaggaggaagggggcagccccacggagtggctggagtcgggtgtcggtgacggcttcccgctgtgtgggttggattcactgtatgataagtactgcgagagtatgctggtgtttcataagatgatcgcacagctcatgaaggatccagagtcactgaacatgtccaaaaagtctccaagatcagcatcaaaattggcgtctaccctgcgcaacctctcattcaaaagaaaagatgagctcccggaggattgtgaacaacttcaacaacagcaaagcggatatgatccttaccagacacttgagactgcatatgttgctcatattgcattaagctgggaggctctgcattgcacctatgtgcacctgagccttatcgttgcagcacaacctgataatcctacaacctataattctgctgctcaagcattccagcaattccaggtcctgctgcagagattcattgaaaatgagccatttgagcatggtacccgtgttgagatatatgcacggtctcggagcttgttgtcaaagttgcttcaggtccccacttttcaagcattcaaagccatggaattgaaatgtgtccaataccaaaactaggtgggaattgagcttaaatccaatgctagtgtttgggtggcatgagacgctgtttccaacgaatatggagggtcttggctcggaatcgtcgcaacgctgtgctcgttgggctgaataccacacgaaaacggaggaagtttctgaataacaaattcaaccaaacactggatttgggtctgccatttccatttccaaattttggccctgaatactgacatccaatcaaatggggtgtaagtgtagtgcagattacacctatggctattctaatttatgtgctgtactagcctagtactacaataaataggttcaattactgaatgctgcatatttcacgtggtacaatccaattcaatctgctgtacattggcattattaaggagcattcaacagtggtgtactgtgttn

SEQ ID NO: 234 - DNA, 1407 bp, Zea mays
  misc_feature (1407)..(1407): n is a, c, g, or t
  Peptide Sequence Number=SeqID_8681
  Probeset Number=SeqID_14637
agaaaaaccccgtcggcccccgaccaccccatgcagttgaatcaagctccacctccccgacaccaccacacatcgtcgtttgttcgtgttcatcgcgccccacctccgccgcacccaagccaagccaaacctcggtggggagcgtgtctccgtcaatcaatcaagcgcatggccaccgttcccagcaacaccctcgtcaaggtggcggagctcgtgtcgacgcactcctcgccagagtcggtctatggcgcaggtcatggggtggaagccgatgctcgcgcttgcgctcatgtacctgaggaagcaccacacggggtgcctgttctcggtcgaggtcgatgctactcgtggcgtgccggcctccatggaggggttccgcctcgctgtctgtgcacaaggtggagactagggatggcttagtgcagaccccgccgtgctgggtatgcgacgtcaccacggacttcgacgagtcgctctttgtcaaattccccctcccctcgtgctctctggatcggactgtggtggcttggactgttccccttgcagtgttgtctcggagggaggaacaagaccattgcagctgtgttgaccgttgagttacccacgatcgtctccacatgtcctattcctgttcaaggaggagtgcggtgagccagtacccggtgacgccgttgcggaccctgctcgacaagctcttcagtggcgacagcccctacgtgggcttccctcctgagcacacgacaaccgccagatatccaattcatcattatgttgtggtcatggcaaagtcgggagaaccatatttcgaccaaagcaagcagaggcaggggtgtgaggagcagatggattacgatggctgcagtggggaggaagcmtgaggtacgtggtgggggcagwtcggaggaggccgaccacgggtgcgagtaggtggagcacagtgagaaaaggaagaggcggaggagsccggggcgtgagggagaggttgtggacgcttgacgcgtgtcgcgacgtgaatcgtggcggcaccgtgaagctcggagagcacaacaaaacagtcgtcttttaataattctgatatacgagtcttcaattgcacaagctaactaatgttccacagagatatggggaatgatctgcatggtcgtcactgctcgaatcgtgatgccaagggcaacggtgaggctttcagcaggccgaatatggttctccatgccagatcaagcactctgcttccttggtggggccaactcaatctttgctaacgagaaacttctcacaaccgcgaacaacgactttgacgtggaccaggcgatgtttacattctgttcacctatatatgcctatgctatttattgactcaatcattgtagcaaaaaattatattgcactagcaaatatgatgttttn

SEQ ID NO: 235 - DNA, 1500 bp, Zea mays
  Peptide Sequence Number=SeqID_8682
  Probeset Number=SeqID_14638
agcctactgtattatagattatatgattctagcaaacaatcagctctttgtgatttaatcaagaatggtacaacattggaatgatcaggtcaaaaaaggagtcacatgtgcaaatgaatcgtcattgtcctcttgactgtgagaggcatttggagctgaaatattggtaccacgaccaccggtggcaccatgcccacttgaggaggaagcaccaataggtcgaggtataccacgtccatgagaggaggtgctccatgctgcacaaccacttctaggaccctcgctggtcgttcgtggaactctgaggcctctgcctgtaacaccacgaccaataccagctgatcaagaatgactacgacccctgtgaccatcatgaactggagtagcatggtagttagcaatgaactgggactgacgaaggtcttgaaatgatgtaatgttctagaactccacgtcgctggagttgaggtccaacctgtccattctaccagatcgtggagaagcgataaatcgctccctatgacttagcgtcatttcatctgagaagagacccttgttaccacgattagagggcgacctgataggggttgtgtggtactcagcctcgttggaataaaaaaacatggctgcaattagagacaaaacagttaataatgaacaagtatatagaaacaagtaaaagaaatcccaattgtttgcccttttccatagtgaaacaagccaaattgaacatttagtttaagtgtagagctcacacatgcaataggacatgagatacctagaattttgagatatcgtcatctctatgtacccattatattcctcgaagggatgtgtattaatgtatctttggaatagttggaattactatgataaaacacaaatttcacattcaacaaaaagaaatagaaattgagcatcgaaggacaaaaaataggactgcaagatgtgaaacaattagtgtttcgggtcaatcgcaaataggtccattaacctctactgattgctccttttgttggatagatccacacacatatgtgctactccaacttcaacgacatcatccactccattgacatggacgccgatgtgatcaccatccagaactcccagtctgatgagaagatacggagctgaaatacagaactaaaatatggagccaaaataggacgcgagggtgtaaattacggagctggcattagccctggactctacgctatccactctcttaggatcccctccaccgaggagatcgaggaccgcatcgacaagatgcttgtcgtgctcgacaccaacatcctctgggtgaacccctcactgagctagagcggcaatctgatacagctatacacgcaatctaatatagctacacagttgatctgttcgcaccttatgtaccggtagcttacggtgatagcgcaggggactagcatcgttgtagggatccagcagttgcggcgaagtccaatggcggcggaggggatcagtggccgcgacagt

SEQ ID NO: 236 - DNA, 1311 bp, Zea mays
  misc_feature (1309)..(1311): n is a, c, g, or t
  Peptide Sequence Number=SeqID_8683
  Probeset Number=SeqID_14639
agcaatataactaactgcacacacgcacaagctagtcaaacttgcagctgaggaatcgatcgcatcggtatcttgacgtgttcgttgcccaatctatagctactaatccccgctagctcttgagcgatcgtcgtagctagccgcccgccttcgatcgatgggtgcaccggcgccgtccgtcaccgtggtcgccgcggtggtggtttgcctgtgcggcgcctttgcgcgcgcgcaggacatggacaacgagtggcagcggcccgccgtaccgcggcttcttcggcggccccgggtcgctcctgccgcagtcggacgtggacctgctggagttcccgctgaacctggagtacctggagacggagttcttctgctgggccgctctggggtacggcctggacgccatcgacgccaacctcaccggcggcgggccgccatccatcggcggccagtccgcctccctcaccccgttcatccgcgacgtcgccacccagttttgctaccaagaagtcgggcacctcagggcaatcaagcagacggtgaggggcttcccgcggccgttgctggacatcagcgcggccaacttcggcaagatcatcgagcaggcgctgaacgcgacgctggacccgcccttcaacccctacgagaacagcgtcaacttcctcgtcgcctcctacatcatcccctacgtcggcctcaccggctacgtcggcgccaaccccaggctcttcacccctcaggccagaaagctgctggcggggctgctggcggtggagtcagcgcaggacgcggtgatccgaacgctgctgtacgagcgcgggatggcgcgtgtggcgggctacgccgtcggggtggcggaggtcaccgcgcacatctcggacctcaggaactcgctggggaggaggggcgtcaaggacgagggcctggtggtggcggccgagctggggcccgaggggctcaccgtggggaatgtcatcgccggtgaccacctctcgctcgcctacgaccgcacgcccgaggagatcctcggcatcgtctacggcaccggcaaccccgctcagcacggcgggttctttccccagggcgccgacggccgcattgcccggggactcctcgcgtagcgcatgggcgagtagcgaccgtgtgcgctgagcagcacggggggtaaagttgttcctgctgcacggcacaggctgtagactagtactagtactttacgtgtttgtatgttggcaactttggcgcatgtagttgtgtggtgactggtgagtgtgtaaactggatgatataaatgaatgttggtggaaataannn

SEQ ID NO: 237 - DNA, 1452 bp, Zea mays
  Peptide Sequence Number=SeqID_8684
  Probeset Number=SeqID_14640
acgaccctcaccttccaatactatcattgcacggtcacacttcaagagattagcccttctccttcgttgctctcagaagttttagctgactaggtgtttaagtgggagcgtggcaatgacatatgggcatgtgctttagtgttttcaccagtatgtccgtctgatatggcaattcctaaggaagcggaccatcttcttcatcagtttgttgacatttttgcatcccctactgctctacctccccataggagctacgatcactacattcccctaatccctagagcggcaccagtgaactccaagccatattgatattctctattgcacaaagatgagatcgagaaataggttaaagttttattggatcaaggctagattgttcatagcactagtccatttgcctccccagtgcttcttgttcaaaagaagaacggtagttggcgtttgtgtgtggattaccgtagattaaatgctctcaccatcaaaaatcgctttcatataccacttgtggaggatattttgcatgaattggctagtacaaaatactttaccgaacttgccttgacagttggctaccatcaagtgaggatggctccaaaggatgaacacacgactgcctttaagacgcatcacgatcattaccagttcaaagtgatgtcgttcggtctctctaatgcgcctgcaacattccagtgcattatggacgatattttgagtcccttcttacgcaaattagtattggtgttcatggacaacattttagtatatagcccttctctagaacttcatctaacacacttgcaggcagttttttcatcagcttagggttcaccatttttatctcaaaccttccaagtgttaaattgctcagcttcagattgagtatctagggcatgtcatttctgtagcaggggtggccactgacccaacctaagctaaggtgatgcagcattggcctactcccacttccatctctgcctaaagacttgttcggttatttttaatccatatggattggaggggattgatacggattgggmgagattatgacttactagggattgaaaccccctcaatccctytcaatccatatggattggggtagaaccgaacaaacccttaaggggattttgggggcttataggatactatcgcatgtttattagagattatggcatcattgcgagaccccttaccttgctgctgtgcaagaatgcattcttatggtctccacaagctgaaacttcttttcttcacattaaaagggctatgcagcagacaccagttttagctcttcctgattttcaatgcccatttgtggtggaaaccaacacgtatgatctcgatgtgggcgctattttgatgcaacatgacaagcctatagactttttgagtaatgccttgagtgagaagcatagacatatatccatctacgagaaagagtttcacgcc

SEQ ID NO: 238 - DNA, 1160 bp, Zea mays
  misc_feature (1152)..(1160): n is a, c, g, or t
  Peptide Sequence Number=SeqID_8685
  Probeset Number=SeqID_14641
accgcgaccactcacttcatggacgaagctgccgcctcgcaacaacaacagcagcagctcatgtaccagtcgcagcagcaaatggccaccatggagatggagggttgtaccacaacatcagctccggtggcatggaggcacggtgcgaccgttggcgctggtaacagcctgatccgccagagcagctcccccgccggcttcctcaccaacgatggagatcggcgtgcgtggtggggaagcacccccaagattcgaccagctttcatcattggaccgtgcaggcgcgacgcggagggtgaggacgtcgggggtggccatggcgtagtggatccattgatggagcgaggcgtgcacggagggatcattttgatagcgccatgccaggtgcgaccgcgcccctcaccttccatcgacgatttgcggcgggcatggtggggacgcgagacatggggcgtgcgcggcgtggtgggggaggatgtcggggtgggacagaatggaggagtcacatccccaactttgtagggtacttcaagcttggtctgatgcatcaaagatgatatctgaacttgattgtttggctgtcatcacatttgttggagcatctgatatggctgaaacagagttatctttgaaagtcgtgtggaatgtgattcatccaaagtctggttcaaatgtgggaaatgttcgaaaacctaggcctcctgtgttagcagctgctgtatctacatggacttttctcctgactactattggttcatggaggataaataaaaatagctggaaagagcgcattgcatttctgtctactcttttggaagcagatgatcgtgctgttcgaatggctgctggtgaagcattggctttgtgctttgagttaaatctgcttgatgtttcttctcgtgaggatgatgatgttaacacaggaggaacaactggttctaagaacaagcttttcttggatatgcaagcattaaaagccaaaatatcaggtcaccatagaatgttctgggctcttcaaaggccaaatcagggagctctctgcttcctgtgtatgcttgcttttccagtattccctgttattctactatgaaatcatccatcgtgccacaaagaactgatggttcctgatgtcaagaaagctgtccgagttgnnnnnnnnn

SEQ ID NO: 239 - DNA, 934 bp, Zea mays
  misc_feature (859)..(934): n is a, c, g, or t
  Peptide Sequence Number=SeqID_8813
  Probeset Number=SeqID_14642
atcaatccctaatctcggcggatggctccttccttccccgcgctcgctcccacggcgaccgagctccaaaacaacgccgccgccagatccgcccgccaccggccgtcctcagctcatgccggctgcaccaagccagatccaaccccgcaccctcctccagcaccaccagctcgccctcctgtgtcccagctcccatcgccaccgcccccaccaccaccgccggcccgcccttccgacccagctgtaagccgtgcgccggcggccccccgccctaccaagagggtgaggtttgcattcactacaagcaccatgccgccccgcattcaccacccctcccccgtatcccgcagccataatgccacccccgccccgatagctggtttgaagcccccctggaagctacgaccgcattgaagatgaggatcttgaaggatggacgacgattcggtgcaggcgtggacgcgtcacccgcgtaggcctaggccgcgccccagcggcgcctcgcctgctctcagctcaagcccctagccgtcttatgcctcgtgtgaagatgctagagaagacaaaaggcaagcgctgatgatcctgcaagtggtaatgaatagagagcctataaagcgcctttctggcgcacaatctgaagctgcaaagcaaacgcaatgctgccgtcgggagattggaactacaatatctttgcatctctagctagtggatgttcctttggactgatgactttgccgtagaggttagccgtcactcgtcactggacagtgcgtttgctgctatatcaagaggttcttcttttttttaagcttggtttcaatgtatacaaagtttcgtttaaggaccctttgctacnnnnnnnnnnnnnnnnnnnnnnnnnnnnnnnnnnnnnnnnnnnnnnnnnnnnnnnnnnnnnnnnnnnnnnnnnnnn

SEQ ID NO: 240 - DNA, 1352 bp, Zea mays
  misc_feature (1350)..(1352): n is a, c, g, or t
ttggcggctagggttcccaaccaatgcgcctccctagcctccgtcctccaccttcctagatcccctcctccacttgaagcgttcgtgccggcgtgtggaaggaggacacgaaggcgactctggggacgacggcctgtgcggcccggcgtagtcttcctagccccggcaaccgggctcagaggttcggttcgagcagagatcgtcgaagcggagacctagagtcgaagcgaccccaaatcgccgtcgggccttcgtcttggcggacgatggactcaagattcgtcagggccagaggaggacgccagcaccagatccagcaagacctaactcagaggaaggagcgatcaagcgcagccgtcagatagacgacgacgaggacgagtctgcgtcttcgcctactcccccgccgaacgtgggtgccggcgcgctatgggtggcaacattttggcaggctgtagcatagcagtggcggaggaccacatctgggagatgcgaagtggagcacgctgcgccactcaacatcgagatccgcttcttgggtcggccattcgacagcgccgcgcctggtagacccgggcaacagcattgtgcttcgtggtgctatagtggccgctggagacccgtcgacggggagccccccatgaccctctatcggctccaccgatgccatgagagcgcaagaaggctgacccctatgactgcgaggagggccatggtggcgagctgctaggcctcctatgatagtgcgacgtgcagtccttcgtccaccccggcgagaacgccatggggcaacatggatgcgaggagtagagtgcctcgatggcgaggcaggttcatccagacaagaagaaaccacgatggaatctagatttcccctctatccgatggaatccggatttggtgccagtccattttcctgtgattttgggataccagcccaattccccttcatggaaggtatgcgttggtgttggtcggcacactggaatggaacagatataggtagaaccttcagatcgacgacgcatcgggaaggagccaacgattgacccatcgccagatcccctttcatttttccttcacccaaggcttacgcagacctgttttaacaagagtcgggcagcgatgtttccatttcggaccatgacctagctaaaggctaatggttccaagtgtctgaagtaccgaaaacagggctagctcctcttttttttgtcatgtcaaaaaatcgtgtatgattgcaacaatattggcaaaatatcgttgtactttatattttgatatactgtgaacaaaacaagtgccctctgagaccatcgtgatttatgcattttcaaactaaattttacnnn

SEQ ID NO: 241 - DNA, 1352 bp, Zea mays; identical to SEQ ID NO: 240
  misc_feature (1350)..(1352): n is a, c, g, or t
  Peptide Sequence Number=SeqID_8814
  Probeset Number=SeqID_14643
  Probeset Number=SeqID_14644

SEQ ID NO: 242 - DNA, 1314 bp, Zea mays
  misc_feature (1314)..(1314): n is a, c, g, or t
  Probeset Number=SeqID_14645
gcagcacaagctccgcatcgatgataattatgaagctatctatcgtggtcaagtttagtggttcgtctcgagacattggagtcacccaatttaacccagccaaccatcctcatcatataagccagtagttttttctatacgagagtttgtttagagatgagcagtttaatactgatcaaatgcacttcaatgtgtatcattcaaatatgtatcgtacacactgtcgccagtattctagaaccatcttgagtagtggtttcttattgatccaaaaatataaccccttatcacgctaccgccatccccaccactgccgtctgacccaccggttaccctagccaaacccctccaacgtgcatcccctaccttatgtcagcatcacatatgtaggattcaatttctgtgttcttcctatggcgccgcatgagttagctaccctcttgcaaaatatataaattagattagattaatttttttcactttcgtcatgataaccagatcgagatccatctaattcgttgcaatatcttatcatcaaactaaaaatgatcatggccagtgatgaggtgtgaacttgcatgcatttgtcacaacatgtggcggagtaagagcaagacattacttttcaactccatcaccactcctaccacggtataagtgaggacaaaaataaggcatcgaagaacctatacaacgataaagttgacatgacgaccgccgaggaggagatcaacgagtagacactattcatttgagtcggacaatgaagtagcatcgtgtcatcaccatcacaaggcggtggcggtgcgtcactaccggaatccgggactttgccgagtgccggacgctttgccgagtgccttttgtcgggcactcggcaaaggtggctttgccgagagtcgcactcggcgaaatcctgctctcgataacgagctggtttaccgagtgcaagacactcgacacaggcaaactctcggcaaagacatgtttgccgagtgtcaaacactcggcaaaggtggcgcttggcaaagagccgtcagcggccgtcctaaagctgacggccgtcagcctttgccgagggtcggcactcggcaaagaggcttctttgccgagtgccaaatatttagcactcggcaaagaactctttaccgagagtgtcttctctcgacattcggcaaatcatatttttattttttagattttgtccaccaaactttttgtggtatgttcctacactatgtagacctacatgtatcatttgtggacaattataacagagttttcaatcgttagtagatttagttcgtttatttn

SEQ ID NO: 243 - DNA, 431 bp, Zea mays
  Peptide Sequence Number=SeqID_8815
  Probeset Number=SeqID_14646
aacaaccccccgacccgtcacctgacccagccgatcgagaatacccggaaggccggaacccacctgctgcgcacctgcaagcctcgagtggagctcttccacggccgcggtggagatggcggcgaatctggaggacgtgccgtcactggatctgatgcacgagctgctccgccgcatgaagtgcagctccaagcccgacaagcgcctcatcctcatcggtccacctgggtgccggtggttggttcgggtcgccttttttgtttcagcagctgctgcgttgcgcgcagtgcgtgagatttggtttggtttcgttcccctgcaatgtaatcatgtcgtgactctcaagggattattccggctctgctcttatggtctctgttttctatttaatgattgttattaccatgtagcagtaaccatcgtcatcagtc

SEQ ID NO: 244 - DNA, 1263 bp, Zea mays
  misc_feature (1263)..(1263): n is a, c, g, or t
  Peptide Sequence Number=SeqID_8816
  Probeset Number=SeqID_14647
atcctcaagtcatcagctagctagccttccctacagcaactgcatacatacaacacttccatctgcccgctcgtcttcgatcaattcccaagtcaaataatataacagcaatggtggttcccgtgatcgacttctccaagctggacggcgctgagagggccgaaaccctggcgcagatcgccaatggctgcgaggagtggggattcttccagctcgtgaaccacggcatcccgctggagctgctcgagcgcgtcaagaaggtgtgctccgacagctaccgcctccgggaggccgggttcaaggcgtcggagccggtgcgcacgctggaggcgctcgtcgacgcggagcggcgcggtgaggtggtggcgccggtggacgacctggactgggaggacatcttctacattcatgacggatgccagtggccgtccgacccgccggcgttcaaggagaccatgcgcgagtaccgcgccgagctgaggaagctcgccgagcgagtcatggaggccatggacgagaacctcggcctcgccaggggcaccatcaaggacgccttcaccggcggcagccggcacgagcccttcttcggcaccaaggtcagccactacccgccgtgcccacgcccggacctcatcacgggcctgcgcgcgcacaccgacgccggcggcgtcatcctcctgttccaggacgacaaggtcggtggcctggaggtgctcaaggacggcgagtgggccgacgtacagccgctcgagggcgccatcgtcgtcaacaccggcgaccagatcgaggtgctcagcaacgggcggtaccgcagcgcctggcaccgcgtgctgcccatgcgccgacggcaatcgccgctccatcgcatccttctacaacccggccaaccgaagccaccatctcgccggcggcggtgcaggtcagcggcggtgacgcgtatcccaagtacttgttcggcgattacatggacgtgtacgtcaagcagaagttccaggccaaggagcctaggttcgaagccgtcaagacgggggcgccaaagtcatctccagcggcataaataaatagggaaaacaattattgaatgcattattaaaagtagtaataagtttgttaaatataaactagctcgaccggattgcaccgtccgatctggacttcctctagttattggaagcttatatatatatatatatatagccagttgccagtgctttgactatggatctaaatatattatataaataggtattgtcatatttatcn

SEQ ID NO: 245 - DNA, 1172 bp, Zea mays
  misc_feature (1172)..(1172): n is a, c, g, or t
  Peptide Sequence Number=SeqID_8817
  Probeset Number=SeqID_14648
aactcggtgcgaaaccacaccacccatcgccaccaccaatcaatccatcacgttagctgcacctgcgcctctccttgaggtcgcgcagccagcaatggcgtgctccaaagcggtgctgctcgccgcgctcctagccgtcgcaggagcgctctcctccgctgcggtgtgggaggactacgaccaccacatgtaccacaagtgctacaggtcctgcatgaggaagtgcgacgacgacgatgccgatgatgccttgaagaatagcatcagccccgttgtcacctctgtgtccgatgatcacgaccatgacgacgatcacgaccaccacgatgatcacaaccacgaccacgacgaccaccatgatgatcacgaccacgaccaccatcacgatgatcacgaccacgaccatgatgatcacgaccacgaccataatgacaaccacggcgaacaccatgacgacgacgatgaggatgacgattacaactattgccgggtggagtgcatcgaggactgcatcgactacgtgcccggcatttgttaccgccactgcgtctcctactcctgcctctacctgccaccgtatagctaccggagagcagcttgcttccggcgatgcggccacagatgctatcaccatgaccatcatcgtcatcaccaccatcaccaccaccaccatgaagatgaccatgacgatgacgataacgatgaccaccacgatggcccaacgccaagcccacctaaacctgaacccaagccgcaaccaccaaagccagggccgacgcccaagccgccgatgcctagtccaacgccagagccaccgcccccatacaacagaagccaagtacacgccgaaactgccgcaaaagccgtcttcgtctagtacaccacgcaccgatgccgcccaatactctgcagtcaccaccaaaacaggcatcgtccactgaaccgaggaaccaaaactagcactggcacctcaagctacccacaacagttgatggataactcataactcattcatgcatgattagaatacacgaggattatctagctcaactggtagatgtagtctgtagattgggcataaataaatctgatataataagcctagttctatagatccatgtctgcatgatgtacttactgatcgaatggccataatatagtgtaagaattcn

SEQ ID NO: 246 - DNA, 1282 bp, Zea mays
  misc_feature (1)..(2): n is a, c, g, or t
  misc_feature (1282)..(1282): n is a, c, g, or t
  Probeset Number=SeqID_14649
nnggtcatttcctcgcgttgcatcctgcttcctgttctgcgcgccggtcgtctctttcccatggcgctaggtcttgttcggtgctcctctctgccagccggttctctctccctcaagctcaccgtggagcgctccctgctcctccgctgtctgctcaccccggcttctcgcctcatccatcgccgagcgcccagcccgctctccttcgctcctccctgaagctttcatccatggcagccggcgctcgacggctcgcgctcaagctcctcccctgcgctcgccggcaacctgcatcttctccggctcgccggcgttttacccctgtgcgcgcgctcagctcggcgttcccttccccagctccaatcttctctgccgagcccctccgtggtcgcgtcccggccaagctccggctcggatcggtcttcagctctccctgcgcgcgttctccttcgtcctggccccttcctgcgcgcgcaaaaatatttttcccagccgattctgctgtttgcttccctgcgcgtcgtgctcctctgctctctgtcggcgcgcgctgtgctcgacgtcctcctatggcgctcgatgctcctctgttggccgcgccgtggagcctgcgcgctcggtcctgcccatttcgccgtgttctgtttttctccccgtagcgctcaacgccttggaacccgcatagctctgttcgtctcgtcattaccgtgctactgcctccggtgtggagcgatttgcgtgtgtcgatgaagcaagcgaagtcccacaacgtccgctaggtgctcgacgaatggctggaacccggaattcgtcgtcgtttctcatccgcgatctcgtcaacctctgctcgacaagtgttcgatgaagggtctgagccaagtgttgttgctgcttccacgaatttctaatcgaattggtacgttaattaatcgcgtgatgcggaagacgagccaagtcgaccccaagcgcgggctactccgcacggtgatactgatggacgaacatgtctgatcaagtgccaggatgtgagctgctcgccaaaggatcatcgtctaacaacactaacctagtgttacccaggttctaaccttgtgctgcggtaatggtgttaagtgccggtgggctcggccttcttataagtctaagtaacccttctatacttcttattgaggatggtcgtttgagctagcatatatttcaaacatatacttttgtaatcactccgataaaataatgtaaaatttttgtaacttgtaaaatttggtaacaagatttccgctgn

SEQ ID NO: 247 - DNA, 1454 bp, Zea mays
  misc_feature (1454)..(1454): n is a, c, g, or t
  Peptide Sequence Number=SeqID_8818
  Probeset Number=SeqID_14650
aacgcaagcccccgcctgcacattctccgccaccccatcccctgtccggcgcgtgtgccacggcctccctcgaccagcggcacgcgtacgccatcaccccctccctactgctcccacccgagattgttgttgtccccatctatgccttaggtctgcactcgccgaggccgcccccgtcctccccaacggcgaatcacgatgattatgcccccatccacgcgccacgcacctccttccccgtcgctcccacccaagagggtcagcgtccttcctccttcagtcccttcctctgcttcgctctcaacgcgactgaccatccatggagcaaggctaggggattcgccgagcaggacaaaaactggttcagcggcggtgtggtgctcggcgcgtctaggagctcccggcggcggcctctgggatggtgaccatgatgcatgggctcaggaggatgttcatgtcacacaagggcaagatccaggtgcacagggacgagcagagcattgccttcgcctctgtatctacatctgtcagcacgaacatatgagctgctaggtcactctggatttgggagacgacctgatgcacattttcttggtgactccggcggccatatctacggggcagtgaggtatgtgatagctattctacatgaaatgtgtaatatatttttgcagtgaggccacatacttttattgtcaatactgtggaactgagcactaccatgaaaggaaatggtagcattacagggagatcagagatgattccattgtggtgtgatagtaaatgagacattgcatgtggctaacttgattagcagggtgttcaggcggggcaaacacatatattcatttcaaaggtgtatcttgtcttcaagctggaacgatatccgttcattaacattctgttagtcaagagagattatgatccattatgattctaggttattaccaatttcagagataaactcaaacatatcatagaagcaggacctattgttaaggtcaaaagggggaagaagagattgtacaattaagaaagcgtcttactgattactctacgaaggaatcacaaatactcgatgataaatacaagttaaggattatttttgggctccaagctgcagctaccctccccatccccattctgattccaagaaaagcctgttcatcggtgccaggtgactttttttgcaaaatctgtgagcttcgatgtgccctgatgcacgagcggtcattcgcaaccaccaggtcgcttcaagagtttcctgatgaagaacgaaggatacacaccaccgagtagcactggcactttcagatggaacccgagttaatctgtcatggagacagacacatggagagaggtttgttgtcgatgtccatgtcacctattaggctatattactatttagatgcttgaagtgtaaaatacaaggaagagaatctattccctttttn

SEQ ID NO: 248 - DNA, 929 bp, Zea mays
  Probeset Number=SeqID_14651
aatgagtatattagatcgattagtgattatcgattgttcggcagcacatgagttcatgatgatatgatgtgctagtctatagcttgtgcaagtatctcactgtagcttccaggagaacctcggtttttatccttattcaagctagcacggccggcaactcagatcaaggtgccatgttgctcacaatttctgttgtcctgcatgacaagttaaacaacttgttgacttagttaaccggtgcactgatcaccctttcttttcagactgtttgcatgcatagtcctgggagccggtgcccggtggtacgtcaggtatgtacgttgcttgctaagacagacaaacttcagctctgttccatcagatctcttagcaactacaacacgcgcgcggtgatcttgcaactttctgaaactgacagaccaaccagtgaagtgattggggcggaaaaccgttggatctcacagctggccggcctaacatcgcgcataatcatatgacccttagttcgggtggtgttctggtgacaaatggtagtgtgtgctgcatgacaagcttgtcgaaatggtctcatcagcctatttctgtttttccaaaaaaaaaatcacaatattttccggaaccttttgccttcacaatgtgtggatctgttgtgcagccctgatgctctagctagtctctatggccatacgacgcccacgcacgcacacctgaatcctgatgcaggttcctaaacgcaggatcgatcggcacagcttctaaattaaagcacgattattaggcccagagccagaaaactgcatgatccttggctggtcagcacacagaactcgctgcagaggacactgcccacccaaatctctgctacgaacgaaggattcagtagatggcggctttgcggccggttggcttaacttcttgtcgcaatccat

SEQ ID NO: 249 - DNA, 521 bp, Zea mays
  Peptide Sequence Number=SeqID_8819
  Probeset Number=SeqID_14652
ccacacattaccgtttattatgtgcaacccgatccgattttccccatcaaaatgcttgtgtgtacctgttctaggccgaaaacatctatgccaacggacactgaaaatatttggtaccccaacttccaaacagatgcatgttctcctacttgatggacaagtttaatttgtataccaggagtccaggactgtatgtcgtcttgcgatttggttttatggtgaagaacgtgtcaccaatgaccttattcgttctggattaactgtttgcggttttgaagcttttttctttgtaaatatgttaagttggtggctttttttttggagttaaatacatcggtgacccccaaacttgtcaaaggataccatttaggtctacggactttgaaaatgtatttctaggtccttgaacttgttggctatttggcccaatttcttgtacatagcccggctcttccaagccattctgttgtgtttgattagtcacatttagcaagtatagctacagtagacatatgtttggt

SEQ ID NO: 250 - DNA, 1409 bp, Zea mays
  misc_feature (1)..(795): n is a, c, g, or t
  misc_feature (1396)..(1409): n is a, c, g, or t
  Probeset Number=SeqID_14653
nnnnnnnnnnnnnnnnnnnnnnnnnnnnnnnnnnnnnnnnnnnnnnnnnnnnnnnnnnnnnnnnnnnnnnnnnnnnnnnnnnnnnnnnnnnnnnnnnnnnnnnnnnnnnnnnnnnnnnnnnnnnnnnnnnnnnnnnnnnnnnnnnnnnnnnnnnnnnnnnnnnnnnnnnnnnnnnnnnnnnnnnnnnnnnnnnnnnnnnnnnnnnnnnnnnnnnnnnnnnnnnnnnnnnnnnnnnnnnnnnnnnnnnnnnnnnnnnnnnnnnnnnnnnnnnnnnnnnnnnnnnnnnnnnnnnnnnnnnnnnnnnnnnnnnnnnnnnnnnnnnnnnnnnnnnnnnnnnnnnnnnnnnnnnnnnnnnnnnnnnnnnnnnnnnnnnnnnnnnnnnnnnnnnnnnnnnnnnnnnnnnnnnnnnnnnnnnnnnnnnnnnnnnnnnnnnnnnnnnnnnnnnnnnnnnnnnnnnnnnnnnnnnnnnnnnnnnnnnnnnnnnnnnnnnnnnnnnnnnnnnnnnnnnnnnnnnnnnnnnnnnnnnnnnnnnnnnnnnnnnnnnnnnnnnnnnnnnnnnnnnnnnnnnnnnnnnnnnnnnnnnnnnnnnnnnnnnnnnnnnnnnnnnnnnnnnnnnnnnnnnnnnnnnnnnnnnnnnnnnnnnnnnnnnnnnnnnnnnnnnnnnnnnnnnnnnnnnnnnnnnnnnnnnnnnnnnnnnnnnnnnnnnnnnnnnnnnnnnnnnnnnnnnnnnnnnnnnnnnnnnnnnnnnnnnnnnnnnnnnnnnnnnnnnnnnnnnnnnnnnnnnnnnnnnnnnnnattggtcatccgcctgattacatctccacttggtcccaagagcatcggaaacgatcccaaccaggctctagcttccagctctgactctgccttttgctttataggaacatcagaatcgaagctgctttcaagcagctaaagaatgctcctacggccctggattattttcacatctattagacaatttttacggtgtttttttcacatttaatagtgtgccatataggcattttagatgatatgacataacatttaaaatgattgaatttcacgttgttgggaccatgcttcgtcgccgaaggtcctgcagaaagaaacagcttcagctgaagctgtctgcacgtgatgaccgaaggttgctgttcatgaagcttcggaattgcaaaccgacttaaaagtagaatgaccttttagtccacaagtgtttgagtcattgttgtaaacttttatgagggacatgattgtaattcctcacaggctgtgtcttgtgcctataaatagtgaacaatattcctttactgttcacgcattcctgtaattgcaatcgcatcactcgggaattattccttgccaaggcagaggtataaatgtatctaatatnnnnnnnnnnnnnn

SEQ ID NO: 251 - DNA, 600 bp, Zea mays
  Peptide Sequence Number=SeqID_8820
  Probeset Number=SeqID_14654
atattagatacatttatacctctgccttggcaaggaataattcccgagtgatgcgattgcaattacaggaatgcgtgaacagtaaaggaatattgttcactatttataggcacaagacacagcctgtgaggaattacaatcatgtccctcataaaagtttacaacaatgactcaaacacttgtggactaaaaggtcattctacttttaagtcggtttgcaattccgaagcttcatgaacagcaaccttcggtcatcacgtgcagacagcttcagctgaagctgtttctttctgcaggaccttcggcgacgaagcatggtcccaacaacgtgaaattcaatcattttaaatgttatgtcatatcatctaaaatgcctatatggcacactattaaatgtgaaaaaaacaccgtaaaaattgtctaatagatgtgaaaataatccagggccgtaggagcattctttagctgcttgaaagcagcttcgattctgatgttcctataaagcaaaaggcagagtcagagctggaagctagagcctggttgggatcgtttccgatgctcttgggaccaagtggagatgtaatcaggcggatgaccaat

SEQ ID NO: 252 - DNA, 1634 bp, Zea mays
  Probeset Number=SeqID_14655
gagcgttcagtatcttacatggtatcagccttatctcgattcccacctctccccacctcctgcttccgcacctctctagattcaacatggtgagtccgtcaggatcatcctcctcgagcagcaatccttttgctgatcccgctccaccctctgcttcctctctcgtgatgctcaacatccgaagccatgtctccattgtcctctctaccgatgcaggcaacttccgtcagtggcgttcgtattttgaactcaccttccacaaattcggcctcctcgatcatatcgacggcacggtggatgccgccgctaaattcgacgaccccgaatggcttcaagtcgacgcctgcatcgtctcctggctttacaacacgatctccacggagatctggaacgacgtcaaccgtcccaacacctgcgcctactccgcctggactgcgatcaacaaccagttcctcgacaacagccttcagcgcgccgtgtacgcccagcaggacttccatagtctgtttcagggcgacctgggcatcgctgagtattgcggcaagctcaagtgcctcgcggacaccctctacgactgcggcgcccccgtctctgatcccgcactcgtcatcaacaccctgcgtggtttgaacaacaaattcagccaggcgatcgctgttctctccaccatgaaacctcctccaaccttcctctacaccaagtcctatctcctccaggaagagcaccgcatgcgccactcccagaagatggaagcgcagacggcgctcctggcggcggccccgaccggccaggcgtctcggcccaccgctcccgcccctccgtcgtcccaggggtccaccaacaacacctacgcgcggcgcaagaagcggacggccaccgatggtcgcactcgccagaacaacacaggtgtccctctggtgcctcctggcggcgcgcctccaccatcgtgggcgatgacccacagcccgtggcaaggtgttgtccaggcgtggcccatgaatgcctggcggcccagtgtcctcggatccaggcccggcgtccaccccgtgtcttctccaccaactctcccggcgccgtcaccatcgccggatgccgccttctacgccggcgctccgacctcgctgccagccggcctctacaccgctctcaacaacatgtctctcaacaacaacaacaacggcggcgactggtttctcgacacgggtgccacttcgcacatggcgtctcgtcctggaccttcgcaccaagacgatactgctccgatgtgattcgtccggcgagctctatccacttcgtcaatccaccaccacatcagcgcgtccctccgctacgttccttgcctccaccaacagcagtctctggcatgcccgtcttggtcaccctggccatgacacactccagcgacttgctcgttccattggtttttcctgttccaagtctagtcagcacacctgtgatgcctgtcgtcgtggcaaacatgttcggcttccatttagagagtcccataatgtttcccaaattccatttcaacttctacattgtgatgtatggactgcaccagtactgagcaattctggcttcaaattctatcttgtcattttggatgattattcgcattatacatggacattccc

SEQ ID NO: 253 - DNA, 660 bp, Zea mays
  misc_feature (660)..(660): n is a, c, g, or t
  Peptide Sequence Number=SeqID_8821
  Probeset Number=SeqID_14656
atgtgctgagacggaacaagctaggcaccccgagagccatcgaacacatcgagaggaatagagagaaaggagacagcgccaccgtcgctctctgcccaccgccgtggtttccctctgcgccaccgtcctgattcgagtggaagtgcaattggggttcgcgggggcgcgctgatcatttgcggcaagcctctgggcgtgtcggtcaccgtggtcaagtaaattcgtcgccgctgcggagccatcagctcgtcgccggcccatctgggtccgtattggaggattgggagtttcgcttgtgcctgctgaaggtgtgggtgccgcaggcgtgtgggttgatcgatcggtgcgagcagaattcgttgtcggccatcttcctcggccgcagtgccgcacgcaaccgtggccagatacgtcgcaactccttctcgcgtgaggacacgtgtcatctgaagagcaagttggtacctggaatctcaagtgtcaggtcaagaacaggtaccgcaggatgaggcgcaaggaggatgctgcgatgagttcgtgagagatctaggtcgtcgtctcccagtcaactttgggttgctggaccgttatctccttataatgtaattatttattttgtatagaactcctgttatgtagtaaagatgtgacattcgatcn

SEQ ID NO: 254 - DNA, 505 bp, Zea mays
  Probeset Number=SeqID_14657
cttcccttgcttcgtcgcacaggattaccccgccaccagagaaacccagaaaggttagagcgccgccgcggcaggaatccgttcccgtcgccgttgaagtctcggtgtggggccatgtggcttcgctgcgacaccaggaagacgaccctgacaaagtctggccgtattgttcagaggggtggcgtcaatttctcgccgtagttggacttcgccgcggatccgctgctcgccgtcgactggccgcgtcgcgccctaaatcccagttacgagccacctgaagatcatcctggtacctggaatctcaagtcccaggtcaagaacaggtaccgcaggatgaggcgcttggaggatgctgtgatgtgttcgtgagaggtctaggtcgtcgtctaccagtcaactttgggttgctggatcgtttcctcatatgatgtaattatctaattatttttgtacagaactcctgttatatagtaaagatgtgacattcgatcctgtgccactatgc

SEQ ID NO: 255 - DNA, 1372 bp, Zea mays
  misc_feature (1372)..(1372): n is a, c, g, or t
  Peptide Sequence Number=SeqID_8822
  Probeset Number=SeqID_14658
gcagccatggttagttgtttgtataataatactctgccgttttgcacccctagctagcgctacaactcctccgccgcctatccaccacatctatttcgccctatccaccaggacttacgatgatctgtatagcgaggagcaggtcggcatacgatccccggcccacacgtgatgcaaagataatacatccatgtcgtcggcgccggggaagaagacaaggtaactctggccatagccatcgattgccttatatattatcggcttcagtaacgccaccggccattggtgcaagtttagtggtggagacttgttcttgttcaaaggtctgccggtgccgggagccaccgagctccccggtcacaatgaactatggacaactgatccagggagggcacaccgagcttaatttggcgggttcctctgggccgggaagaagtcagccatacatgcatgccaccaggcagcttgcgacgtacgaccccgccatcgtcacccctgaatcccacccagctccaggacgaaaatggggtgctactggaggtcagtaccggtggatggctgacgcgaagtcgaggataataatagtcaggtcaaaggtgccaacatgtaatcagggggcatccaaacaaaagaagaagaaagaaacatatagtatgtaggtgctttcagcttcaagttcagtatgtcgttaactctgaagatcttcagatttagactgaaagatagagatatagagacacgtgtatagtcaagctagtttcataacttcacccaagtaggaagcaaataacagcatctaacgtattcgtagccactcaaatatatttcactctagctactcctgttctttaaagaatcataaatgtgtagccacaccacatcagcattgagtcatgttgtaaaacaaaatacaatcatcaccttgatggcagagttatcgccacgacaagccgtctggtctgcatggtggagtccaagtagtgggcgatgacagggcgttggttgccgccgccggtgctgcggtcataggcatggttccactccccaaatgccgggatacgctgccgccgcctcgcccgcgccttcttctgcagggactcacatcacaaatagagagatggatcaaattagccaaaactcacgctatctatccgcagcagaagacgaccaagacggtcggtcgagaaggcattaatgattgggtggtcgtcgaacaggaactgagtagtgatctcagtatgctactgctagcggtaccttcatggcttccgcacacggccgctggccgagctccagacgtagtcgtggaggcagaggcagaggcagtcatctctcgtaatatatctgacagttttttcaaaagaaaatcatn

SEQ ID NO: 256 - DNA, 823 bp, Zea mays
  misc_feature (1)..(5): n is a, c, g, or t
  misc_feature (720)..(823): n is a, c, g, or t
  Peptide Sequence Number=SeqID_8954
  Probeset Number=SeqID_14659
nnnnngaaattttattgaactcttactatgactatatgccacgtctttcatagtgaaaaaatgtggttagacaataaaatcctaaggctattgtggttaggcaataaaattatagaataaatcaactcagtgaatggaagattttatttcacatgtcaccctacttgctatgttcggtgacatcaagtttccactgcgtgacgcgctgaatgttgagtagccaccggtggagaaggcgtagagtaggttgagcatgacagcggattgggtgtactccgaaagcatcttgtatgggtccaaacatgactcttctcgtcaaatgtcttgccattgatgttgtcaccctgatagatgggaaggttcacgtcgtccctcaccttgaccatggtctacgagcatttgggtgccgaacgtgagcacgtattacatctgcagaagaacacataagttgccatagatgtcgtctctgttgatctcttttcaacattgagttttcaaagtaaaaaaatagtggatttagaaatggtgatagctagttctcttggttaataatctaaattagtgtgaagagtataaatcaattagtaggttagcgaaaacatataaatcatagagtttgagttttttggagacgatgcaggaacaatatagttgttttgctgtaataatttgacattcattatcatgttacttatcaattctacacgtggaaggcgaaannnnnnnnnnnnnnnnnnnnnnnnnnnnnnnnnnnnnnnnnnnnnnnnnnnnnnnnnnnnnnnnnnnnnnnnnnnnnnnnnnnnnnnnnnnnnnnnnnnnnnnn

SEQ ID NO: 257 - DNA, 837 bp, Zea mays
  misc_feature (1)..(1): n is a, c, g, or t
  Peptide Sequence Number=SeqID_8955
  Probeset Number=SeqID_14660
ngtctattaacatgataattatttatttttatcattaactattacacgaaaacatcatcatatacatatttaacgcgtccctgtagagaacagatatagaaaatgcttcccgtccctctttacacgtttatatcctcgtggaaagaatttcccatggtgaattgggaatgtaggcccgttgccatctcagaagggaccgaccgcttcatgctcaccagaatcctctacgaaggcctgaatgcctgacaacgtgggcttgccgaatcatatcttcagctttctgcatcttgggtcctcacaatgcagataaaaccccgacgcctgcatcggagtgcacgtacatattcaggatagtagaacagcacagaagacaccatgtagaaaaggtgtgtttggttgcgggacagtcaggacagggacatcccctgacgtcctctctcgcccctccaattttgagggataattggcaacaacactgggatagttctgttccaacccttgatcctgaatcaaacaaacttatttgagggatcgtctcatcccgtcccggcttgtcattgtaagcaaacgcattccaaatcactatggaagaatactaagatgcagagaaacgaattgtccgtacagtttcgtagctatatgttggctccgagtcaagctggacctcgactagggttccggcgtgatcgagccgccggcggcgagtcggtcagaattggggtaaaaaaacggagaaagaatttctttctctctttttttcccacccgccgcaattggagtttttcccccaaatttatttgtttggggacgacgaacaatgtgggtgacgctatctat

SEQ ID NO: 258 - DNA, 1285 bp, Zea mays
  misc_feature (1)..(1): n is a, c, g, or t
  Probeset Number=SeqID_14661
nagttcaagcgttttattgtcccgaaatttgtaaccaattacaattacattccttgtctatagggcattgtcccatctaacatctatgctagagcatacaagtgataactgaattccttgtgtacttcactgcaaagtagaaccgagtgctgacacgctgtcagtattggctttgtcgaaatgcatctgtctctacgagcacacaacgaagaaaatcgaccatcatagaattgctggcatcgtcatctctggctctgactctgaatcacgacgagcatcacacattcacacacctgtactgtaccaggcgaatctaatcctgatcgatctacggcaatggcgatcgagaaggcttcccatgccatcggacaatggcgcccggccgccggtcccagctcggggtatcactcggcagccgaacagtctgaccagacgccgttcactacgaccacatcaccgggcctgcctgcgccaccgccgcccagcagagctgcggccaccggtacaccaacccctccgcagcaacggcgtcgtacacctggccatgggccggtccagggccgactttcctgccccctcgtctcatcatctccctcgacgtccatcgccgcctcgcggtcgtcgccgtcctccgccggagccacccagggcacgacggccagggagaggtaaggatgttccttggcggcgccggcgagcagctgccgcaccgtcctgctgtccgcctcccggagcatggcgcggatccagtccgcctccgcgccggtgccggtgccgtcgcgcagcgcgaggcgcggggcgtcgatcccgatccgcctactgctgccgctgccgctgctgccgctgcctctgacyctttctccgtctccgtacaccaccaccgccctctcgccatcgttgggcgaaggagacggcgccactgccaccgcgtcgcccatcgcaacgtcatcctgccacgccgccgtcacggcctggtcggccccgccgcgagggccgtcgggacacgcgaggcgccgcatcttggtggcgcggcaggagggcgagagcccggaggcgcggtcgccgccggcgtcgacgtcgaagaggcccggttcgtgggcgcccttccgcttcaacgaaaggccgccgtggaactcctccgtgagcaccaccatcgccggtcgtcgccgccgtcaaactcgcacacgcagctgccttcggtcgtcgtcaatcgcagcgccccctcctctgctctccgactcgatcgcttctcgtggtttctttcttgcgtgctccggaatcagat

SEQ ID NO: 259 - DNA, 1104 bp, Zea mays
  misc_feature (1104)..(1104): n is a, c, g, or t
  Peptide Sequence Number=SeqID_8956
  Probeset Number=SeqID_14662
atccgccccgatccgaacccattcaattccaaattcacaaccctgccagtggttggcccgccgctgccaaatcgaatcggactccgatccgtgcagcccaccggcgagacggcgagacgccgaagctagcacacttcatgccatctgtctgacgtgatgcgtgtggcctctctgcttttactggatccctagccagctcaggagaaactcagaatagtactatagccaagtccatccagtcctttcgcggcgtcttccttgctcaccgcggctccggcgatgtcggccgccggctcggcggctctacctctccgtctacaactgggtcgtcttctccgtctacaacagccgccatcatggagattcttcatgggcttgtagggttggtgagttctccagcgtccacaactcttccagaaattggatccagattattccttatgtgaggtatcttctggagttttcccgagacccagtcacatcttcttgctactgccctgatcataagctggtctgtcactgagatcatcaggtactctttctttgcaatgaaggaggcatttggctctgcaccttcctggctatcatggcttaggtacaccgatcctactagaaaaccgaagaggtataggtatgcatgctgttcacatctcataactaccattttatttatgttccgggtaagcctttccgtcctcgaccgccctccattttttttttyctgttcgcttcagtgccttagactatctccagcagtttatttatmctcgtacttgtattcaamctttmctctacaaacagtgtgttmccgtgcttatagataamctttmmgtaaactgctggaccaccgccgcatgcaggaagtccgcacatgtactgttacatgctctcccagaggaagaaggcactgtcaaaggccaaagcagcataattctgctcaagagctgtagaatggtagaatcaagttctcgacatttcaggtagaatctagtggttcacatgaattgcgccataggtgttgtacccggatttgtattggctatcagctgtgttcgatggttaaattgtaatttgctctgaatcacccccagttgtatcagggcn

SEQ ID NO: 260 - DNA, 1453 bp, Zea mays
  misc_feature (1453)..(1453): n is a, c, g, or t
  Peptide Sequence Number=SeqID_8957
  Probeset Number=SeqID_14663
gggatgcattccactacatagctagagagtccagaccgaagaatttgctgccgaaaagtcagctttcttgacttatctccggctcgctccggctgtttttacagggtgcagtgaacgtgaagtataaagtgcatggtgggggattttggagcggtgatatgatgcagcagtgtgacactgacaacaagaagcatgtcgttttcggcgcatatagcactagcagggagaaagccgtcagccatcggatgatcagaagaaaggggagggaggaaacaggcagcaggtaagcctagcctacgctatagcctatagctatagcacgggtacatgaatgtccctcgcgcgctttctctgctctgcaggaggagggagtaggtttatctccttctctgaaacgcgcgcgcggcagccactgaaagccgcgtcctccaaaaaaacaaggccacggcactccaggcccgtactatcaactgctactagccgctactaggtcactttctgtactctgtacccatcagaattgaggagatctacgacgctccacctgcatgcatgtacgagtacgacgatccccagcaagctatcaatttggaccaaccgaagagctcaaagcacaataaaccggccgggtcagctcagctcatgctcatcgtaccagtactcctgccggccgggccggccgcctctcgtcgccgtcggccgaagcaacctaacatctcaagctgttgtcatgcgcgcggttgccagctgccatgccaccgctccctgctccgtcccgtcgagagccagaggcggggggtggtagtggggcgccatcggagggcgacggcgagtaaaacgcagacatgtcgcggagggtcctcttctcctgtccgggggtgcttctctatgccaaatcagtagcgtgccggcctgtaatgcatttgtgagaaaaggaaattaaagagacgccaacaacagcgacacggatgacccgatccaggtacacttttacgttaaaatctttggtaaagtacagtacctactttatcaatgttcagtattatatatatcttgttattgctaattataattttaagtctccaaataaagtgtcgacgtccaaataaacagtgggcaaaacggcatagaaactcccccctccctaatctctaactgcaggtttctgattctcctcctcgactacctggaggaacacaggtgcctgtcctcggctgagcagcaagccaaacatatttgccatgaacgtctggctgtggcgattaaggcaaaggctgctttctggaagcaacggagtaagcatcgtgcaataattgaaggggacgcgaacacagccttccaccatgcgattgcgacacagcagatgcgccgaaaccagattaaatccatcactgttggcagccgtgaactctccagccaagctaataaaagtgccgctgtcacagattttttn

SEQ ID NO: 261 - DNA, 576 bp, Zea mays
  Peptide Sequence Number=SeqID_8958
  Probeset Number=SeqID_14664
gtctctccactccactcgatcatcccacgatcgctcatcatctcataagctctgctagcttggtgcgcgcggttgacgccgcgcacgatagctaagctatctcttgaaccatcgtagtagcaaacaaaagatggttcagcggccggctgcagccggcgatcgggcaggcgcaggatggagccgggtggcggaccagccggccgcagcgggaggcaccagcggggggcggcggcgggatcgtcgccatcatcatcatcagcagcaggagctggtgcttcgtcggctgctgccgatcaacaaggccaaggcgtgccggttcaagcgcagctgcttcagcgaggaggacgacgccgcctcctccgccatgcttctgctcgcctgcgtcgtctgcgccccctccctttgatggtgataaaaatacttttgtttactttggccgcctgcttgtaactaatcaacatgtggatcaccatgccgcatgcatgtcagtctgtcgcatcggaaacgttcgctatgtaatggggtactggtcgttgattcgtctctctgaatgagtgtttggcagcaatttctttc

SEQ ID NO: 262 - DNA, 302 bp, Zea mays
  Probeset Number=SeqID_14665
atcccatccatcacagctagctagcgtacagacgaataatctcttcttcacctcactagctaacaccagctagcagctcgatcgctctgtcctgcaataatggccgctcgctcctcctccatgtgaacgcaagatcaccttccaaggtttttgtttgagttgtatcctctggcccgacttttagtctactagcagagctataatcactatatgaattattttttgtgcccttaccatactctgctgttgcttgagaatatgttattagtctgtcctaaaaaaaaaaaaagaaaaaaaaaaaa

SEQ ID NO: 263 - DNA, 1921 bp, Zea mays
  misc_feature (1921)..(1921): n is a, c, g, or t
  Peptide Sequence Number=SeqID_8959
  Probeset Number=SeqID_14666
accagccaaccctagagcctctccagtctccactgctcggccgccgcctgccgcagcccgccgtccactggtcccgcctcccggcgtccgctccacgcctccactgctcccggcgtccgctccattgctaccatcgtccggcgttctgctcctgcgccctccctttgattcgttgccagttgtagtgtccgggcagatttgagctgtggcagcaagcaaggattgacgaagcgtgcgttcccatcgcaccaccatgggctacacagagatcgacatccacccctctgggagcggcaaggtaccgaccccctgcccttacaactcctagagctctacccctcacgctgaccttagggagacaggatggtttgctcgcctactagaggacatgctctgatggtggttccctctgctaccatttttagttcttgattgtaaagtgtatgttctacattttgaaatagaactggattgtgcatattttgttctacatgtaaagtgtatgttctacatgtaccttttagatcgcttgcaatatgatttattttaacacatatttgaaatagaactggattgtgcatattttgtaaagtgtatgttctacattttgtaattcgtattattcatttttcctttagtttttctctttctacaactcctgtctctttacaatcaaatttcagatgtgatagatattagtatgaaagataaaaactagaatgctatgcctgtcagaggagctttcttcagtttcaggtactgctctgctttattagtcatccagccgatggataatttctatacgtgtatcgcccctgcactttcaaacacatgttcattgtttccaatcacataatttttttcttctcttagatttactatgtggttgtggtctcagtttggtttgtaggttaatttgtatactcatgtgattttagtttttccgtgtattttatgttcatttagtatgtcttaatttagttactttcaattcttgatgctaataatatggatagattgcgacactactttctggcttgagcagaaatgagtttgttgtatatagcagaatatagttgtcgtagctggcaacaatgaccgctctttggatgatctgaaaactattctgtagtcaggtagttaaatatagctgaatatccattattatgttttattaatcttatttgttttttctgtcaaaagaacacacctctccatctttcggtgcttggtggatcaccgtctaaacgatccaccaccagaaccgcccaaccccaagatagctccatctcagtcgttgtacccgttcaatggcgagctggtggcagcgatgtaggagatgatccatgccgaggtgcacaagtacatgttagtggacggcacctgccaaagatacaccgtttctactgacaatccgtcttttttattgcttatggcgttgtgcattatacatgtccaccaattatatacaaataccatttgtgggttacctctggtgtgtttaggtgcgagctgcaatcaaagttaaggcattagtcatcatttgcttcacctcttctggacaggctgcaagggtgttctggacaaagaaagcttgtaccttaaaacaagaggatacaagaagctggagtggttgtctaaaggcttttgaactgcttgaagcattagtgtagctttggtgattttgtgactgatcagctctggagcagctagagtgatgtagttgtgggcttttgaacaatagctggagtgatatgaaacattagtgatgtggttgtgggcttttgaactgcttcaagctggagtgatgtcgctgtgttgcttttgtgactgatcatctctggagcttttgtgaatgatctaactagctatatgtaaatgatctagttgtgaatggtattataattgtgatgattttgtn

SEQ ID NO: 264 - DNA, 1553 bp, Zea mays
  Probeset Number=SeqID_14667
acctcccgccgccgccacacgctccggctcgtgttggtgctcccctcctgcctacggcctaccccatcgagaaaatcccatacaagctggtgctctcacctcggccgtttgtgctacttccgctgctcctggtgctactgtcgctgcttcctggtgccgccgcaggtattgcccaaacttgaattgaactggacacaaaagattctctcatggggcgtcgtccagccttttgccctcccctactatccaatcgatgtgataggacagcggcaccaaactcgtccccaccaattcatggtggcaaaccatgcactacatctgaggtcagcctcgtgcacctctctgctgcagcagcacgccgtcgtgaggagttggcgaccgaggtggaggaggaaagcgacacctcatttatctcctagtgataagaaatggttcaacatgtaagattcttcaattacatatatattgatgagaaatggttcaacatcacaaaaaaaactttaaggtactatactgcccctgatgagcagcagcccgatacgaacatgtaagaacaaaaactatattccaagaatcatgtttctgactgctcttgctcggccaaggtttgactcaagtggaaattgcacctttgatggcagaattggttgctttccatatgtaacctatgttgccgctaagcgatcaagcaggaaccgccttgcagggacaatcgagatgaaacccattctctcgatcgataagagtgtgatgagagatttcatgattggaaaggtcctaccggctattcatgccaagtggcctcgtgaagatattggaaagatcatatacattcaacaagataatgctacacctcatttatctcctagtgataagcttttttgtgaggcggctcaacaagggggatttgatattagaattgtctgccagccagctaactcccctgatttgaacatattagacttgggcttttttaatgctattcaatcattacagaacaaatcaacatgtagaaccacaaaagaattggtagccgttgtggataaggcgtttgaggattattcagtgtgtaaggcaaacaaaatatttttgacacttcatgcctgcatgagggaaatcatgagaacaggtggtaataatggctatgaccttccacatatacggaaatcaatgcttgagaggcaaggttccctgcctttgcagctgaaatgtgatgccacattggtcaatgaagttatggctcaaatcagcgtttgagaggtggagtactcaaacagattttgctaatcctaatctactgcttttagatttactcaaacagatcataatatactctcaggatcaacttctgaatttcaacagggatcgaagcagcagatgcatggatgtggttcaagttatgccaggcggttcttggggttcaagttcaacaggagtacttctgtcagacgtttttagtaatgaaatggttcatttttctttgtttcgaatacaagttctgtatgtactcctggggttcaagttcgtactccatcgagttccatcgagttcgt

SEQ ID NO: 265 - DNA, 681 bp, Zea mays
  misc_feature (681)..(681): n is a, c, g, or t
  Peptide Sequence Number=SeqID_8960
  Probeset Number=SeqID_14668
acgttcccatttacccattgccatctctagctggaagcaacggtgccgccggagatggagacggaaaaggaggcggcagcggcgaggcaggcgaaggagtccctggagctggcgttccagatgtcccagatcctcgaaaccggcctcggaccgccacaccctggtcgctgctcatggcgctctgcgaccgcggcgccaaccccgaggccctggccgccctcgtccgcgagctctcctccgctgctcccccaaccgccgccgaggctccctcccccgtgaggcaacgccgccgcggggccggccccggcaacagcgtccatgttctcctccggccttcgccgtccctagggtttgtgatgtcccttttttcgccggtgccgctaaaggcctaaagtctgaatggaaccggtgtagttttggaagcgacagcagatctcgctgctggaaccgctggatgaaaaggattgcctttacaattccacgtgcgttgctgtgggtgttgtttcgacaggtatccacgtgcgttgccttcgcaggacttgtgccggtcaccagctgtaataatcctgatgattgacgagtcattgtctctttaccccccatcgctgtactgctttcatcaattgtatgtatcagtttcacgccctggtctttcgttaattatatcctcactttgatgan

SEQ ID NO: 266 - DNA, 556 bp, Zea mays
  Probeset Number=SeqID_14669
aatcggacaggaagcaccataaccagggaacacaccgagggagaacagagaggaaggaaggacacagagagccatcgtcgctaagaactatgacagccgcgccgggaagattgagcgagggagaccatgccgcgcctgtcctctaggcgggagttcgccgcggccgtcgcgcactccggggcgctgttcgtcgccgacccgtctgcttggtcgtgggatcggtctgggcgaccgcggggagaaggagacgagctctgggtccgcgcctcgctgcggatccgcgctccatcgtcaggcgtcctcctccatcggcgcgtgaggtcacgagtcacctgaagatcatcctggtacctggaatctcaaggcccaggtcaagaacaggtaccgcaggatgaggcgcatggaggatgctgcgatgagttcgtgagagagatctaggccgtcgtctcccagtcaactttgggttgctggaccgttgtctccttttgatgtaattatttaattatttattttgtacaaaactcctattatatagtaaagatgtgacattcgattc

SEQ ID NO: 267 - DNA, 813 bp, Zea mays
  misc_feature (813)..(813): n is a, c, g, or t
  Peptide Sequence Number=SeqID_8961
  Probeset Number=SeqID_14670
aaaaatgcaaaaagacggtgcgcgaccctcacgcccaccgtcccacgggcttgcggccagctcccctcgccgatcgtttccaccaaatccaccggtatgacggccccatcttccgctccgacgatcccggggactttccactctaccgccacaggaagccgaggttgtggatggtggaggagctatctgtgtacaatggaaccaacgaggagttgcccatattactcgcgattttgggctcagtgtttgatgtcacgaaagggaggtcacattatggtcctggaggaggttatcatcactttgctgggagggatgcatcacgagcatttgtttctggaaattttacaggtgatggtctgactgattccttacagggtttatcaagtagtgagtcaaggaaatcctacgaaataccttaagggtgtagaagtgaaggcaaagagaggtgcacagcttcttgaaaaacagaagagtgatgaagctaaaatacctggctgcaattcaaaatggagccagcaagaaggtggtgaagtttggtgcgacgcgggctacccaagactggtgaggaggccaggcgacatagctctgaccggacaagttagccaaaggtgcgcttgtttccaggaaaacgagctcgacaaagccgggctagtggtgtacgaagggtgtgattacttgagccagtcttgcaaagtaaactaggctgtatatatctcccttcccttggtccacgaacctgttgctttgggggtgtacatgtactcagcgcaaccagccacgcatcatgatgggctgggccttctgttccgtccn

SEQ ID NO: 268 - DNA, 979 bp, Zea mays
  Peptide Sequence Number=SeqID_8962
  Probeset Number=SeqID_14671
attcttaccgctcaagtcttggacctcttccccttcgtagttttatgcacgaagctcttcttatgccgaagctggctttgcaccatcgtggcttgtaacttcgctgtacgtgcattcaaccgaagcttctttatgctactttggtcgaagttcatcttagtccgtactttgcttatatggttgaaacacattttcttacatcgagagtaagtcattttgaagacattcggcaaggtaggccccacaagttattaagcatgcatatactataggataatcatatcttagaattgttttgtttagtttatacccttggagtaaacctacatggtttaaaatgattagaagcacgaaacataggttgtctaaaattccactataccacaacccaaatttagcaactcctttagagtcgttaaaagtggctatagcaaccgaggattagtcggtatagacttatgccgactgcaagtataggtcggtgatactggcgtcggcaaaagtttttgccgaccgacggatctatgctgacggatagtcggacaccataatgagtaataccgaccgacctggttgtggtatagtgttcttagcaaaagatatcaatcaattcaagttataaaccttcaattggtattgtttagcttatatgtgccaaagctaaaattatagataaaaccgcctaaaatcacctatggtaatgctcatgtgacaatacccattatgtggtatattgaccttaaaagttctaagtttgtgtcttctataagtattcaaaacttgtatgtgcacttttatggggatgttactctatagtttgatatctttgagactaatgccctttgtaagcttatcgtgtatgtagtagtctcattgaaggaaaattgaaatccctaaaaaatggcaatacgcatccactgcaaaatgatatcatcatgcgttcgatatcaaaactgatctgatatcaatgatttttagc

SEQ ID NO: 269 - DNA, 915 bp, Zea mays
  Probeset Number=SeqID_14672
aaggatttttgcaccgtgcctctgcctccaggattgtcgtgccgcgcctccaccattttcgccgccgcgcccccgacaccacctccaaggatccttgcccccgcccctgtactcctcgcgtccgcatctcccgctccatttccgctgcccgcgatgcgctcgcacgtgtcgccgccctcggcccgcgggccgcgattgcccccctccccatcaccacctcgctgtggtgtacccccgtccttggcgccgccaccccgcaccccgtccgagattggctcttccaccgctccccctggagatgagcgctcgcttagggttaggcgtccaacggttgtaccctccaccacaagcgagaggagatcgctggaagaggggggctgggagacgaacaggaacacggtccacatctgggtgccctcgcctcccactctctcgaatcctgacgcccacacagcgcctccgccctcgtgagaccgcgacgcaaatcccgcccacacagcgcccccacctcccctttaccgccgcagatctcgccccctccccctcccttgctcccatcgccaccatgcgcgcacctccgagcgtcgccccctcacctccctcccacgtgtcgtgatcaccagatcccagtatgtgtttcctcctcccgacctctcctaggtttcttctccatgtccccaccccagatctcagttctcccccaccatgccatcagctcaggtctcccacgaaaacgtctacacaaccccgagctgcgggtggtaggcactccccatggggttgcaaagtattaagcatgggtaatttgagttatgcctagatagttgtatttctcttcgattacactgtcagttttttttgtcaagacacatgtgtgatttttagggttggattacttatattttacccaatgcc

SEQ ID NO: 270 - DNA, 1700 bp, Zea mays
  misc_feature (1)..(1): n is a, c, g, or t
  Peptide Sequence Number=SeqID_8963
  Probeset Number=SeqID_14673
naatcatattttgatacatcacagaagtatctataaaggtatggatatcaaggaaagcaatgcatcaaatggttccaagcaactcctatgaacctaatgcacatttcactagacttaaagtgtgcgaaaattatttaaaaacacaaggaaaggggttgcatgcaccggggcttgcctgagtaacactaggttagtgttgttagatgacgtccacttgacgatcagcgtttattccgatactcgctccattgtccatcagcttcatcctgcggattatcccgcgcttggggtcgacttagctcttcttccgcatcacgcgattaattaacgtaccctgactaattcgacgcgatagtcgcaagcgcgactacgggttccggttaacgtcatccaggggccttctcttcttcggtaattaattgctgaagatcttctactcgactgaataattttgacgaatcgaacttgagtcacgcaggatgtccgagatttttgtcgcgcacttggtgaacaccactcttgctagcttcgtcttcactcgattcttggaatttcttgctgatgcgcgagacgacgacgagatcgtgtttggagcgagctggtgaggtggggatcgagctgggaatgacggttttgatgactcgactgtgaacgacgcgacgacgaacgacgctaaccgcggaatcgacgacgcgattgggaattaaagctgagcgagccgagagggcgcaccggcgagcagaaaacaggacgcgactgcgggcagaggagaacttggcacgacgagggacaacgaaacgctgcgcgcacgacgaggaagcagaaagccatgacaagggagctcggcgcgtagactgggactacggcgaggaaggagcagacactgctacacgcacaagaaagtggaatccgagcacagggcgagctcggcgagcgacgcgcacggcacgcagagactttacggcacagtggatcagggaccaatccgagctggagctgcgcgcgcacagggctgaatccgaaccggcaacaggtagcagggcgcgacatataggaacttggaccagagcgcagggaagtagggcgctgggagtgggcgagcttggggcatggaaatccggcgagccgaggggcgccgagtggagctgggacggccatgggcggagctctactcgggttcaggcgagattcgaactggggccaaggacacggctagggagggctcggcgagctccatggcaggagaagttggaacggcgagcaagaagcaaagcacccgggcgcgacgcagggtgctccgacaaggtagagcgcgcgtccagggaggaaaccgaactgaatcgagcggagggagacaggtcgcgtggcgcggttggggaaaaggagcggcgctggagcgagcttgaagaaatcgccatggcgcgcaggaagctggggcaggggcagggccgagtgctgtcctgggcgaggagccgagataccgcgacagacgaggacgccatggcggctcgtcagggaacgagaggaacagagaagagagagagcacggcagggtatttgaagagtcctaggggcggcgccgtgaggagataaacaccggcagccaggatttttgtaagccaaagcggcgcagaggataacgccggcgagctggagggaggagaactgctggcggcgtgcggcagaggaagacgctgagc

SEQ ID NO: 271 - DNA, 808 bp, Zea mays
  misc_feature (808)..(808): n is a, c, g, or t
  Probeset Number=SeqID_14674
aattaatccaacgtagccatgcacaacacgtcaacacacacgcacgcaggctgctgctgggcgttctcggcggtggcggcggtggaagggctgaacaagatccggacggggcggctggtgtcgctgtcggagcaggagctggtggactgcgacgtcagcggcgtggaccagggctgcgacggcggcctcatggacaacgccttccagttcgtcgcgcgccgcggcgggctggcctcggagtcgggctacccgtaccagggccgggacgggccctgccgctcgtcggccgccgccgccgccgcgtccatccggggccacgaggacgtgccgcgcaacaacgaggccgcgctcgcggccgccgtggcccaccagcccgtgtccgtggccatcaacggcgaggacatggcgttccgcttctacgacagcggcgtgctgggcggggcctgcggcacggacctcaaccacgccatcacggccgtcgggtacggcacggcggccgacggcacaaggtactggctgatgaagaactcctggggcgcgtcgtggggcgagggcggatacgtccggatccgccgcggcgtccgcggggagggcgtctgcggtctcgccaagttgccgtcttaccccgtctagagccaggcttattcccgtcggttttaggccgacgagaattaagtgttttcctgtagtaataactatgtccaaaaatatgttaaacaaacaataattgcaactgctgtctggtgtaattgcaacttctgatctggtgtgattgcaacttctatataactatgtccaaaaatctgtn

SEQ ID NO: 272 - DNA, 631 bp, Zea mays
  Peptide Sequence Number=SeqID_8964
  Probeset Number=SeqID_14675
atgttctctctctacgcctccccctccccaccaccaccaaacacgcgcggcggtgcgccacattcccagttgcgccaaccccgatgcctccctcccatcggatggcctcccaaaccctcagcctcgtctctgcgttcccactggaagatcccacaactcccgtggccttgcattcccaaacccaggcgcacgccggccagatgcaccggcatgtgctaactacctcttcagagcagcaggctgacacgtgttcactacctctacagactacggaccagcagcaccacttgtgtgtgactcctcgtgcgtccaccgcaagagccattgcaagcacacggaaagaaagccacgtacatcttccgccacgtctcactctatgtgctgctggttcttactattctctgtcagctagtgcgacgttatgaagagtctggtctcgtctttgtcaagactttgtccacgagcgcaagctgtttgacggtatgcctcagcaaaatattctattcggttcgacgatcatacgacaccgccatgctatccaacatatgcactaataacagggacaatttgtaaaccctagtatggagtacccatgacttttgtcattagaaataataaagggagctctttt

SEQ ID NO: 273 - DNA, 997 bp, Zea mays
  misc_feature (997)..(997): n is a, c, g, or t
  Peptide Sequence Number=SeqID_9096
  Probeset Number=SeqID_14676
acacatcgggcagccctctctcaccgctcaggtcaggtcaggccaggcctggcgagagacgcggcctcttgctccccactccactccagaagcacctagaagcttcgcaaggtaccccgccgtgcttcgaaggaggggaggggacccgcgggcaatggcggcgatggaggccgtcgccgacgctatgctcgccgccgcgagccgcgccttcaccggcaccttcgccatcgccattcagatccaggggtgctggatctgtttagttctttctctcgggtgggtggctgcttcaattgtcagaaaaagggtcataaagaacatgaggcgcagcattgcagatggaaatagttttgcatttctttgtgacaacatagatgagcttgagcactccgtccaggagaatttacctagagtctctgtaattatgcctttgaagggctttggagaacataatttgcaaaattggcgaactcagattacatcactttatgggggaccactggaattcctgtttgtcgtagagagcgaagacgatccggcttatcatgttgtttcccatttgatcgtagagtacaaggacaatctgggggcgaaggtggttgtggcagggctgtcaacaacctgtagccagaaaattcacaatcaattggtatgcaagtggcattgttctcatcctcattgtatctttcatggtctgaatgctcattttagggtggttgcaatgatgagacaggacgaaatgggatgatcgtcatataaggttgtttggttcagggtcagaggttggaagaagactgtcccagtattgtctccagttgtctcttgaaattagagggatgagagtgttggaatataatataagtgaattgtccaccacttcctatcagcttaagcttttgggttgaactagttggtgcatgcaacttaatatgatatcagaggtcgcgagttcgaatcctggttagagcaattaaaataaaataattgttgctcgctn

SEQ ID NO: 274 - DNA, 779 bp, Zea mays
  misc_feature (1)..(1): n is a, c, g, or t
  Peptide Sequence Number=SeqID_9097
  Probeset Number=SeqID_14677
ngcactcctctaggagctatatcaaacatcatgctatggagcggcagtcagaagtcatcatcaactctttggaagctaccattgcaagagtgaccaaatagattctagctaggaactacaccacccaaggtccacatttgggtcccattaggggataagcaatgctatgcccagccacttggggcaatgtcgagcagtgccctcgagggcactaaggcgaaattcttggtctaccgactcagagtagcacacgaggtcccaccatctacgaccatcctctagcgttcattctggagtgcttcgtgtgcaccttgcgatacaagttgttccatgagaaataacaaccctctcagcagccaacataggtccatgacaagggcattaccaatgagcaagagctgctctagtggcagacaagatatgataatgggttggctctcaacggccagtcctcattttttttggaggatcaaacaccaccgtcgtgcaagaatagctggcagattttataaaggatcactttggcgtcctccccaagtgaaaggcaatctcctacaagccatacccagaagagttttactggatgttgtcgccgcccaagttcaagggtaccgtaaatttctagtaatgatggtatgagcatcatcgagcttgtgagctgatacatgactcaactcagaatttgcagcattgggccgtaaacacatgaaactttggctattcttgttatcactatatggcctatgtttgtctcgtatacccctctagattgaatccat

SEQ ID NO: 275 - DNA, 1388 bp, Zea mays
  misc_feature (1388)..(1388): n is a, c, g, or t
  Probeset Number=SeqID_14678
aaaattctcccacaatcgccatctccaagcgcccccgcccctgccacaccgtcgtctccgtgcgtggcgtctcggtcccccaacatcgtcgcacggtattgcctcgctcatccatcttccatttatcgtcttcgtgcactcttccatcgtcgctctacatcaacagtgtcgtcagatccctctctcgctcgccattgctcggcgatttggtgcggtggctccacagcccacgcctccacctcacatggtcctacgcctctcgacactgctctctggccccaggcggcacgccattccctccctcgttccttgactacaagctgccaaaagcggttggatctgcgagtgcggatcctccgaggcagccagacgcggcgaccatcatggaccaagagcacgagtgtcgtccaccatcgttttggcatcttccccgacatggatccagcgcctccattccgatgtcttcctcaaatgctcagatccaccccctccaccgcctctagcctcatgtcgcgctttcctctgtgctgctggatgctgaagcgtacatggctggctggctggctttgcagaggataccgatatggtggagatggtactcgtgggcttgcccggtggcttggacactgtatgggctcgtcgcctcacagtttggagacaccacacacgtcaggctggaagacgatggggaaacggttaaaaacttcgtcaacagattctttggattcgagcatgagaacctgggttatgtagctactgctgttgttgggttcactgttctcttcgctttcgtctttgccttctccatcaaagtcttcaacttccaaagaagataagggagggcgctatggtgctgcttcagctcgcttcagtttatatgcgtttcagcaatgtaacatgatgaaagagtatatttagccttaatttgtttatttttaggaagtttgacttcatttttttgttttctggccagtttggcctgttctcccaaatttatatgccagtgtgttttatatgatcttatatgccagtatgtttgtgtataatttgcagaaaagtcatatattcacatctggtgcttctggaacaatgcagctgttatgaggggtgtttttagagctgaaaagccagagttgcttattgtaattttaccacaaagtctaaagaagcagcctcctgaagccaagaagaactgttgtgtaaagtgcaatgggttggcttttgataaactcgaatgtggaggtggcttgctacggcaagccttgttactggcttataaatctgacttccaagtgtgcgatgtggaacgtgttgatgatgtaagatagatagaatacagacatgatggcgctgtttcatttattcaagtgctaaaggatccaattttn

SEQ ID NO: 276 - DNA, 585 bp, Zea mays
  Peptide Sequence Number=SeqID_9098
  Probeset Number=SeqID_14679
acccattttccccgtttctctcagccgtgcgcctctcgcctgaaaccctaggcaatctcctcgtcgcttctgttcaccggcgaggtggaggactgatccggcgtccattgttgcgctgtcgtcgaactccccgccggcgagcgctttcctgcgagggcgccgccgtcggtgagatcctcggcggtgcttctgcacttgcaaggaggtacggcgtcggcctgagggttgcgaactgtgaactaccgacggcaagaccacggattgattgtggtgagatgtgctgtctggattacgagcaggaaattcggcattcttcagtttcatgttcttctacgaatcaacaccactgagatgatttgcagtactgaaaaacaaaccggatctgaagatgaagcaactgagcggtgtcccgatagggtgcccgtaagggcgccttatgtctgcttgtagaaatgcatcgcgcacttagaggaataatgcccagtttcagtttgaaaaaggtacaacgctcaggaaatgtaaaaaatcaatcgccatattacttatgtatgtctttgaatgtaaaaaatgttaatcgagtgtttc

SEQ ID NO: 277 - DNA, 1641 bp, Zea mays
  misc_feature (1641)..(1641): n is a, c, g, or t
  Probeset Number=SeqID_14680
ctttctctctgccggtggcgggcggagccatgaacttgttcgcgggggtcggcggcggggcggcggacggtggcggcacaggcacggcgctcctggagctgacgccgcacaagatggcggtgtgccacctcgtgcaggtctttgcgccggcggcgcaggccgggggcgacgtcgtgccgcccttccccttcgagtccctcactcaccacaaccgcctcggactcttcctgtttacgctcacccggtcatgcgatgattttctggagcctccactggaagaatttttgaagcagctgagggcagtggatgatttgactaatggttggttctgcgagcagctgacaagtgccctgtcagcactcaactcacctgatgacttgttcaacttctttgataagctacgaggtgtgttcactgcaccagagggtgcgagtgcagaagatgtattcttggatccaaatagccaacttggagtatttcttcgttgctgcatacttgccttcaactcaatgacctttgagggtgtatgccatctgttggcagatcttgtcatgtactgtaactctgctgatgcttcatatgacctggcagaacatgaggacttcaatagtgaaatgggcaacttgatggatgcagacataggttcgcacgctggtatatttgacaaatttcatcagggttatgcctctgagcatcatatgggggagagttcttcaactttaactcgtgcatcaatgtcaccctatgactttgacaacgatgacaacccaacctgtctgagatcaaggtggcaattagaggcatatcttaaccaacaagctgatattcttgagaaggatcctggatcagtgcctttgaatttatttaatgccactatgacacagcttcaaacattaggctccggagcttcatcgtgttcaattcttgcagtacttgaatgctctttaccatgatgactatgttgcttcactggataatcttcaccgctactttgattacagtgcagggatgcaaggactttttggtcgttctctgtctcaggtgcaagatattgttgttggaaagtatgagagtgctctgctatgcttaggcaacttgcattgttactttggacatcctaagaaagccctagaggcatttgcagaagcagtccgtgtttctcaaatgaataatgatgattcatgccttgcctatgtattaggagccatttctaatctattatcaaagataggcatctcaaacacagttggaataatcagttctccatattcacttgggaccaatattggactaggcacaccattatccattcagcaacagttacttgttcttttaaagcgatcactcaagagagcttatgcattgaaacttccaagtttactatcctttgatcacctttcgcttgcaaaatttgatctgaagcatgtccaaaggccactagtctctttcggccctaatgcatctacaaagcttagaacatgtcctgcagatgtctgtaagaatctaaggttaggttcccgtgtgttgactgactttggagcagatgttctatctacttcaaatgataatggtagttttagcacttcttggcttaggaatctatccgccacttctgattcatggcgtagcagttcaaagaan

SEQ ID NO: 278 - DNA, 1126 bp, Zea mays
  misc_feature (1)..(73): n is a, c, g, or t
  misc_feature (1126)..(1126): n is a, c, g, or t
  Peptide Sequence Number=SeqID_9099
  Probeset Number=SeqID_14681
nnnnnnnnnnnnnnnnnnnnnnnnnnnnnnnnnnnnnnnnnnnnnnnnnnnnnnnnnnnnnnnnnnnnnnnnngaggctagtccacagcggctgagcactgtctagcagctaggccgcaagtcgatggcggccccggcgcctcacgtcgcggtgagcgccgccgccgtcctccttctcctcccgttcctcctcgcgcccctcgccgtcgcgcagccgcccaagagcgccaaggcgttctgcattagccagttcgccatcgctagccaggcctgttccatcctgccgccgagtccacccgacgagcaccaccaccacgacgatgacgacgacgaggacgacgaccacgacgacgacgagcatcatgaccgccgcagccaccacgcggcggccatcagcatctcgggcctgctggcgagcaataacggcagccacggcgtcgtctctgggaaccgcaccgttggtcaccacccacaccaaggcaaccgcacccgcggcgggcacgggcgcgggcgcggtcgaggccgtgggcgtggccgccgtgggcgtctgcgggatgacgacgacaaccatgacgccgacgatcctgaccacgacgatgatcatgacgacgacgacgaccatgatgacgacgacgaccaccatgacaccgacgacctagatcatgacgacgaccacgacgatgacgacgacgatgacgaccacgatcacgaacaccacgacgaggagctccgcgcgtaccgcgactgctgccgatggctcaaggaggtgcagaaggaatgcgtctgcgaggcgctgctgcggctgccccccttcctcgtcaagccgcagcacacttacgttgtcagggtcggcaggacgtgcaatatcacctaccgctgcggcggcgtctagctagctccatctccatgtcgctgatggccgcacatccaccgtacgacgtccatgtagccgccgctcatggccggagttccatgcatgatgtctcgtcattacgattacatgcatgatgtctcatgctgcgcgcgtgctttctttacgattacatgcatgatgtctcgtcattttgttcacgtaggttatataaatatatatatgttaggtagacatacatggggtgtttgattn

SEQ ID NO: 279 - DNA, 455 bp, Zea mays
  Peptide Sequence Number=SeqID_9100
  Probeset Number=SeqID_14682
tcgtaagtgtgcagccaggatgttttatgctatcatttatgtccagttcggggctgctgtatatggtgctgttgaaccatatctggaaggtggctagaagcaaagaacactttggggtgtttggttttagagactaatttttagtccctccaatttattccattttagtcactaaattgtcaaatatggaaagtaaaatagagttatagtttccatattttgcaatttatagactaaagtggaataaaatgaagggactaaaaattagtccctagtaaccaaacactaccttagtttcctcgcgaattttggttggcaattaccccagtttcatgtaattctgtagtacctgtaatttctccgagagtactgtagttcaatatcatgtgtaaataaatcatctataaacgagcaagtcctgtattagttaagctggatagggtgttttgctctgt

SEQ ID NO: 280 - DNA, 455 bp, Zea mays
  Probeset Number=SeqID_14683
acagagcaaaacaccctatccagcttaactaatacaggacttgctcgtttatagatgatttatttacacatgatattgaactacagtactctcggagaaattacaggtactacagaattacatgaaactggggtaattgccaaccaaaattcgcgaggaaactaaggtagtgtttggttactagggactaatttttagtcccttcattttattccactttagtctataaattgcaaaatatggaaactataactctattttactttccatatttgacaatttagtgactaaaatggaataaattggagggactaaaaattagtctctaaaaccaaacaccccaaagtgttctttgcttctagccaccttccagatatggttcaacagcaccatatacagcagccccgaactggacataaatgatagcataaaacatcctggctgcacacttacga

SEQ ID NO: 281 - DNA, 1342 bp, Zea mays
  misc_feature (1342)..(1342): n is a, c, g, or t
  Peptide Sequence Number=SeqID_9101
  Probeset Number=SeqID_14684
gaggaatcatcacgggtcagggcaggtgttctgccgtttgcccttttctttatattctccttagaagaaatatttaagttggaggctggacatagccggaggagctaactaatcgagcggtgtactggcaaaacaaaaggagcggacaagaaaggggagaaaaaactagccactgccggagcgctattggccgtgttgggcctggaagcttgcatcaatacttccctcgccccgatttggttccaaaatcatacaagtcccaaagttgtcaagatattggagagtgttcagtaacttcttccgatccatattatggcttcaaagcagcagcagaaacagttcctggatgaagccatgatcaagcagccgacaccggaggaggaccgtgagggcgcatggccctcagtgctgacgatcatcggctttggattcctaaccttcaactcattcatggctgtgtacaggtcaaatggagatgttggatctatctcctttgtggtcttctcttacctggtcctcgttctgctgttctactgcctgcgccgattcgagacaactccaccagagtcgcctagccgggagcacataaaaatggccgtgtgggtactcaccacgttgctcactgctgcgttctcatacaaggtggcagcaattatgccactcccggtgcaggtgctggtgtgggcaatggcaggagcaactgtgttcggtggtttttatgctttcttcatccaccaggaaaaaaccgcccagctggaacccccaaaaccataacgagggtgcccgtcctgctagccggtgtgcttgctgtgcgatcgtttggcatgtgcttgttgagggcttgttcggttgctaggggtttggaggggactgaagggattaaacccccttctattcaattttgaataggaggggatttaatccccttcaatccccctcaaaccactagtaactgaatatggcctgagggggcgggcgagtctttatattgaatgaaactacataaaataccatgctgtctctgtcactggtaagggacggtggtacctagcgcaactcagcgcacaactgtgtctcttgatttttcttctgtttatcacggcattagtggcataccgttttatgttacagtgctgtgtgctcgcaagcatccttaaatatgcgtctgagtttagggttgtgtcaaacttgtcgaatttggggttctgttataatatgttgagcatgaataaagatggatgctggtgactctgtcgccatcgccgtccatcatgagtgtcctgtaattcaacttatatctatcatgtatgtatgtatgtatgtatgtatgtatatgctgtcn

SEQ ID NO: 282 - DNA, 920 bp, Zea mays
  misc_feature (920)..(920): n is a, c, g, or t
  Peptide Sequence Number=SeqID_9102
  Probeset Number=SeqID_14685
atttttcccgctaaacaagaacctttgcgtcctccgtcgaggcggcaaccgccggatccctgaacgtctgatcctggagtgaaccccgcacaggatggcgaggaaagcgaaacccggcgcccaaggcaccgcggtcgtggctgccgccaccggcgtccagtactggctcctgaagacggagccgggcgagtggtcgtggtccgaccaggcgcgcgccccgggcggcgtcgcgccgtgggacggcgtccggaaccggcaggccatgaacagcctgcgcgccatgcggccgggcgaccgctgcctgttctaccactccggcgccggcgccgcctcccgccgcgtcgtcggcgtcgtcgaggtcgccaggccgtggtacgagggcgagggcgagggcgaggaggcggtggccggtggcgccgtggacgtgcgggcggtcgggcagttccggagccccgtccctctgggtgtcatcaagaaggcggcgggcgaggtggaggggatgaaggacttcgcgctgctccggcaggcacggctgtcggtgatgsgcgtgccggcgaagatctgggactgggtttgcgacgcgggaggcggcttcgtgcaagacggcgagggcgaggatgaggaagaagaggtttgatttcgcagaccagcaaatgtgaagaagaaccaaaagttgctcctgctggtgacatgagcagttgcaacttgcaaggcggcgttgtgtgggagtccttttggcctgcgagtgttttgctagttttgacaaggcactcttgtttcttcagtgttcgccgtctcggcgccgaagtgtccaagaaaaaaatgtatttactatttgatctactcctatgaagtactcgagctgtttactgtttactgtttcttcagtgttcagtggtccatgtagccaagtagcttgn

SEQ ID NO: 283 - DNA, 1347 bp, Zea mays
  misc_feature (1347)..(1347): n is a, c, g, or t
  Peptide Sequence Number=SeqID_9103
  Probeset Number=SeqID_14686
cagcttgttgcatcccactttcactccctctgctagttaacaagtggcagcattacacgctgttgaggccgggggcagcagcagcatgcaggcgaggcgaaggcgacgcgcttttttgtcggcgtgccgtggcgctgctccagtgctccgtgcctgcgcagcggcagcccatgccatcagattgaaactaggggggcccacagccacagcgtctcgtcccagcctcggaggcgagctcgtggccggacagctggcgctactatacgagcgcctcgaccctcccacatccacatgatccacaacccctcctcgcagtcgcatttgcccacgagtggagttatttccctcccaaaacatttaccatgtgatctcattctaacacaatcatatattagcccgtgttttagttgacccgatggaagatacagctctacaaatgctcctttgccagttgccagattgtctacctgggtaataccattagtgaatagggcagagctactgatccagcaaaaatctctcctattgttcagtgtccagtgccagctaatcagaaatagctctgcagctttcttggattggccgggttattaccgaaaatatgtgaggaatttcggtcctatttcaaagccgttgactgaactacgggcatggttggttcagcttttttctgaccagcttttctgaaaatctggctgtgaggagaatctggctgttaggagaatctgagtatcattacgattacgtgtggaggaagataaagttgttcatagggcttatgatctagaaagtgacggatttctactattacaacgactcaatcgattatgtgtttatgttgattttggatggtttttgtcccaacgaattttatagaagctgcctgaaaagctgagtgtttggcagtccgcagccgcttttggtggccagaagctgccagaagccgaaacaaacaggccctacgtaccccggaagcacactgtttcggttaagtctgctctttggcattattgccggacttttgaaagccctttgccactggaatgaattgcagaagcaggttctgattgcctgtcattctacgcagcattgggtggtcactccggctaggcctgcaaatggggtgggtgtaaatgggtattttaggtgggtttaagaaatggttttgttttggtgggttgtgatggattttaattattaacgggttgggttgggtgggtttattttatattgcgggtcaaaatggtggatacccatgggtatagatggatttgtataggtatgggtttccatgggtattcaccaatcagactaccaccttaatcagtaccattttatttcaggttn

SEQ ID NO: 284 - DNA, 538 bp, Zea mays
  Peptide Sequence Number=SeqID_9104
  Probeset Number=SeqID_14687
gtgtcggagtcgtgccggtgaagaaaatagagagaggtaaaacaagggagggccgccgccaggggcaattccttcgtaggtcgccgattttgcctctgtcggtggtcagggagcttcgcctcgatacgtgggtgatgtccgtggcatcgtcgtgcagctaggagctccggctcgggcaatttcgcgccggcgttggtcctacgcggcagatccgccttgtgccgcgagtggtgctcctctgcgcgtcatccgtgtagtgaggtcacgagaatctgaagaatcaccctggtatctggaatctcaagtgccaggagaagaacaggtggttcaagaggagccacacaacgaggagtttgattcgatctaggtggcgtctccgagttgactttctggcgccaaggatggattttagttcaacctgtatttatattttattttgtaagacttccgctatgtaataagtactctaactattgtggtgtgacatctgacagtcttggcttgcttcctaatgctacaccctaatctccaaaagtcc

SEQ ID NO: 285 - DNA, 538 bp, Zea mays
  Probeset Number=SeqID_14688
ggacttttggagattagggtgtagcattaggaagcaagccaagactgtcagatgtcacaccacaatagttagagtacttattacatagcggaagtcttacaaaataaaatataaatacaggttgaactaaaatccatccttggcgccagaaagtcaactcggagacgccacctagatcgaatcaaactcctcgttgtgtggctcctcttgaaccacctgttcttctcctggcacttgagattccagataccagggtgattcttcagattctcgtgacctcactacacggatgacgcgcagaggagcaccactcgcggcacaaggcggatctgccgcgtaggaccaacgccggcgcgaaattgcccgagccggagctcctagctgcacgacgatgccacggacatcacccacgtatcgaggcgaagctccctgaccaccgacagaggcaaaatcggcgacctacgaaggaattgcccctggcggcggccctcccttgttttacctctctctattttcttcaccggcacgactccgacac

SEQ ID NO: 286 - DNA, 1315 bp, Zea mays
  Peptide Sequence Number=SeqID_9105
  Probeset Number=SeqID_14689
aagcaggatcatcatcatcagaagcagcagcaaggcaacatgtctcagcacggcggcctcggcgacacggcccggcggtggcgcgagctccacggcgacggcggctgggcgggaacgctggacccgctggacctcgacctgcggcgcaccgtgctccgctacggcgagatggcgcaggcgacctacgacgccttcaacaacgagcgggcgtcgccgcacgcggggctgtcccgcttcgccagggcgcgcttcttcgaccgggtgcggctgccggcgcacgccgccgcgtaccgggtcaccaggttcctgtacgccacgtcgtcggtggccgtgccggacgccttcatcctcaggtccgtgtccaggtcgcgccggtgcagggagtccaactggatcggctacgtcgcggtggccaccgacgaagggaaggccgcgctcggccgccgcgacgtcgtggtcgcgtggcgcggcaccatgcgggcgctggagtgggccgacgacctcgagttccccatggtgccgacgggaggcctcctcggggacggcgacgccatggtgcaccgcggctggctgtccatgtacacctccagcgacccggcgtccagccacaaccaggacagcgcacggcatcaggcgctgggcgaggtgcggaggctggtggacgcgtacaggggcgaggagctgagcatcaccgtgacgggccacagcctcggcgcggcgctagccacgctcaacgcgttcgacatcgccgccaacggctacaacgtgacggccacgggcgcggccgcctgcccggtgacctcgttcgcgttcgccagcccgcgcgtcggcggcggcggcttcaagaagcggttcgacgccgtcccggggctgcggctcctccgcgtccgcaacgcccgcgacgtggttcccaagtacccggtcgtgttcctaccacgacgtaggcgcggagctcgcgatcgacacgggggagtcgccgtacctgagaagccccgggggcgagcagacctggcacaacctcgaggtgtacctgcacggcgtggcgggcacgcggggcgcgcgcggcgggttcgagctcgccgtggcgcgggacgtggcgctggtgaacaaggcgtacgacgccctgcgggaccaccacggggtgccgccagggtggtgggtgccgctgaacaggggaatggtggagggcgccgacgggcgctggagcttggtggattgcgaggaggacgaggatgatgagtagtagacagcagacggagtaaacacttggcatgctggcggcagacaacatctgtagctgcccttgtgcgtcgcc

SEQ ID NO: 287 - DNA, 1421 bp, Zea mays
  misc_feature (1)..(416): n is a, c, g, or t
  misc_feature (1418)..(1421): n is a, c, g, or t
nnnnnnnnnnnnnnnnnnnnnnnnnnnnnnnnnnnnnnnnnnnnnnnnnnnnnnnnnnnnnnnnnnnnnnnnnnnnnnnnnnnnnnnnnnnnnnnnnnnnnnnnnnnnnnnnnnnnnnnnnnnnnnnnnnnnnnnnnnnnnnnnnnnnnnnnnnnnnnnnnnnnnnnnnnnnnnnnnnnnnnnnnnnnnnnnnnnnnnnnnnnnnnnnnnnnnnnnnnnnnnnnnnnnnnnnnnnnnnnnnnnnnnnnnnnnnnnnnnnnnnnnnnnnnnnnnnnnnnnnnnnnnnnnnnnnnnnnnnnnnnnnnnnnnnnnnnnnnnnnnnnnnnnnnnnnnnnnnnnnnnnnnnnnnnnnnnnnnnnnnnnnnnnnnnnnnnnnnnnnnnnnnnnnnnnnnnnnnnnnnnnnnnnnnnnnnnnngttccctggtggccgagcatagcccttgcgctcgcgccttctctgttcaatttctagaacacctaggtctgtccatggtcgctcccttcgtcgttggtgcgcggcgacctttgttgctccttctctggtgttgtccttccgttgtgcgtgacctcgccctggccgtgcagtagcaacaactatggcaacccctcggagtcgcgccctctgcttgctccatgatatgttgcagcgagcacgggttcttggtgtcgtgcgtgcgtgttcttccgcaagtcgcgcgccgggatcctggccgcgcgtccttcctgctcgtcgcgcccatggccgagcctggtcgtggtggtgttgtggtgtggcgatgtcgtgcgcgtcacgacagctgtcttggtcgcgaagcagtccgagccatagagttcgcccggccacggtctcgtcaaattgcgaagcttcctcgccgtgcgctctggcatcggctgccaccgattccgccataaagttcacgagcgctccttgctcggcttgtttcaccgtgggcaatttctacacgcttcaaatccgtgctgcttgcccagtgtgctctcgcacttcgtccatcgggtttcgtgcgtgctcgcgtttgtcgtcgagtcatcgaacccatcatcccctgctcgacccccacctcaccagctcgctctggacttcaactgaaggccgtcatctttcaggcaactaccaaatcgagttgtgatgtggtgagtgttgggtctatgcttcgtcgccgaaggtcttctaggaagaagcggctttcggctgaagctgtttgtataggatggccgaaggttcctctttacaaagcttcggcattacaaaccgacctaaagatagaatgaccttttagtccataaaggtctgagtcaatgttgtaaacttttatgaggggcataattgtaattcctcacaggctgtgtcctgtgcctataaatagtgaacagtattcctttactgttcacgcattcnnnn

SEQ ID NO: 288 - DNA, 1421 bp, Zea mays; identical to SEQ ID NO: 287
  misc_feature (1)..(416): n is a, c, g, or t
  misc_feature (1418)..(1421): n is a, c, g, or t
  Peptide Sequence Number=SeqID_9106
  Probeset Number=SeqID_14690
  Probeset Number=SeqID_14691

SEQ ID NO: 289 - DNA, 1725 bp, Zea mays
  misc_feature (1725)..(1725): n is a, c, g, or t
  Peptide Sequence Number=SeqID_9107
  Probeset Number=SeqID_14692
ctcgcgcttggtctgacctgacgcaacgcgtcctcgatccctgagataaagctcgcggcattcgcttgttccgccaaattcagtcccttgaatttcctgagctgtcgaagtttttcttctggttcgattcttcggagaccccctggcatttgtgggttcagccattgctcgctggtttgatccgtcctagttgccgaagcgcctgttgatttggttctaaaatacatcgttcgtccttccaagttcaaaaggggggaaaaggctcttctttttttggatcctgatttgagtgtgtcacctttgcttccggcaatggggaacaacagcagcagcggcggcggcaacaggcgtccggagcactcggagacggcgctgccgcccgaggcgtcgccggcggaagagctgagctcttatgaggcagctgccggtcggacccggagctgcgcacgttcgacacgacgctgcagcggcgcaccagccgcgccatctcgacgctggcggtgggcgtcgaggtgcggtccatgtcgctggactcgctccgcgaggtcaccggctgcctcctcgacatgaaccaggaggtggtgcgcgtcatcctcgactgcaagaaggacatctggaagagccccgagctgttcgacctcgtcgaggactacttcgagagcagcctccagaccctcgatttctgcaccgcactcgacaagtgcctcaagcgcgcccgcgactcccagctcctcctccacgtcgcgctccagcgcttcgacgacgaggaaggcagcgacgccgccgccaccgccgctccctccgcccggtacgcgcgcacgctgcacgagctgcgccagttcaaggcggccggggatcccttcacggacgagttcttcgccgccttccaggccgtttaccggcagcagctggccatgctggagaagctgcagcagcgcaagcaccggctcgacaagaaggtcaagaccatcaaagcgtggcgccgggtgtcaagcatcatcttcgcgaccacgttcgcggccgtgctcatctgctcggtggttgccgcggccatcgctgccccgcctgtcgctgcggcattggccgcggccgctgcagtcccgctgggatctatggggaagtggatagattctttgctgaaagggtatcaggacgcgctccgtggacagaaggaggtggtgagcgcaatgcaggttggcacgttcattgccatcaaggatttggacagtatcagagtcctcatcaaccgggtggaggtggagatcagctcaatggtagactgtgtagagtttgcggagcgggatgaggaggcggtgaaatttggggtggaggagatcaagaagaagctggaaaactttatgaagagtgtcgaagatcttggggaacaagcagaccggtgtagccgggatatccgtcgggcaaggacggtcgtgctgcaaaggatcatccggcatccaaactgaaaaataaggggaaatgtaagggatccagtgatagcgatgctcatgaaagagtctgtggctgagacgagcaagcaaacaccaccattgcccaaaagcaacaaataatggtcgtggtcttatgtgaagaagaatttttctagttgtccactgtccaagtctctactgtttatagttaaggtcaccggaagagttgttattttctggttacattccattctttatatgggttacttatttttaggttatcagattaaatctgctn

SEQ ID NO: 290 - DNA, 730 bp, Zea mays
  Peptide Sequence Number=SeqID_9236
  Probeset Number=SeqID_14693
atcagctaccgaccaacccatcctcatgtcccttagtgccataattccatggggagaaatcgagaccaaagccctgcaactcctcaaggggcatggagccaaagaagaacttgaagcttggcaagtcattcagtcatcttccgaccaacaatgatgatcctatggacactgattattgccagggtaggagaacagtcacaaaagaaaggtggtgcctaggaggaggatgaagaggacttcaactcctacaccgccatcttttgacattgtcaatcatgaggatactaagagtcatgaggagcaaaggtaggtatggggtggtgatggtggtagcagcgatgaggagagcaacatggaggaggttgatgggggcatgtcccatcaatttgagttcacaaccagcggagaagagggagttggtgtctaggcagttttctagggcagttggagccaagcggtgcacttagatgtctcttcgcgctgatgccacactttcacactaggacacagtatgaactttttttagaaaactttaactagccaccaatgcatgatgttcagttataaatgtttctctctttgtggcatttgacaattagtgatcctactgagaatctgaaatgattttctttatcaaacacgcccttaaagttctactcgggcatgtatctagtcagactaggaaagcgtcaactggagtatataatgaaacataggcaggcaagcttcc

SEQ ID NO: 291 - DNA, 884 bp, Zea mays
  misc_feature (884)..(884): n is a, c, g, or t
  Probeset Number=SeqID_14694
atatatgatcacaagtagagctagtggccaagcagcttcctgggtttccatcggggatggaacgaggagagaacattattgagcagaagcaagctggtggtggtggagatgctgcgaggagtgatgagagatcgtcatcccaaaaggtcgctgatggaaagggcgccgaaccgccggcggccggagtctcgaaccgcccaaagcctagcgacgacgcagagaagcttgttgcgttcatggaagaccactacgacgacgtcgttgcccgcgtgcaatccttcgacgagttctaccacgccattttcgagctcatcgagatgttctgcgaggaacgtgggcagctgcagtacaggttagcggagaagaaagccctcgaggaggcatacaacaagcaccacaggtcggacggcaaggtgacgaaggaggagttcgaagcgatgagcagggaggtggtgaaggcgggcagcttcagggtggggaaggcgagcctggagcttggcgcgctgctgttcggcgccccggcgtgcgcgctgctggccaagaggatcctgccgggcctgggctggctgtccgacgacgtcgtcgtgcccctcgccacctccggctccgtcgcctacctcatcaagtccaagaggctgtgagcctagctgtgactgtctctgtggaccaagagagggttctgatgtgtattatgagattaatttgcacacgtacgtgcggtgatcagtaagtaattcgaaacatccataggagtatacgacggagagatacgtactatgatgtgcgcacatgtggagtggataggactcgatctgcagctgaaacaagcgaagaattatatatataagcatgaaatatgtatgatatgtgttagaaatttagcn

SEQ ID NO: 292 - DNA, 806 bp, Zea mays
  misc_feature (806)..(806): n is a, c, g, or t
  Peptide Sequence Number=SeqID_9237
  Probeset Number=SeqID_14695
aaaaaccagacggccaaggcagcccccaaccccggccccagccggcagaccatctcgatacgcggccgccgcagacgagatggccgccggggacgcaggccgcgcgccgacggcagcggccgcgcaatcgctggtggagtccttctgcggcgtgacctccgcgaccccccaggwtggcggccttctatctcgagagccacaactgggccctcgaatccgccgttcgctcctactacgactccgtggacggtgaagccgacgccgtcgcggccgatccagtgcccccaccaccagctgcaccagccggaggcggggaggataccgaggatgaggattgcgtggtcggcggtggcggtggcggcgacgacgacgaggatgatgaggactacgtcgatggcgacggcagcgatgatgaggacgctgcgctcgcggctgaggccgcggaggaagaggagaggaggaggcctttcaagaggctgaagagaacccacgacgcgcggggtgggagcggtagcagtgccaaggcgcgggggaatgtgaggacgctcgccgatctcgatagtggcaagggaaccgcgggttccgacgagaactccgaagacgatgatgaatggacaccaccgcccgagtacgagacgagagatcgatcaagacgtaaaaacaacacagatgagatcttcaagcaagctctaaacgcgcgcgtgcgtgtcgtagtcagtagtctacaactctacatagtttatacgtaccctgtttggctgtcttccttccatagggagcctttactggagtacatggggaatcan

SEQ ID NO: 293 - DNA, 696 bp, Zea mays
  Peptide Sequence Number=SeqID_9238
  Probeset Number=SeqID_14696
aaaaatccccttgtctcgccaataaaggaccacaccgagctcctccacatcctcaacctgcttcgtgcatgtcgtcatcacctgcagcttaccatcctcctctcacgcctctactcattattgttgtgccgagcccacaccgcatatgctgctgctacgccgctttccgttgctctgcatcctcatcggagctccgcgcgccaccgtctgcgctgtatcgatatcctgtgccgcgccacgctggagctcaggccatcatcacgccacgcctcgctgacttcctgcgcccgaccgaccctccaccggtgccttgctgcttgttgaacccctgtgtctgagcctcgccaagcgtcgtcgacatcctccactcgcttgctgcttgcagtgtgttgcaccaccacctgttgtcgtcaatgcatcgtcgactccgtactaattcctcgcgctggagcgtcctttcccttctcacacgttgtaattgcctacacgaagtcaacgtgcactgttgctccctcgcatctatcaaagaagtttgcagatgaagattatgatgatgaacttgatgaatgctagtctagtgatacccccagtcatcttcctgtggaaggatgcccatgttctgttgtactttgatgaataaaggttaagacattatgtcgatttgaagtgtaatatgctaatataacctttatttac

SEQ ID NO: 294 - DNA, 775 bp, Zea mays
  Probeset Number=SeqID_14697
aaaaaattcttgagtcttgactacacactaagcttgatttcacattctgctctagctttgcgacgtgcgtgcccgagtgctgtttttgacgtgcccatgcttgagaagaagctcacggtcacgggcacgggcacggccatggccatggccacggagaaaggaaggaagccggggctcatcacgaagacgctgggccggtgccgcggcgcgcggcggaggagcaggccgccggcgccggaggggtgcttcgcggtgcgcgtcggcgcggggcggcagcgcttcgtggtccggacggagtgcgtgaaccacccgctgttccgggcgctgctggaggaggccgaggaggcgttcgggtacgcggccgccggcccgctcgtgctgccctgcgacgccgacgccttcgtgcgggtgctggagcagatccaggaggaggaggaggacgctgctggccaggcggcggcggccgtggcgaggtgcggccttgtcaggggccactccgcgtacagactgctggtcgtccccgcccccgcccgcccgctcctcgtcggccggtcctagtctgtagtcctcggctccggccagcctgggagtgggagtgggaggtgacgacgacggtgcttcacctgatgattgcaccgagcgagatggatgtgttactgaatactgatatgagtcgtgtgcaaaccgtgtagtatgtttgtagatgccagccgccagaggttggtggttcgtgcgtcgtagcagttgatgagttcttaagctctagtttttgttg

SEQ ID NO: 295 - DNA, 1204 bp, Zea mays
  misc_feature (1)..(54): n is a, c, g, or t
  misc_feature (1141)..(1204): n is a, c, g, or t
  Peptide Sequence Number=SeqID_9239
  Probeset Number=SeqID_14698
nnnnnnnnnnnnnnnnnnnnnnnnnnnnnnnnnnnnnnnnnnnnnnnnnnnnnnaaaagggtgactccattgctccacccaaaaaaatggcggcggcgccggaggagctgctctgcgcggcggcgaagtccggtgaagagggcgaagtcgctaaactccttgcttcaggagctgacgcgacccacttcgatgccgacggcttgacgccgctgatgcacgcggccgcgggggggcacgccgccgttgcgcgcctcctcctcgactgcggtgcgccctggaacgcgctctccccctcgggcctctcggcaggggacatagcctccgaccccgacacctacgacctcctcctcggccacgccctccgctccgagctcgtcctgggcaccgtcgcgcggcggcaagcggcccccgcgaacggtcccccggccgagagctacctcgaatccagggtctcgttcagcgaggagagggtgatggacgcggagagcaaggcggtgatgatggcgtgggagcggccgctgatggaggcgcacgcgcgggcggtgtgccaaggcggcggcaaggtgctcaacgtggggttcggcatggggctcgtggacgaagcgatacagaggtacgggcccgaggagcacaccattgtcgaggcccacccggaggtgtacgagcggatgctcaagctcggatggggcgacaagaagaacgtcaggatcgtgttcgggcgatggcaggacgtgatgccgcagctcggatcttatgacggcatattcttcgacacgtacggggaatactacgaggacatgagagagttccaccagcaccttccgaagctgctgaagcccggaggcatctactcgtacttcaacggcctctgcggcgacaacgcgttcttccacgccgtgtattgccagctcgtcgcgctggagctcgcgaaccttgggtactcgacgcagttcatccctctgccggtcaaagattgcctggcggaggaggtctggaagggcgtgaagcggaagtactggcaactggacacctactacctccctgcttgccagccagaatcagaatctactatcagttagtgatgagttatttctagtctgcttctgaagttagttgtctgttttgagctacgtacattttnnnnnnnnnnnnnnnnnnnnnnnnnnnnnnnnnnnnnnnnnnnnnnnnnnnnnnnnnnnnnnnn

SEQ ID NO: 296 - DNA, 520 bp, Zea mays
  Peptide Sequence Number=SeqID_9240
  Probeset Number=SeqID_14699
atccccatccactctactttacaccgcagcagtgagccagccactgagccaccaagttaactctgagcgacgtcaagcaccaacgcacgacgaccaccaccaccacctcgagctacaagctatggcgaacgttctcctccgctcttcgtcccttcctctggccctggtgccgccgccgctgctgcttctcctggtagcgggatcgctcgcaggggcaaccgcgcttggcagcttccctggggaacgtcgtggtcgaagcctgcagcagctgccaaacccgatgcctcagcctgtcccgcagccgcagccagacccaaacgtacggccgcaaccggggtcgccgaacccactgccaccacagcccctgccgcaaccaaatccaaaccctcagccgcagccccttccgcaaccacagccaggcccgcagcctgacccaaacccacaacctcaacctcagcctcagcctctcccgcagccacagcctggcccaatcccgccgcagcctgacccgaaccggaac

SEQ ID NO: 297 - DNA, 1163 bp, Zea mays
  misc_feature (1)..(1): n is a, c, g, or t
  Probeset Number=SeqID_14700
ncaatagtttcaacatatcaataaattctgaaactctctaatcacagaaatgccatggaggcatggacaagaaatctacaaatggccagcccttcagaatggtggtaccgttcatttatttataaggtcgggctcagttatatctccatgtaaaataaaatttctatccctccctattacaaagttgctttaatatttaggagagtacaacaatgtcatattgttgcataggcgtgttgggcacgtcttctctttgtagacgctcccttaatcttctcttctccgaaatcctttactatggagccgaaatcctttatcttccttttcatgtatctttggcttgtctgtgtgctccaaagctcttcaaagagtttttttttcttcggcttctaacaaccataacataaaaaactatccaaacatagatttcattggcccccaacagtatcccacgcgggattaattcgttttctataatgagttcaaactattaacctaactttgttttatcatacagtttttccatgccttgtcattgaaacctagtttcctttgccttgttttaggggctaaaactgagcaaggtcctcaaagcacaaagtgatgtggaactctcccaacttcgaaaagaggtcagcgagctaagaaaagacaccgcgaaaaacactaaaacgctaactactttgtccaaagattttcttgaatgcaaaaacatggtcaagggtctaacggagcagaaggatgtaattcagtctgtcttggaggccaagtataaaaggattagtgccgaagccatcaagaaacaggaagaaaacaattcagaaatttttgggcttctacatcagcttgtcgaaggtaacaagaagaatcatgatatctttgacgaacttgctgaagagaagaaaaagaccactcaattgctaatatccatggctgctatgcaatcaacagtggattctctctacgacatatgctcatgctgcaagcaacacatgtatgataccttatctttggttagggcacgaccgaagcagatgatcttcaaggatgcggataccagcaaagctcttagatggatggatggcgaggttaaaggtttttcccctgtcttggattcaagtggtgactactacgccttggccaatgcacgaggcattgcctgc

SEQ ID NO: 298 - DNA, 1183 bp, Zea mays
  Peptide Sequence Number=SeqID_9241
  Probeset Number=SeqID_14701
aaattaaatcatatctctcttgtttaatcactttgaatttgatcatttgttgttttgcaacttgctgtatatgcatgcgtgcatgcatgtgttcctagatcttagcgcagcggtctttgttgcatttcgatctcctttaagtaatttatttagtaacatatataaagtgtcaggggtcccaaatcaggtaccatctctctatgtatatattatctctagcaattatattgctctccttggatgccctcaattttctctttgaagtttggataagaatattaggatcatcaggattcagttcaaaatccaatactttcttcttctttttgaaatgaataagttgcatacttcctccgtttcaaattgtatgttgctgtgatctttttagatatatagtcagaatttttgttatatatttaagaaaaacaaaaacaatttacaatctaaaacataaagggtacttattatagagcagagtactagatatttagatagcgtatatctaggttatatataacttacaccttgtttaagagctaatagttacttgttaaaattagttagagatatctaatcaacctaactaatagtctagctattagccacttttagtcagaaacatccaaacaatctatctaatagtccaactaactattggctacacctttgactacctattagttattagctgattcaacccactaaaattagatgatagttagccagttaattttactaccaactttttagtcacctaactattagcactagtgcattcaagcggggcctaagacctgtttgaatgcactagagttaacaattagctgctaaaattagctaaatagcctaactaatagtttagttattagctacttttagttggatacatcataacaccctagcaaatagtcgtccaactaactattagctgcaccttcaactactcattagttattagctgattcaatccactaaaactagctaactgtttgtcggctatttattagttagctaatttcattaccaatttttagctagctaaccatttagctatagtgcattcaaaagggccttaaatctgacaaggaaaaaggacatagctagcagaagaactcggccgataagattcaagagctgatgcatatgcatctagctagctagggcggtctgatctactgctaat

SEQ ID NO: 299 - DNA, 984 bp, Zea mays
  Probeset Number=SeqID_14702
aatccactctcttccctagaacaaaaatcttatacgtcatcttcttcgttgtggtgatgcacgactccatggagctccccagccgagcccctctcccatgcgctcggacctccccttgtcggccatggacgtcgcgtcatcaggccgcccttctactatctccctgctcgcccctgcctcttcttccttgagccgcgcctccactgctcctccaccaagcctcgccggcgtgctctcctggccatggtcggatctggcctcttgcttcccctccggtacgttctcgctctcagctcgtcgcgtcgccctggcctccatccgagctcgcccaggtcggatgaggatcccccgcgagctcccctcgacaaccgccgctgcctccctcgtcgtggactccgaccgtcgacctcatccggacctgcagcctcgtcgagtcttcttccttgttggctgtcgatctccctcagctgctcggctctaattccaccgatgcaacgtctccatggctgcggacaacgtcctatgctggcctcgtgcacgtggtccacctccgtgcacgccacgccttgctttagctccgtgaggacgagcagcatgaccgtggtctacgtagtcgaggcccgtcatcattccgatgttttgggcagctccgaccattatcgtcgtccgcgctgctgttgtagacatcgtgactcgtgcacagcttgttcgacgaaatacccaagccaagtggacatcacatacaacttgagttgtcctggtcagtgtatagtttaatcttcatagaattagttcttataaattataaaaaagttgtagtacttttcttaagctttttataaattcttggatcaccatttttgtggtatagaggctaagttatagctgtttgaagtgtgatccctgaatctgtccaaatctagatagcagagtctttctcatgtcttttgactttgatacaccttaaatgaatctgagatgttt

SEQ ID NO: 300 - DNA, 984 bp, Zea mays
  Peptide Sequence Number=SeqID_9242
  Probeset Number=SeqID_14703
aaacatctcagattcatttaaggtgtatcaaagtcaaaagacatgagaaagactctgctatctagatttggacagattcagggatcacacttcaaacagctataacttagcctctataccacaaaaatggtgatccaagaatttataaaaagcttaagaaaagtactacaacttttttataatttataagaactaattctatgaagattaaactatacactgaccaggacaactcaagttgtatgtgatgtccacttggcttgggtatttcgtcgaacaagctgtgcacgagtcacgatgtctacaacagcagcgcggacgacgataatggtcggagctgcccaaaacatcggaatgatgacgggcctcgactacgtagaccacggtcatgctgctcgtcctcacggagctaaagcaaggcgtggcgtgcacggaggtggaccacgtgcacgaggccagcataggacgttgtccgcagccatggagacgttgcatcggtggaattagagccgagcagctgagggagatcgacagccaacaaggaagaagactcgacgaggctgcaggtccggatgaggtcgacggtcggagtccacgacgagggaggcagcggcggttgtcgaggggagctcgcgggggatcctcatccgacctgggcgagctcggatggaggccagggcgacgcgacgagctgagagcgagaacgtaccggaggggaagcaagaggccagatccgaccatggccaggagagcacgccggcgaggcttggtggaggagcagtggaggcgcggctcaaggaagaagaggcaggggcgagcagggagatagtagaagggcggcctgatgacgcgacgtccatggccgacaaggggaggtccgagcgcatgggagaggggctcggctggggagctccatggagtcgtgcatcaccacaacgaagaagatgacgtataagatttttgttctagggaagagagtggatt

SEQ ID NO: 301 - DNA, 870 bp, Zea mays
  Probeset Number=SeqID_14704
atttttgctgagtctcgacatcgctggacagttcaggatgggagacaaaggactgcgacatgttcaaagaggaaaaagtggaagccgtcgtcatctccgccaggtcgtcctcgcttctgtcggtccatcggcggccatgctatcgatacctccgcagacttcctatcctccagcacgttttgtcagctgctcgcacggtagggaaggcagagggtgggcatgtcgtcctctcctctgcaccacgtcatccacgatgatggtggagcagactgcttcagtcgccattcgtcggtctccgctgctcctccacacgtttggtcatcgtctctacggttggcacaggaatggaggtcggcgattcaggtcgagtaggagcactctacggctctgcattgctactggtggtccaataatcacaccttcacgatttagtggatttccctcatccatatctccactgacgtcagaatattccttatcccgtcgtcatgaggtcttactactttaggtctctaaattgtatatgctttttggagtaatttgctttgttttgatgcctacatgttagcttcgaataaagatactttccctgcagctttgaaaaagagttgctgaaaaaaaatcaggacgggatgggatgagacgatcactcaaataagattgtttggtttaggatcaagggttgggacaggattatcccagtgttgtccccagttgtccctcaaaattggagggacgagagaggacgccgggggacagccctgtcctaggtgtcccgcaaccaaacgcaccaaagtgttcgggctgcttgctttgtactgatgtaagtttccattaggcaatcacaaccattccacaaggaagcaggtc

SEQ ID NO: 302 - DNA, 537 bp, Zea mays
  misc_feature (450)..(450): n is a, c, g, or t
  Peptide Sequence Number=SeqID_9243
  Probeset Number=SeqID_14705
aaatcaagaaaacagtcgtctccagtttccatgcagagcagaaaagatcagctagcgagagaagcaatggcgtcggctcctgcgttctgcgtcgcgctgctgctggcttccgtcgctgccgtccaagcggtgccgccccaggccggcacgtcgtccacctgcagcactgacctcctccgcctcctcccctgcytgcbcttcatcgagggcaccgccaccgtgccggcggacacctgttgcgccaacctgggcggtgcctcgatgaaggcagagggagattgacgctggcgagagcaagatggaggaggtcgactaagctgggtttattcttatggaggaaagagagagaacatcgggtctgttctgtgggtcttmccacttatgctattatgcaatctgttgttggtatgctagtgctactattgtytmtgctgtcttcyagtwamyyynkgytgttgttttgcgtggtcagtttctcatcgcatcagtggtagaaaacattcacctgtggsactaaaaaaatgtttttgactgggt

SEQ ID NO: 303 - DNA, 1808 bp, Zea mays
  Probeset Number=SeqID_14706
gcgttagttcgaccaagaatggtcgagtggaggggctggggagtggcattgccgtcacagcacatgtgggtgagcggcctagtcgccggggcaaggagtgcgggaagacggaaaccccaacgttgctgtctgcctgcctacaaaggcgtagaaacctattcgattctgtttgcccgtggtgcccacgacggaggggatgtcaagctccgtctccttcctgttgttgaagccagcggggctacggaggggatggcaagctccttctccttcctgctattgaagccgtcagagcttgtggaggcgctgcacaactacgacacgacgactagctctagcctccgcaccgaggacatcgtcaacctgtagcccaccttcgtcatcgaggtgctcaccctcgacattggcggtcagcctcctcctcatcgcgcttgtggtggtggcggaagccaacatcgctgctggcaatgttgcgggcttggggaatctctatagctccaggaacaacccaacacagctcatcgggtgatccgccagcggtggcgacccctgccctaccaagtggataggtgtctcctgctcgggctccatcgtcacttcaatgtaggcagattctcaaacgacaagatattttgtctgtcacattgagctatgcttctaacattcctacgaaaacaccagtgttttctcttttcttctccaacttcacttcggctcctttaatttggcacgaccactctataactttttctcatgttgtttgcttaaaagtttgttagtgtgcttagcatttacatgtacatccatccaccattgttgccctgcttttccaccaaaaaagggtcatcactactgtaatgaccaaatgagtattataatagctatcagcatactgtgctggggataatatagatataacactttgcttttacatggttgctatgatgagagttatggtcatacattatgttgttctgcatagatagtattaaatgttgttcagcttaattttgtagccaaatttttcataacataccagttgccatcaaaccttacctttatgtgatgcctcataacctgtacatattattcatgctattcgattcttgaaatttgattcaaagcaaatacatgaatctggcgaaaaatagcttccctgggtcaatattctatatccaacttggtttcgcttgagcaccagtaagtttctgtccaatgtaaagatgtaattctttctgtgttgatcttgttagttaacacaatctaactgcaatgaactgttgggtgcaatgcagcaatctcagccccaattcgctatttcagcaaattgttgtactatttggaagcctcaattcactttcagagttatgcacatgaacactttttttaacaaaagacatatggtcctcgtcgatgaggaggtacacaaccatcttactgcatgaagcttcctgcgcatcgagagatagcctccacaaatctgagtttgaacacataacagatgatattcttaagctggatggatattttgcttagcttttgtggattgaagtggacctgacttgtagtttgctgaagtctatgtacataactgtgtggattgcatcagccaagctatgtttaccaataccatgtatatacatcccactgtgatgtgtccctacgtgcgacgcatgacgtagacttagatcatgtcaccttattttggatcagcttgctactgtgatgggactgatcgttatactatgtcgcacctctatgtatggtaacttgctgaaacagaaaacaactgcaactttaatcgctgcttc

SEQ ID NO: 304 - DNA, 505 bp, Zea mays
  Peptide Sequence Number=SeqID_9244
  Probeset Number=SeqID_14707
atgacgctagaagaaaaaccacccactcccatgttcgaccagtccccactctcctctcccctctgcgcatggatagccatgcctagcacctcgccagaaccgtcgcagcagccagagcccgtcgtctccacgaatccggcggttccagatcgtgagcagtttccgagctttgagaaatcgacagtcaagcttcggcgaccaagagattgaactcttcgagttctacgagatcgaagaccctgagcatctgtttggtgaaggtactccttaggatgattggttgttggtgtgacttggcctccatccctgccaccgggataaatggtcgagtgggttactgcttccgcaggagaggaccaggaggagtagcgtggccaggcttcgccatgttactcggttatctccgttagttatttccgctgcattaaaatttatggttattatttctgaaactccgataatgtaatcactaatgatacttattaaatttgtggtattatgtttc

SEQ ID NO: 305 - DNA, 913 bp, Zea mays
  misc_feature (1)..(1): n is a, c, g, or t
  Probeset Number=SeqID_14708
ngacatcacactagcacattaatttattcaacgatcgaattatcctgaataactcatcggcttaccacgaccaaaacgatttgataatcgcagatcgacgatgaatattagtttagacttttcatcgaacacttggcaggggttgtgctcaaagacggcttccaggggaggagcgcgacgtggactgggcacgaccacaggagatgagcgcagggctgtcttcggcaggactcgagacggctcatcggcgtcggggcttgaagaccacgaccgacgcaggaaagatttggacacagtccggcgagcttccatgggcgacgtccatggatttgaagctgcgatgccatggcgagctgggacgcgcgcgactaaagggagtgtcgcgccatggatggaggagcagagagaaaagcaggggcgagcagggagaggacttggcgaccagcgcgcaggggagttcggcatgggcgcgacgagtagagagggaggctggagtgcgagccggggctgggattgagcacggccaggaactgaggcgtgcacagggaggagcagagggactcgactggcgaagctggccggaaggtgaggtgaggacgacatccatggcgaggtcgcggccaagtcgagcggggctgtggccgggcgagcttagctgggcgcagggagaagcgtcggcgagctgggagcggaagggagctccggccatggaaacgcagggggctggggcggccatggggagcaggcagagggagctccgagctgggcgagctcgtgcgcacagccacggagacgagggaggagcgagttggagctggaggccgagctggagggcgcgcagggaggggagaagcacagggcgcggcttggaaaaaatcagggcggcagctggagattagaagtttagaacgat

SEQ ID NO: 306 - DNA, 1298 bp, Zea mays
  Peptide Sequence Number=SeqID_9245
  Probeset Number=SeqID_14709
gacacccaaaccctctcatctccttcgtctcctatcctatccctgctcacgctgccgcgtgccgccaacaaatccccagtccctgctcttgtctcctttgtctcctatccatgtccctgcttctcctccatcgaggtaagtccgttgcggccatcatgcgaatccgtcgaaaaccagggagactcagtcgatgtcagtccgccagtaaatccatcgaggtcagtccttcagcagatctgtcgtcgttgtgctccttcccattcccttcgcccagttcgtgcatcaccatgacaattctccttcgtcgtcgtatcccagatctccttccccttccccaccaacatcccatttctcctcccttccctgtccaccgatggcacaccagggagatggcttctatgatttcttctcttagggattgtctactgaaatgatgaaaatgccgacgaactaaccctctttcgctcttcgtttgctcgcattttatcctcaatgggaaaggccatggaaaatcctaacctcaactctcaggatgatgacacctttctctaccttggctcctactctagattactccaacccaaagctgagctacctgagcaggggctcccccctttgcccccgacaagtagatcttggtatgcctcctttcatccacctagattgaccactggtacaggtcggtctcgccatagcagtgcaagaccctctagtgggtgtgctcggtcgcttaactttgaaggcggaaccaatagacagggccttagaaccagtcatgaaggcaccacgccatggataggaggtggtcgtcagtttatcggctctgcagatcaaggactcaagatgaatgttgtagggtgtggcagagaaaggacttgagatgaagtttttgaacccaatgcggatgaggataacgatgacaacacctcaaacatggtaagattgtataggtcatttcatttttttgtccaacaactacatgttatagtaatatgaaatcctggattgtacactctttagtgtgcacatgacaacctatttttgtatttacaagttattacaagttaggcagtttactaccacaaccactttgtagaatcttgtatacatatgtagaatcttgtttataagttatatcttgatatttgtttacatgttaggcagtttactgcctaacatgtagaatcttgtatacatgttatatttatttacaagttaggtagtttattgatagagtgcaaatgacgacagtttacagattttgtgtattagatttttttgtattagtatatttgtct

SEQ ID NO: 307 - DNA, 719 bp, Zea mays
  misc_feature (1)..(1): n is a, c, g, or t
  Peptide Sequence Number=SeqID_9380
  Probeset Number=SeqID_14710
ngaaagaacagagcataggacagggattgaacgtgagccaacaattgaacaagtcctaagcactacaattagcacaagtcttccagcaggcctgcagcggctccagcggcctgcactacaattgaacgtgagccaacaatcttcctaagcatagaacaattaaacgtgagccaacaatcttccagcaggcctgcagcggctccagcggcctgcactacaattagcacaagtcctaagcacaattagcacttgatttggtgtgaatccttaggctccagcggcctgcagcggctccagcggcgtggccgtgctggcccccgcgcgcgctacgccacgcaccagccggccgagcgcaggatcggctcaatcgaaggattcacaccaaatcaccctcacgtccaccctaaatcagttcaatcgaatgcccacagcagcgatccagtcgaggattcacaccaaataaccctcccgaccacaacaaatcaaaccgaatctgggagccgcgggctccgctccgggcgccgcctcctcaccgccggcgtcgaggtgtccaagccaggcaagcacccctccaatcccgcggacgcgcgaaggcaagatgagccggaggcagatgagatgcggcggcagagaaggttggggaagaaacgagcgaagggagaggagcgtaccggggaggggaatggacgcgctgtgctcacgagcgtacgggttcgggt

SEQ ID NO: 308 - DNA, 520 bp, Zea mays
  Probeset Number=SeqID_14711
atccagtcgcatctccctctccgaaatcaaggtagcgtacaccgctgcagtttctagagccctctctgccactcgtgatcccactagtcacaatgcctgccctcgccaagcccgcctcccgcaccgccaagcccgccgcggctccgaagccgaagcctgccgccgccaagccgaaggcggccaccgctggtgcctcccacccgccttacttcgagatgatcaaggaggctatcacggcgctcaaggagaggaccggctccagctcgcaagcgatcgccaagtatgtgggggacaagcacggcgcgtctctgccggccaacttcaagaagatgcttttccatccagctccgtgggtccgcagccaaggggacgagtgaaatgttgggtagttttgattgtgctctgctggtgttgaagatgttactgagattgatgttcttctgtaccatttctatgcttatgatagacttttcatatggacaaaattatgctatgagtgaaaagagttatggggagtgcc

SEQ ID NO: 309 - DNA, 1501 bp, Zea mays
  misc_feature (1501)..(1501): n is a, c, g, or t
  Peptide Sequence Number=SeqID_9381
  Probeset Number=SeqID_14712
ccgccccaccacctgcgcgccttttgcttcctcaacccctcatcatggaggaggatccagcaggcggcgaagacctctcttccacggccgccagcagccgccactcctactccggcgacgacggcgaggagagtggctggacgtcctacatcgactacttcatggagacgcagcagcgacgacgacgacgcaagcagggggacgtgagccgtgctgctggtgatggtccatccaccgacgacgatgctgggcgccgccgcagctctacggcggagtgcagtagtggcgctggagtgggagcctcgtcgtcatgcctgcccccaccggtgctcgtcgacccgccagtggtggtggtgtcgagaaggttgagcctcagggagggctggaggaggaagaaggtcctgcacgatgagtccttggaggatactgccacgtctcctatcagtagccctaagttgattgagttgagggatcccgacgacgcgacccaccaccagacgaaaacgagttgctgtgctgagatttcgcgttctaagcggaagaacagtacaggcggtgatgtaaacaacggggcaaacacaagaacagatcacacggcggcggtcaaggaagacagtgcagcatatggcaacgatgaagaaataagcaggcctttgctcggcccggcctatgcctgcttctcgtgtatagctgatgatgatgccaacaaattcattggttgctagctgaaaaacaacacccacacatgcatatatacatgtaactggcacacatgagaaaattaaaggtagctagctagagagtcttgtgaaggttagccattccgttcctgtttgtgaaaagggtacaaaagctagctttcacttcacacatgagagaagaagctaaggagaagaggtacaggctgctgtgggtgggttcgatggtaggtgagacatcacaatgctatgttagatatggggtctattccatctatcttgtgaccaagatttttatcatcagttacactcttctgttcatgtgcatgcctgttgggggccttcgtcctccgaaggtcctcaaaaacatgatttgacaatgttttccgagtggattatgtgaacaggtattttcggatccagaattatgaatatggagcacggccaggacgaagcctgaaccagacgaaggtcgagtgtagccgaagctgtgcgcagggaagcttcggcgcgatggcagaagggggaaccgactcaaagatgaaaagacttcgggggcctcgacagatttccataagccgttaacaaatgtaatggacatggatgtaattttacgtgggctgcgtcccgcgtctataaatagatgaacagtactcccgtactgttcacgctgacttggcatttgcttttggcatcacgctcgtgcttttcaccttctctcaggaccgaaggtacatttgtaatttggaatcatttctgtttttccatgttaataaaatagaaatgattctatggtgatgctn

SEQ ID NO: 310 - DNA, 1010 bp, Zea mays
  misc_feature (1)..(2): n is a, c, g, or t
  misc_feature (1010)..(1010): n is a, c, g, or t
  Peptide Sequence Number=SeqID_9382
  Probeset Number=SeqID_14713
nnaaaacggggaggctcccctccccaagctcagaccttcgatccgttgctcctccacggcgccagccgccagcgcctccgttcctcaacgcctgtttgtccttgcatggccggagccagacgtcggcaccttgcctccaccctcgcattccgatcacccacttccagctcctctccgtctcgctgctcctccactagcagagctgagctgatcgatggaccacgagcagcggcgccagcggcagcagcacagtcccagaggcaatgctcctgggagcgggaggtgcggctcctcgtcgaggaagcacaagggcgggggcaagaaacccatcaaagtggtgtacatctccaaccccgtgcgcgtcaagactagcgctgctggtttccgcgccctcgtccagggagctcaccggccgcgacgctgacccctccaagtacagccccgaggacctcgccggcgccgccgtggcggcgggcgaccctgactgcggcaccgcccaggggctcagccccggggacacgacggctgcgtcgtccgataccatcgtcgccatccccagccctgccgcggtggaccacctgcacgagcacgacacctcgcccgcggccgcgccggccgacggcggggactactacgacgacgaggaggaggacgagggtggcttcgggtcgcagctgctggagaaatactacacggtcttctcgccgccgacgctgctctacgaccaccacccgcacaacaagttcccatatggttaagggcacatccgcacatgtgtgggggaggaggggattggagtgttgctcctacacaataccggtaacgaaacatcaggtaatgggtctgtagcatgcagctgcctgtgaatacgtgatagttctgtatcggtcctgcaattggatgtgttatttgtcccgtggtcgtagcgggagtagtaggcatgcatgatagcatgtacgcaatgaacacgatttgtttatgctggcgccagattaagtcaatcagagaan

SEQ ID NO: 311 - DNA, 805 bp, Zea mays
  Peptide Sequence Number=SeqID_9383
  Probeset Number=SeqID_14714
acgtttctcatctctctcctttctctctcccttgctttttctctctcacgcacaagcaagcctggcagcaggccttgccgcgcccgagcgcctctgcaaccgcgagcccaacgccgacgcgcaagtaacggacgcgacgtcgcgggaagccgaagaccatcaccgcgcgaccgtttcgaatcttgttaatggagttttaattcttccgttctctcctctcattcctcctcccattacgagcaggaaacggcaactccattgatggtccatgaagaccgccggcgacctctactctccctccctctcctctataaaacgacgccgagcttcatctcgcctctctgctcactcacacaagctttcctccctcgctgctcgccagaccaccgaacgtagcttttgccggaataccattctcccctgccgcaggagctccgaccccggcgcgaccaccattggccgaccctctgctcgacgccccgagcgaccccgtcgctggcaaggaccactcggagcctgccatagcgcctcgacgaccctccctgctcgcccgtcgtgctcccatctatccctgcgtaacaaggtgaacacgatttcatgtgtaaaaattatttagacaaattgttccaactcaaaagaagagaaaataagcccacacacttttatgtgctatcatgatctaatttctataccgttatgtaattttttttgcatatttagttcgttgtaatatgaacacatgtggttccgatttatgtatatgtgtatgagcgttatggaattgtttggtagtttcaagtgattg

SEQ ID NO: 312 - DNA, 1017 bp, Zea mays
  misc_feature (1017)..(1017): n is a, c, g, or t
  Probeset Number=SeqID_14715
aggcacgactccatccccctctctctttctctctctctcttcgacgactccgccgctgtcttccactcgggggccgtcgtcttctctgcctccatctactcgggggccgccgtccctgtcgtcttccgcccatcactgtcttcttcgttccaccacacttgggagtaagcccccccccccccccccatttcctacaacctagggtttcttgttcgttgtcttgtgatttcttggttgagtcctcaagttcgtgcgccgtcttgaccttgccagccgccaagttcagtttaggagctgtgtgattggtatatgtgtgccaagtccccaagttctaaagggagctcccaagtctgaggcgtccctgtccctcctgtcactggtcgctggcgcgctccgcaagcctacaactgttgcgcattcatgagtaggctgcacgaacgcagcgatggatggccagccaggtgctgcggcgtcgtctagtcctggtcggagagtaaaagcaagcctggtcctaggatccgaatcgttcactatcaactccgagtccggtaccctgtcggagcagctggccacggtgaaggagaagagcatggcggtcctcaaggaacacatcgccaggcacaatgctccgaacgaggtccccgacgaggccgccgagggcgagtctgacagcgaggacgaagcggcgcttgtcgacaacccgccgaagaaacctaagaagcagaagtgaccgtctctagttatgcacttgagttgttttttttttttgccatgcgttgcttgtataacgccagactgttgtcagtcacaatagcaatatgcaggtgttagcactcacttgctgttcgtaccactatcattagttctgcttctctgtcatgtgttcatatttttcttcccatacacttgcaagggtgttcttgtctgtcggtgtgctgcacgctccgtatatctgtagcagaaacacaattcactaacagcttggtttgaggaatgagttagtctatcatcttctcn

SEQ ID NO: 313 - DNA, 1435 bp, Zea mays
  misc_feature (1435)..(1435): n is a, c, g, or t
  Peptide Sequence Number=SeqID_9384
  Probeset Number=SeqID_14716
ctttctatccctccactccctcttatctgctgcgccatcctccccggcctccaccatggccacagccgccgcggccaccgcctcctcctccctcctcgcgccggcggccagcagcacggcgccggcctcgtcaaacgcgctgctgttcccctcctccgtgccgtcgctgcgtgcgtacccgcggctcctcctcgcgttccgccgccccgccgcggccgccgtcgccgacccgcagggggccgtgctcgaagaggaggcggaggtcgaccagcagggccagtacgacgacgacgacgggtatgagggcgggcgcggccccgcgttcacggcccccacgcgcccgcgcaccggcaaggccgcgctactgcttaagcgcgaccgcacgaggtcgaagaggttcctcgagatacagaagctgcgggagagcaagaaggactacgacgtgcccaccgccatctcgttgatgaagcagatgtccagtgccaagtttgttgagtcagcggaggcgcacttccgcatgaacctcgaccccaagtacaatgaccagcagctccgggccacggtgaatttgcccaagggaacaggccagtcggtgaagattgcggttctcacacaaggtgagaagatagatgaagctagagctgcaggagctgatatcgtaggtggagaagatttgattgaacaaataaaaggaggatttatggagtttgacaaattgattgcatcacctgatatgatgcctaaggttgcgggcttaggtaagattctaggaccaagaggactgatgcctaaccccaaagctggcactgtttcttcaaatattactcaggctatagaagagttcaagaaagggaaggttgaatacagagttgataaatcaggaattgtccatattccctttggcaaggttgactttccagaggaagatctcattgcaaacttcatgtctgttgttcgttctgttgagaggaacaagccatctggtgctaaggggatatactggaaaacggcgtacttgtgctcatccatgggaccttctatcaagctaaacataaaagaaatgcttgactatggtttggaatcatctgactagatgtgaccacaggcaccagttaagtcagctggcatcgttatcaccttcacagattaactatttgccccttgcgacaaatgagcagaaacatggttggtgtatggcaagcaggtgcttaggtacagttttctcagtttttatggcacatcatcagagcagctaaagtcacccagattgacaaagagatggtttgttggtcatgtatttatgagaaaattatgcacggtttcatagatgtctgtctctgagacgtttgttgtaatgtttcatattttgtcaatagtcatccttgagcttaagccaacaatttgttttcacctgtcattaatttaattacctttn

SEQ ID NO: 314 - DNA, 714 bp, Zea mays
  Peptide Sequence Number=SeqID_9385
  Probeset Number=SeqID_14717
attaaggacacgtcatcttcaccccccacaccccacgccacgctacggtacggtacagcctcatcgccacgccaccgacgaaagaaaagcttggacgagtgaagggagatgccgcccgcagctccgcgccgaataatcctgctggccgcggsggcwrccgcggcgctgctgctgtggccggccggctgcgtcacggccgacgacggcagcacggcattcttgccgccgccgccaccgccaccggggcccgcgtcgccgttcccgttctgcccggcgcggccgcctggggtgtcgtcggggccgttcccttggtcgccgccgccgccgtcggtggcgaggttccctcaggacccggggttcttgccgtccggggcgtgccccgtcggcggcgcggcggcggtggcgtggctgctgccgctgctcgctgtgctctctgctttctggctgctctcgcagtgactctcgcggttgctgcccctggattgatgtgatgtgatgtgtccgtcgtagacgttcagttcgatcggagatcaagatttgctttttttttggaacgaagcaaggaaagaggccttctttcttgttttcatttttttcctttctttcatttcgaaggcatagccacataggtctgtttctttcttctcgagaggagagaagggatatcttcgtgcacaaccgtgtggctccattaatgcaatccaggattcggcg

SEQ ID NO: 315 - DNA, 628 bp, Zea mays
  misc_feature (628)..(628): n is a, c, g, or t
  Probeset Number=SeqID_14718
gccaagtgcctcgtcggatacaacaccggcaccgtcctcatcacacccgcaacaattagggtatgcaatggttcaaggctccgatcttaattgttcatctctaaatcatcatattcacttaattttctatttaatatttagcaaatttgtcatagatacactcacggtgtgctggtgtgtatgtgtggaggaagagcctgacggaggctgagggagaggaatcagtagagcaaatcagcaagatgagacagatgtgtagctgctggtatttctccactatcgcgacctcactgctcaagcatggcctatatagagtgacgagaacaccatggaacggagttgtgctgttgtggtgcggagtaggagcgtctaagcgaggagagaatcacaggttaacaggtccacttcaaagcctggccatcatcaatagtcgaacgggtgtaaatggatgacgaagccgaagagcaatgatctgaagctttggtggatgatgatgaagctgaagacacttctatgaaaaaactctagagaaattcttcaattacccttgtaaaaaatattgtaatttaagaatcagatactactttgtaaatttgtgcataccttgtaatatatttttaccttttcn

SEQ ID NO: 316 - DNA, 1057 bp, Zea mays
  misc_feature (1057)..(1057): n is a, c, g, or t
  Peptide Sequence Number=SeqID_9386
  Probeset Number=SeqID_14719
gtttcctatcgtttcggttcggcgcaggcgccgctaccgcctcctctcgaccgctcgccttcccgttcgccatgtcgttgctcgccgcggccattcccagcacttcctcccacttctccgcacccttcctcccctccttccgcatgccccgcaagaacctcaccgccccactccaccggatccgccgtccgcggccgttcaccgtcgtctcctccgtcccagaccccgcggcggggccggtggaatacacgccctggctcatcgccggcctcggcaacccaggcaacaagtactacggcacgcggcacaatgtggggtttgagatggtggatcgcatcgcgggggaggaggggattacgatgaacacagtccagtccaagtcgcttctgggaattggtctcaagtgtcattatgcttggcactagcgtctcgccctctatcgtggcgcgacaagtacctccctttggtgcctctacttcgtcggcgctctccttgttaacagggcacataaattttatgtcgggtcagtggttatccgcctctcctgccattcccccacaaagggtctctcgtcgtgcggcgttggatggtggcaagtgaagcctggatgcgccgtagggtgtttctgtttgctcgaagggagatcgtcgttttttggtatgctgtggtcggcgtgcctcctgtcyccttttgtccccgttctcgtttgcatgktagatggccataaggcagtgggacgtscktagtacgaggggaggtctagatgtgtaacgactttggtgtgcctacgagtatgttgttcttaccgaggttgctagtcgccgtacgacaatcgtcgtttcggctgctttaacctgtgtcatattgtgtttgctttctttgtttcctctatgttgctgaagtacttggtgcattgtactagcagttgtctgtaatttgtggtctgccacaacattatgtaaaggttttgtctcgtttcccctaaaaacgaggtcgttgaggcgtggcttagccatgtcaggatcaatgaaattcaggtggggattctctcccccan

SEQ ID NO: 317 - DNA, 1002 bp, Zea mays
  misc_feature (1002)..(1002): n is a, c, g, or t
  Peptide Sequence Number=SeqID_9387
  Probeset Number=SeqID_14720
aagtttttagtgactaggctttgcgccttctaaaaccctagcttcagaacgaactaaaacccgcgatctcaagcgactagtcgaaggcggcggcggcgatggggagcgaccaggagacggagaagaagaagaccccggtggcgctaatgcccatcgcgaagcccctcgcaggaaagaagctctgcaagcggaccctcaagctcgtgcgacgagcctctgaggccaagtgcctcaagcgcggagtcaaagaggtagtcaagagcattcgccgcgggaacaaagggttgtgtgtgattgctggaaatatttctcctattgatgtgattacacacgttccaatactatgtgaggaatttaatgttccttacatatatgttccatcaaaagaggatcttgcgaccgcaggaaccactaagaggccaacttgttgcgtcctggttctgaccaaaccaaacaagggggagctcagtgacgaggtgaaggataaactgaagtcagactatgaccaagttgtaacggaagttgctgaggctacatctgcaatgttctaaggaccattcagggaccacatcatctgagaatcatgcagctacattcttggcgtactatgtaacctgatccctgtcagtctgccctgcttgcgtgaaccgcaccagtatgctttgcatggtggctggagggatatgactatatgagtttacctatatattatggactatccttgttggcgtattgttttattaacgattatatttagccagttataatccgttcggtgagcaggttgtttgcttgggttaccaaatcttggtagccagtgggtgcggttccaggtcttctgttgatgacttatcacaagatgtgcttgtgattcccgtgtttgaagaatcgcgatatcttagcgccttaggctatggttagtagatcgtgcctattgtataaaatactgttttgtattgtagacaatattgtttacagtgatgatgatgagtaagctgctgn

SEQ ID NO: 318 - DNA, 701 bp, Zea mays
  Peptide Sequence Number=SeqID_9388
  Probeset Number=SeqID_14721
ctcttctcccggcgagcggtccatctcttctccgagtaccggtggcgctgagcgctcgacggcgctcccatcccgacgcgcttgtctcccggcgctctacatctacgctcccatccggaaagtcgagctcggcggcgctccttggaaataagggaacgggacagccgggcagggcgtcggggagaccactgttggctgctgctacgctgcgcacgtcatcggagcttattggaaccgctcaagggaacgcgtacctcaggaaatggaggccgaggaaaaacacaacaaagaaatggtttccaacacagccggaagctgatagtaatcagcagcttgttgccactgaggcttctactgttcagctgccaacaatagaagaggcttctactgttcagcaacctgtaaacaacatcccttctacctcgctgcaaacaatagaagaggcctctactgttcagctgtcaacaagcgaatggtcaccaccaaggagacttcggacatgtgttaaaaagaagcttactccgaagaagaagatcggcttctgagtagcagcttaatttctgtttctggcagtagtttaagtttcaattctgtgaacaaagcttaagttgtgtgaacaatttatgtttgtggcagtaccttaagtatgtattctgttaacaaagcttatgtggtgtgaacaatctctgtttgtggcagtg

SEQ ID NO: 319 - DNA, 883 bp, Zea mays
  Probeset Number=SeqID_14722
atctagacccattgacgtgctcctccgatccaaacccaataagctagaagcccctctccggcgaggcgatgggcaccgccaaggcgaagcggaggcccgtcctgatctgttgcggggtgctggtggccgcgatcgccgtcctggccgtcgtgttcgtggcgctctacttcaccgtgtttcggccgcggtcgcccaaggtggtggcgacggcggtggtagcggacctgctccccaagggcgacggcggcggcgggcaggacctgaacctcaccgtgcacgtggacgtgaccgtgaacaaccccaactacgcggcgttccggtacggcgacgtggtgacgctggtgcggtaccacgggagcgacgtgggcatgtcggtggtgccggcgggggagatcgcgcgcgagacgctgaccgtcggccgccgcggtcgaggtggacacgctcaaggtggccgccaccccgtacttctacgtggagttccccacgggcaagctgccgttcgagacggccacggcggtggccggcgaggccgtggtgctgggcgcgttcaagatcagcgccagctcgcaggtggcgtgccaggtcaccgtgcacctgctgcctcccaacgccacgtcggagtgcacctccacggtccatataggccggtagtaacgggccggggggctatatatatctagtggttctgctctctctggacagatgttgtgcgcttgtgtgtacatcgaaatacgctctgatctgaaattgccaacgacgttattagtagcatacttgttatttcaacagttatagtagaggtatagcttctgcctttgcttaaatctataggtcccagatgacaaatgggtttaaattcaaaaataaaccgctgtactgttgt

SEQ ID NO: 320 - DNA, 758 bp, Zea mays
  misc_feature (758)..(758): n is a, c, g, or t
  Peptide Sequence Number=SeqID_9389
  Probeset Number=SeqID_14723
acaagccacgcgccacccattccctccatttcatagctcgatcgagtggtgtggtgaacatgtaccctgctgcagagatcgctagcgtccgatacctatctcctgcaggcgcagcctctctcagacctcattaccgtgacgacttcctcttcctcttccagtacagcgacctcctggcgcctgcgcacccttcgctctaccaagatgtcgctgatcacctggtcctcggagctagcttcccggctgtcggtgacaacaggtccagctcggaggagtcggacggctacctgcagcgcagcctcgcggagggagcgcaggaagaggaggatggtatccaacagggagtccgcccggcggtcgcgcgtgaggaagcagaagcagctgagcgagctctgggcgcaggtcgtccacctccgcggcaccaaccgccagcaccttgaccagctcaaccgtgtcatcagagactgcgaccgtgtcctccttgaaaactcccggctcagagatgaacggaccaggttgcagcagcagctggaggagctccctgtagagaccacggagactggtggcatgagtcgtcctcctgactcttgaagcatccaggattacatgtgttattagatgagattttaactaggaggcttccttccttccttccttatatcctgatgttttcattttttttatcgttgctctatgtttagtatcaaagctagtatgtagctgccatgtggtaaatggtgagttctccattttatttn

SEQ ID NO: 321 - DNA, 717 bp, Zea mays
  Peptide Sequence Number=SeqID_9390
  Probeset Number=SeqID_14724
atatatatggaggcatgggcttccaaaataatcagggaagccctggtccaacgttgcatccgtttcaactgcaccaggtctaggacatttataaaaggagctgcaggacgttagggtttcatttcttagcggcgtcggcggtgacgcccccaccacgatgcacgagcgacgacgcctccatcccgccaatgtgcgcacgacgacggttccctgaaggagcgtgacggtggtggccatccgatgcgggagcggcggcggcaacctctcctaggcacgagcggcggcaacgacctcccctaggcatgagcggtgatgacgaatcctagatgtgcgtgtgacggtgggtggctccccgaggccacgccacggtggcgggccatccaagtcgagtgacgccgcgatggccacccggacgcgtgaacgacgacatatctaggaggccacatgcggcgccggatcttagaggcgcgcgtggtgtcggctctctggagacgcgcgcgacggcgacgacctgctccaatcattgtttatgtatgaggttgttggctggacacatattagaactctttcatcaattatgatatgtagtgtcgatatttatgtaactttctaagtgagctcaggaacctccgggcgggggtcatcgtgctcgttccaatctgctacttgtgatggtatggtctccattattatgccaacgacgacctcattgcattg

SEQ ID NO: 322 - DNA, 714 bp, Zea mays
  Probeset Number=SeqID_14725
taccaaacctctaacattatggctaacagccataaatgctctaatttgggatttactaagaagttctaaacacattttttttaacgactccagcctcgccaactgaacgatggacggatgaatatgagatggtgattccattctcgctaccgaccaattacgtggagttggatggatgcatttgagatcacgcgtcgctgtcccatatctgatcgcmcaatgggcggccaaagctcccactcccagcagcaccaaggccaggcacgttcgctgtcgctgtgcatgtgcgtccggcagcgcccaagcaaccacaaagcgtcaaaatgccgttaccgtgcaactttggatcacgagccagcattacacaggatcagataatttcccagagtcaccctctccagtccttgtccgatggatacgacaaaaggtactgcgccaaaggacagatgcctacgacgagctgtcctccaacaaataatgttcgccacacaagtggcagcagtacaaaacaaacacaatggccatggtcaattggtcgtcacaagaacagagcaaacgcataacaaacaactttcccagtcattttctgtcaataattgtatacatctgagcacaatgtaccccaaaaaacaaaaaatccctgtctagctttcctagactgattgagttggcaacaatggtacaaaagcaaggcccatcgggcgccttcctcgc

SEQ ID NO: 323 - DNA, 1024 bp, Zea mays
  Peptide Sequence Number=SeqID_9391
  Probeset Number=SeqID_14726
atctctcgttgccttcgaactcgaagtctccgagctcctctgcagcagggtgattctcttccccggagttcccgatcgagaatcgagatggaggcgcagccagtcggaggagttttcctagtaggcccgactgatgccactggaaaagcgcccggctccgaaccgagaacttcgctctccatcctcttcctcgtactctgcatcagcttcggcatgctgctccatacggagcagcttgctgccgccgccgctaaacatctgtgcccggtcgtagtcgtcgtcttcttcgtcacggtgttcttcaacctggccatcttctcgctcagcttcctggtcgcgcgcgggcgagctgcaggggcaccacggctactgttccgcccaaccgcgagagccggagcagcgcctgctgtattttctgaatcgaaatctccacttacccctttcatcggactctgcctcgccatgggagcggcgctgcacgccgaatcgctcgccgccgccgccgagtaccaaatcggtccggccgtcgtcgtatgcgttgtgctccccgccgtcgtgctcttccacttggcggtcctttccattcataagaccctggcgagccaacgggccgaggacgagcccaagcagctgctgcgctcgcgaggactccctctgctcccgttcgttgccctcgcgctcgccatctccgcggccgatgtcgcgacagatatccctcaggacgcctccgtttgggccgtactggccctcgccatctcattcaatatcgctattggctcgctgtactgcttcatcatcggtggacctccgctgcctactgccgccaccgtggaaccttgatgtcatgtttgaaccgcatgtttgagagcaggagtttgaggtcttcttggtttacacggggatcaaagaggatcaagaaagattaaatctttttctattcaattttgattagaaagcgattcgatctacgattctcttgctctcaaacaagccataaattaactacctggtgctaccgtttcct

SEQ ID NO: 324 - DNA, 1993 bp, Zea mays
  misc_feature (1993)..(1993): n is a, c, g, or t
  Peptide Sequence Number=SeqID_9539
  Probeset Number=SeqID_14727
gtgattgggggaagtagggagtgctcacaccatttcttgtccattgacatcagcgctccacgcctgcgcccccgaattcccaaatcctgcggcgcctccgccccaaccccgctcgtcgactcctctcttccgaacacgccggaggaatccttctccgcgactcgtcttcctcctctctgccgtgctggcgtggagtggagatccaccaccacctggattggtctcttcttctgctggttagacgctgaatctgtccttcaatgccttcacaggctctatccctgaagaagttgcagagttagaagcatttgccgtgttttttaattgaagggaacaaattttcgggtcatatccagattggatacggaacatgtgaaagctgtccttttgggaccttaagagaatacgaagcaaaaggaacataagggtagaggacggaaataaacaatgggaaagggtgatgtggctactaggtccaaacctcaaaaatcgtcagcaatacagaatgagccgagtacacctgctaacccccccacagcatatcctgattggtctcagttccaggcatactataatgctgctgggacaggtccagtaaccccaccggctttttttcattcatctgtagctccaacccatcaggggcacccgtatatgtggggtccacagatgatgcctccttatgggacaccaccaccatatgcaacaatgtatgcacaaggcacaccatatcagcaggcacccatgccaccgggttcatacccatacggtccttatcctatgccgtcaccaaatgggacaattcaacctccaacatctggtgctggcggtacagagacagataaatcaaaaaataagcggaagactcccctgaaaagatcaaaaggaagcttaggtagtctggatgttgttgcagtaaaaaataacaagtcagcggcaaagccttcagtttcttcctccaatgaaggttcttcacaaagtgagagtggaagcgggagctcttctgaaggaagcagtacaaattcaaaaagtggttcaagggcgaaggatggttctgagcgaggtcagggtaatgatgctaggagtaaaggtactcgaagttctgcagttgagcccacacaaccatcttctgggcctgttgtgcttaaccctatgatgccattttggcctgttccctctcccatggctggcccagcaactactatgaatatgggagtggattactggggtactgcttctgtacccatgcatggtaaagttattgcagcaccaatatcagctccttcatcaaattcacgtgatattgttctcagtgatccggctatacaggatgagagagaactgaagagacaaaaacgtaagcaatcaaatagggagtcagctcgacgctcaagattgcgcaaacaggctgaatgggaggaagtagccaatcgtgcagatttgctaaagcaggaaaatagttcacttaaagaagaattgaaacaacttcaggagaagtgtgatggcttgacctcagaaaatacatctctacatgagaagcttaaagcgcttgaggatgagaaatcgaatggaaatttgtagcaggctgaaacttctcctgacttcctgactgctgatataatttggtggtaacctgatactgataggacgactgagcaggtgttgatgtagggtattagatttttgtccgaggggtaaagttatatcatagggtttgacatggtcgacggctacagattcttcttccaggtgcctcagccctcagctcagctcagctgctgtgcttgtgctgtgttgtttttctttcctagttgtgctaggtcctacagaagtagtaacaactacgtagaaacccccagggccttgtttgaaccgtgggggggttagcgaatggtacagctgttgtagagctgctgattgagcttcttgacagaaactgcagcgtgttgaaggcacccatatttgatttatgattcacaggcggactaattcn

SEQ ID NO: 325 - DNA, 592 bp, Zea mays
  Peptide Sequence Number=SeqID_9540
  Probeset Number=SeqID_14728
aaaaattattcagttacttattactgtagtcatcacaaccaggtcacctggatagtgtttatgtttggcttacatagtgaataggccttgttcagacatagtataataaaactgccacgacagtacataaaagatggatcttttacttaaataaaaagaaacaaaaaggccttactcatatgtgatggaacaggaaacttacagaggtttacacaaaaacagcagctagacactaaggaatcatcatatgatgcgaagagaagggaagaaaatactaggaagaaagaagaaaaaaaaagaagcatcagcttcaataagctcattgttgtgatcagctggtaagccagagtttccccctttgtggagctcatcgtgctcaatctgagacgactcttcaagctgatgcttcttttttttcttcttgactccaccttccttcacatccagtgccttacccttcagctttagcctccccccaacgacgttcttgtattctgacatctcacgtgtgaactggggcgctcggtactcgctccctgaccgcctgcgcctggcggctagggtttgtttgcctccgccgtgcgaggaacgt

SEQ ID NO: 326 - DNA, 911 bp, Zea mays
  misc_feature (911)..(911): n is a, c, g, or t
  Peptide Sequence Number=SeqID_9541
  Probeset Number=SeqID_14729
aacacgcgcacatgtgacatgccccatggtcgccgccgctccaggcatcctcccgtggcctcacctccccttcttccctttcctcctcccacccgtctgacgcctctgacgccgccgcagcagcaacagacgccaacacctccgcgtatgacatccagatcttcgagcccacctccatcgaggagcgtcgtcgcctcctgatccagcggcgtcgcctccgactcgccgcctcccatgcctcgcggctcaccgttgcctcgcgcgtctcctccaaactcatcagcgccaccgcctcctgctccagcggcgtcgcatccgatctgccgcctcccctcctcatggctcgtcgttgcctcccgcctcttccccaacctcgcccttgccgcccttggaggatcccaaatccgacgacgagctcagtaggcccacgcagacgcggatgtgctatgaacttcaggctgatgtgcatttctgatatattgatctcaagcgtcagattctgtatcgatggcaatgggcgaggttggggaagaggcgggakgctgccgtggtggcgctgtggctgtgctstgcgcgggcggcggggaccggaggatgcgggaggccgtggcttccgcgcccgaggcggtggggaagctgctggtggtgatgcagggggactgcgccccgaccacctcgcggatggccggagagctgctgcgagcggtgcggatggagcatgagaagaagggcatggccgccgcctacgacagccgcaccatccatgtcatgccgtactgatggatccggcggaaacgcatcgccctgcagcttcacagcttgcagctgtaatacaatctatggaaagcggtgtaagtaacgtaggggatcgatcggtcggattggagcgaatcatgtgctgactgctttgn

SEQ ID NO: 327 - DNA, 920 bp, Zea mays
  misc_feature (1)..(66): n is a, c, g, or t
  misc_feature (920)..(920): n is a, c, g, or t
  Peptide Sequence Number=SeqID_9542
  Probeset Number=SeqID_14730
nnnnnnnnnnnnnnnnnnnnnnnnnnnnnnnnnnnnnnnnnnnnnnnnnnnnnnnnnnnnnnnnnngcactatgtgcgcccccaccgccgccgcctcccctctagatcctcaatgcactgctaggtcccgtccacagccgctcactgccgccacctctaacgcgcctaggaccatcgccacctccacatctagcttctggagtcgagatccatggtcgactcccctggaggagcccggatctggcctaccgggcacggtctcgagctttaggcgtctcagcaggcagcgcggtgtactccgtcatcgcccaatggagcagccgaccaagcaagaactctatccgtgctcgtgccgaggcgctgtctctactctctactccatctgttctgttcccgcgcctgcgcgtcgtcctctacggatccgtccaccgccgcgccagcaccatgtgaactgagacacgcctccacctatgcatccaagacacacctctgcatctgcgtccgtgcactggctacactggatcgattacggagtggagggtgttctttacaaagaaagcttgtaccttaaaacaggaggatacaagaagttggagtggttgtctgaaggcttttgaactgcttgaagcactagtgtactagtagctttggtgcttttgtgactgatcagctctggagcagctagagtgatgtagttgtgggcttttgaacaatagctggagtgatatgaaacattagtgatgtagttgtgggcttttgaactgcttcacgctggagtgatgtcgttgtggtgcttttgtgactgatcatctctggagcttttgtgaatgatctagctagtatctgtaaatgatctagttgtgaatgatattataattgtgatgcttttatgaatatataattgtggtgcttttgtgttn

SEQ ID NO: 328 - DNA, 634 bp, Zea mays
  Probeset Number=SeqID_14731
atacggtcaccaaaacactgttttgcacttcttggcactatagggaagaggaagaggtacacgactgatgaagatgttgttgtgttcaatgggataaaagaggttgtatctaatgttgctactgttgtccgtgaaagcatccatgttgaagcaacacctgggatctacaatgttgtaatcgattgtcttgggttctctagggaggctctcatgtatgccatgaaccacatgatggagcacaaagtcacctccctggtgttcctggacatgactcctgatgatcgtgatctatggctcaagactttcctagccaagcactactacatccgatctgatctgatctctgtcttttataccgtttaagaacagtaacttgacctgatgcttttggagaacacaagtcagatgttctctatttgttgcttttagaagtcatatggtttctatttacaagtgtttagggtgttctagtctctatttacaactatttataagtgtctgtatttacaagtgaacattcaaagtgctttggtccatgacatggtctctgatgtgtacatagtagcagtttcagaacaaatacgcctatctctatcatttttgcaaactggatatatgaaggataggtaattgt

SEQ ID NO: 329 - DNA, 1116 bp, Zea mays
  misc_feature (1116)..(1116): n is a, c, g, or t
  Peptide Sequence Number=SeqID_9543
  Probeset Number=SeqID_14732
acagcaatagtcaaagtcatgaggggtggggtggcaaagaagagagcgccgccccgacaacacctacacgagctccaaatcaccgccaccgccgacgcaaccgccaccaccaactaccgagggaagatccggctaccaggggaccagatccgtcccacacgccagaaccccaacaccacgaggaggacgctcgccggccagccctagatccaccacgtcgcgcgcccgccgccgaaaacagcgcaacccctccaccaccagcagatgccgtcaatccaccacctgctgcacccgcagaaccagaggaggtagccaccgccaccagcccgaagctcgcgatcctcccagccggacaacccaacctgggtgacagcaacgacgccaccaaaggcaacagggacggcgtggtgccgcccgagcgcgccccagccccgcgtatccaccgcccgcccccgtctctgcgctgggaggaggcctgatagtcgcagcatgccacagggaagagtgtgctcgccatcctcctgccaccctccgacgcgcagagtaaaggagccaccacccgcacgcgcccacacagccagtgggccggagcgcctccaccacctacgcccatgcgggcgcgaacgccccgtccacaagcccctgccccgcatggaacttggtgcccgtgacccaacagggcgcctgggttgttgatccgtcgtgcacagccccccaacggcgcggggaagacgacggcgcggggacggcgcccgccccagcagcctacatggctggaccttgaaccgcccggcacagaacccgctcagatctgagcacggggagaccaagcgaacgagaaacgccccgaagccggcatccttggagtctgcaccggcctccggtagtctcctccagcgacggcgaggggggaatagaggaggaggagagagtggcggcgctagggctggaggcctcccgtgtgaccgtgtcgcccgagcggacaacgacacagggcctcctctctggaaatagtccagagcgatgtctccttgttgggtaccaacattggaagaaggaaggttgtgctgagttgtacgtgattactactgtatacatgaaccctttacctgtttn

SEQ ID NO: 330 - DNA, 521 bp, Zea mays
  Probeset Number=SeqID_14733
aaaaggtagatctctctgagtctcactccctctgtcagtgtgttgttgtcagaatactgttcttgatgaatggctagattggtaattattaattccaaatactaaatattttacctgaatgcattttgcaagggtagtttcttaccaatgttcatgtcgcgcagtatgcacgggtttttgtcttaggtcctgttatagagggcttcacttcaataattgtagcttcggttttctaacttcactataaaagatcttcaacagattagtaaggcgggttcaagagtgtttggtttgcacgtagacttcactttctgtaatataattaatttgtgagtttttttaattacctttgatgattagcgggtggaaaaggagacatgaaacccgtaagtcatgtaaccaaaggtatggtggttagtttttgtgcaacttcatgaaaaggtataaaaatagtgtttttgaagcaccttttcaggagcttcaaaaatttcatgaaactagtctataatttgagttttttc

SEQ ID NO: 331 - DNA, 803 bp, Zea mays
  misc_feature (1)..(1): n is a, c, g, or t
  Peptide Sequence Number=SeqID_9544
  Probeset Number=SeqID_14734
ngggggtgtttgggaacaaagtttttctgcagttttggaagaatactgcagtattctcaaatactgcagtattatatacataatggtgtttggcaagctaggtaaaatctctgttttcaaaactgaagtattgcaaatactatagttgttttaaggcattctaaacttagctctggacctcagttttcaaaactgcggtattataaactacggtattgttataactaaagtatagtatagtatttcaaaaactgtggttttcaaaaactttgttcccaaacaggaccttagctttttgccttggttcttttttatcgtatccttgttcttgctgtgagcagcagcagtagtagtatgttactacagtacagtacagtagtgctccgtatgtcactgcagtttactactgccgctgcgacttcttttttttttgttttttttgaaccgagctgatgaggcaggccggccagaggaatttattgttggtggcttggctctagttcttgaatggatctgatgcagcggctatatggaacggagagctgcttggttggttggtttttgtcgggtttctctttaattttctctctcgctctcaccgattgtttcaatagtggtttcaggtacagtcaagtctgggagacgggtcggagattgcagcagcagattagattacagcagccacggcttcctgccaacgcaaacgtcaagtttagcctgccaaaccacctgcaaggacttttgttttttgttttggcagactttccgcaagatttcaacccagaacagtaggtgaggttggt

SEQ ID NO: 332 - DNA, 1075 bp, Zea mays
  misc_feature (1075)..(1075): n is a, c, g, or t
  Probeset Number=SeqID_14735
aagaaccaaagatatgacttcgtatgtcctcctactgctcccttcagatcgacgccgccccctccctcagcctcatcttcagccaccgccgaccccatggcgtgctcgcacaaactccacctccagtgcgcccctctgttctgctccaaccccttctccacgctgatgtctcctcccatggctatcccaaaccctagccgagatcccctcctgtgttggccaccgtctccttcaccaggcgccctccgctatcctcttgctgtcagcacatggcgagctcaccccctatgccagtcgagttcatcacttcccctagagcaacaccttcatccatggtgcccagctgctccttggagcctatggtggtgatctctaaatccctttgttgttttactagttcttgttaataccctgctgatgtgatattttatgtgtgttgatgtgtgcgatatggagtaaaatccctagagaattaggtggagaagaaggttaagttcaacgctccttaggtgttcgatgatatgctcgaactggtggccgtcttcgctcttgctaaaattgagtcggagcatgatgtgtttccttcggtctgcaggttcttccctttggtgccaaaaaatctaaatacccatatcacagaggctcgtggagttggtgagcaggaccaccaccctccatcacaacctgataatggtacgttaattaatcacgtgatgtggagggcaagagttggattaatctcaaggtgatggtgacgattgaacctgaagatttgacgatctgatcaagtaccaggaggagagatgctcaccaagtggtcgtcttttaacaacactaacgtagtgattattccaggttataattttgttctgttgtggatgatgctaaatgccggtgggctcggccttcttatataagtgtatcccatctttagcttctttattgagaattatcatttaagctagcatttattttaaaacttataaatgtttcatacattcaaattgtaatctttttgaatcaatttcttttgtaatcaactccgatgatatatattgtaattttgttataaccn

SEQ ID NO: 333 - DNA, 552 bp, Zea mays
  Peptide Sequence Number=SeqID_9545
  Probeset Number=SeqID_14736
aaagacgaaggtaatttgatcagcaccgggagacgagacgagagagagagaacgggggaaacaacaccgccgccaggagtgttcaccggggggaaatgatggcgggagcattgccaaggtctcgccgtgcttctccggctgcaggatgggtccgccgtggagcatggacagcctcgtaagtgccttcatcgccggttagaaattctctttagagttcgtacatgtattagcttcataccacaccgtgtgagggggaaaggcaccatcacgccccgcgtgtgttggtcggcaatggcaccgctacctgcgctgccggctagctatacccgaggaagaagaatagtgccagccaatgatctagaaaaagagggcccggattagagactaggtgaccgctttggctcggtcaagctggaccgttgattttctgttaaacggtcatgtgtgcatacctgtgcgcaatagaatgtgagccattgatctgtgatccgaggatctacagatcataccgtttggtgaccctggagatctaatatgtgccatccgtgcgtg

SEQ ID NO: 334 - DNA, 547 bp, Zea mays
  Probeset Number=SeqID_14737
gtataagatgcatcctgatggcaatataatcttgtcgaagcagcctggattatcagtaaatgaactacacagtgcacagtgaaaaagtcaagatagcgttaataaatttcatttcttgtatgatcctctggtggactcgaaggggatatattaggacggacgaccttggctacaaaaaaaaaggcagcaatcttcattccattggataattcctttcatgatgccttctgtggtcaaccgcacataatagcaggatatttgctttggggccgtctccagcagcatcagcatactcatccgatcttccatatcatcttctattttaaaccttactatgtaaacagtgcaaaaatagtgtttttatacaatcatatacacgatctgctggagatagcacgagtggtgcgttggttatagattatgctactatagctcccaatctagccaatttgtttggtttgatatcactaaactctcgtaggaatatgtgtttggtgttctcacaaataacaagttagtgggatatctgccacacctgattttaagg

SEQ ID NO: 335 - DNA, 905 bp, Zea mays
  misc_feature (905)..(905): n is a, c, g, or t
  Peptide Sequence Number=SeqID_9546
  Probeset Number=SeqID_14738
attatctatttatctcgtagtatctcttcttaacagaacccctataaattccctacgatcgatcccttggctccacctatcacttttccttccgatcagatcctctcagttatcatggcgggcggcgccttcaccgagaagggcaagcaatatccggggaagatgacggtgttcgtcttcctcgcctgcctcgtcgcctcctccggcggcctcatcttcggatacgacattggcatctcaggcggcgtgacgtccatggacccgttcttgaagcgcttcttcccgtcggtgtacgccaaggagcaggaggtggtggagaccaaccagtactgcaagttcgacagcgtgctgctgacgctcttcacctcctcgctctacctcgcggcgctcgtcgcctccctcttcgccggctacatcaccaagaggtgcggccgcagggtgtccatgctcggcggcggcgccatcttcctcgtcggcgccgtcctcaacggcctcgcccagaacgtggccatgctcatcatcggcaggatctttctcggcattggcgtcggattcagcaatcagccggatgcatggatctgcgtcgcgatttatttttggaaccgtttctctgatcggctggcctttttagcgggcaactgaaacttgctgccaagtgccaacagagaccaaacttccctgcactgtagagtatgctgcatgtgttgtgtgcagccgcacctggaagagcatgcactgccagaagctcctagatttattttcacttacgttttttcagtgctagccagtatttcacatttctacttacggttatttttgaaccgtcatcacaaatggttttcttaagtcaactgtcaataaaaatagcatttttatttgcggttttctttatgaaacccaagtgn

SEQ ID NO: 336 - DNA, 1052 bp, Zea mays
  misc_feature (1052)..(1052): n is a, c, g, or t
  Peptide Sequence Number=SeqID_9547
  Probeset Number=SeqID_14739
atgccccgtccccgttcgccgcgccacgcgttgcgccccatccgccgcgcgccacgccccagtccgctggccgggtgggacgaggagttcgtcctcctcgccgcgatggtcgtcgaggacaccccagttcgtgagtcccgtcgcaagaggcgggcctccacctcctccgtcggcgatagcgccggatccagcaccaggaagaggaggtcgcgtaggcagtctccggccaagatcccgccggtggttttcgcgctcgacgacaaaaagtcggacactgcggcagatggcaaatcggaagtgaaggcgagcaaggaggaagagaagcctgtccttgtgggcgacaaggaggcgtccggttctggcgagaaggcagtggccgcggcaaacatgccgtgcatggatcggctccgggaggagctctcttgcgcggagctacatcataacttgatcaagatccagcggatcccaacgctggcgctggcatcgccgcatcggcggcacagagccgaagaagcggaagcagaagcctagtggcgcgctagcggtgctgaagaagaaraggcggaggccgccgcccttcatccccagccctgacctggcgtagcggttctggacttctggcagatagttgtgcatgctcgttttttcagcttgctgcaacagcaaaagagtattctccgggtttggaagttggaacacgcagcggcaacacagccaaaagtagcggaagcgatcggagcatgctccctcgccttcttttatgtttatgctgtctcacttgaatgattttgaagtgttgcagctgcacaaacatgggtggctttgtagttcatataaaatattagaaattgttggagtagtagcattttttcaggttttaacgttttagggaaatttccgttcccatgtattatgagaaatatttttagaagttatttgagatactcttagatatggtggtgggcagtggcgaagccaccagggggagcccgagtgggcctggcacccccaatggctcaaccaagtcagattaataatgtatcttatagccn

SEQ ID NO: 337 - DNA, 1493 bp, Zea mays
  Peptide Sequence Number=SeqID_9548
  Probeset Number=SeqID_14740
atgtctaatcgttcatcgctcatgttatatatatgttcttcactccggcaaccgagccggcttttttcattctttgtagtttgcggagctaatttctgcttgtgcgtgcagcccccacatgatgtattgtgctcatggtgtggactagtttcgaatgggagacattaggatactagagaagacattgttagtgtgtcaaggatcagtatgggtgttgtgccttggtttggtcgagtgttacatggtgggctggtatgccacagaaggggaacatgaacaggaagagagccatctaatattgggagagaatagacatcttcgttactgtccgtcctcctccttccgacccttcatcttttgtagctctgacctcgcatcctcctatgccctagtgacccactcatccatatactcatccgtatagatcactagttgctgcaaacctcccttcccctgaggttgtgtaatcagattaccactgaatcaagctattatgtgtgcgtatgagaagtgtgctaataattggtatcggattcattcgatcctcggagttttgtaccttgatcttttttttaacttcatcgcatcgacaagtcgctcgacacgaagctcatcctcaacgccaatagcaagctcttcgacaagttcgacgcgtggtgggccaaaaggtacgcctcacgggaggcatccaggcgcgtccctgttccgacccagtccacagctgtcggagccgacggggtcgccaaccactggggcaacctctttgatagcagcgacgactccaataagcagtgctacgaggagcccatcattggtgacaactggggcggattcttccgtggcgaggacatggctgccaacgccgagttccccggctactaggacatctcttcctccaaccccgacgcgactgcctacgtcaccccgccagaggttgcggtggaatcggccacccacgtcgttcccagcgccaactacatggaggcgcccaccacttgttcgactccgggcctcaccgagcacgctatggctgaggccgcgcgtcgcgctgcgggtgccccatcgagagccgcttccatgcctgcttcgcacgttcccagcgcacgagcggctcaacctctccgcctgcgcctcgctcgacgatgcctccctcgttgcgtctgtcgtcggtggaccagctaccgcggcgacctggtggttatgcgtttcggcttcggcacagggcgacatggagagtggatactcgacagcgacacacgatgtgtactggacctggatgacgtggccaccgtggcgggcggtgtcgaggacacctacggcgaggaccgcgccaccgaggagcagctcgtcacgccctagaccgtctccgtcgccagtggttgacagagagggaacgtgagagacatttacctctgtggacttctgccaccagccattgtagtagccctcatggatctagaggaagggaatgagaagcttttctacaagcattg

SEQ ID NO: 338 - DNA, 598 bp, Zea mays
  Peptide Sequence Number=SeqID_9549
  Probeset Number=SeqID_14741
ctcctccccgttctctgttgttcaacaccacctcggccaaaagcccaagtagccagcacgacctctctgctgcgacatttcttgagatgcccctactacccccctcaccgacggtgccgctgtcgagttcctactcgcatcgttgctgacgtggtgtctgatctctgtccgtgtgccaagcctctcgtcgttccgtgtgctaatgctgctgatcaacatcttctgtgccctcgccatgatgtccctacgctcatggtctctgcttgctcctcgagcacctggagcatcccttggcgcgacaccaagttcttctcgcactgcacccgccctgctacagttccgaggtagaagaaagtggttgatctagtagttaagaatcaagatcttttccgatccgtggaagaacctcaagttttcaataagcaagaagttgcagatgaagatatgatgctgaactccatggatgctagtctagtgatacccccggtcatcttcctgtggatggatgtccttgtttcattgtactttgatgaataaaggttaagacattatgtctgttcgaagtgtaatatgttaatataatcgtaatttacgcttt

SEQ ID NO: 339 - DNA, 679 bp, Zea mays
  Probeset Number=SeqID_14742
atagctgggtacttacaccaaattcttaagacatatgtgctcacgcgcgttgggcgcgcgctaaacactagtgatagtaaatgtccaacttcgtttacacgtccaattgtccatgataccaccgtacacaggatattaaatggtctaaacttatgtcttcttctttctgtggtagtatattatgttgccctatcgaggtgacaggagagagtcccgtgcatagatgacaagataccttctcccttacatcgactgcatgatctacttagatgcatggaaagggcatccagctgacaaattagatcatacaaaaagggtattgaccatcttgcggtttgataggcatgagaggcatgaaggaagaagctactgtatacaggaaaaggacaagtcatcccagaaatggtgaaagcaattcagtttggactacacccgccaaatcttcaccacaatgttgaataccagaacaacaccttcacgtgcatgaaaattttgtatagacactactgcacagaagctctatcgagaaggttccgaatctatttgcaccggcatttttagaaccttccgtctcagaggttagtagaattttttttttcgggcgggtaactaagaatcgtcaatgtaaatcgattttcaccagtggtccagttaagacaacagccaatggtaatccttt

SEQ ID NO: 340 - DNA, 679 bp, Zea mays
  Peptide Sequence Number=SeqID_9550
  Probeset Number=SeqID_14743
aaaggattaccattggctgttgtcttaactggaccactggtgaaaatcgatttacattgacgattcttagttacccgcccgaaaaaaaaaattctactaacctctgagacggaaggttctaaaaatgccggtgcaaatagattcggaaccttctcgatagagcttctgtgcagtagtgtctatacaaaattttcatgcacgtgaaggtgttgttctggtattcaacattgtggtgaagatttggcgggtgtagtccaaactgaattgctttcaccatttctgggatgacttgtccttttcctgtatacagtagcttcttccttcatgcctctcatgcctatcaaaccgcaagatggtcaataccctttttgtatgatctaatttgtcagctggatgccctttccatgcatctaagtagatcatgcagtcgatgtaagggagaaggtatcttgtcatctatgcacgggactctctcctgtcacctcgatagggcaacataatatactaccacagaaagaagaagacataagtttagaccatttaatatcctgtgtacggtggtatcatggacaattggacgtgtaaacgaagttggacatttactatcactagtgtttagcgcgcgcccaacgcgcgtgagcacatatgtcttaagaatttggtgtaagtacccagctat

SEQ ID NO: 341 - DNA, 641 bp, Zea mays
  misc_feature (641)..(641): n is a, c, g, or t
  Peptide Sequence Number=SeqID_9691
  Probeset Number=SeqID_14744
attctgttctcgtttctcttcctctctctcaactcaactactcaaagcggtagattaaccggctctagcgtagcgagtgttgctacatctctcttggccatgggggcatgcgcgacgaagccggttaatcttcctgcttcggacagttgagagagagagagagggatcgagagcgcggcggaggcgatggcgagcggagggaagggactcaacgcgactggggagttcttccggcggagggacgagtggaggaggcaccctatggcggggaaccagctgcgccacgccacacccgggctcggcatcgccatcgtcgccttcgggatctacctcgtcggcgaggccgcctacaaccgcctctaccgcccctccggcgacaaccaccactagatcgccggcaggatccgtgactcggtcaagaagctggagccaactttaccaagcactggtgctggttgatgtttttacagttttgagctcataaggtcagccatgaccatattgtaatctgtgaccaggtagacttgcccactggtccgtccaactattgtcttgggaccctgtgttaatccttgctatatggatctgacagtgctcatgtaattcaagaatcctggactatctttttatgtgcttatttn

SEQ ID NO: 342 - DNA, 1234 bp, Zea mays
  misc_feature (1234)..(1234): n is a, c, g, or t
  Peptide Sequence Number=SeqID_9692
  Probeset Number=SeqID_14745
aggcaggcacgctcccgcacgaacttccgtcctactcccaacacctcctcgccgtctccaccggggcacggccccgctctgctcctcgctgtccccgatcccttctcttcagatctgccgcccatgccggctccccgctccggaccctagccgctagccgcccgggcccacccgccgcgcccccaaaatgggccgccccaggatgctcaccgccgccggtggcatcgaccccatcgccgaggagccccaccacgcgcgctcccccgccgatggcgggctcgggcccgacccggcggccctcgcctgcgcgatctctgccgaggccagcaccgtgctcgccgtcatgcgccgtggcctccggcacccgcgtgccacggccgcggacgacgccgcggccgaacacccgctcgttgcctccctccgcgggctccgccgcctcgtcttctcgccgtccccctcggccgccgccgcgctccccgccgccgcgctgcggcccttcctcgatgccgtccgctccgaggacgccggcgccgccgccacctccgcctcgctcgccgcgctccacgaggtcatgtccctcacgggccccgcgctcccgggcgccgcgctccgggaggtcgtcgacgccgtcgccagctgccggttcgaggccgggaccgagcccgccgccgaggaggccgtgctcatgaggatgctgcaggcgctcctcgcctgcctccgcgcgcccgccgcgcccgcgctcggggaccagcatgtctgcaccgccgtcaacacctgcttccgtgtcgtccaccaggccgcggccaagggcgagctcctgcagcgattctcgcgccacgtgatgcacgaactcatccgatgcatcttcgcacgcctcccgcagataggcggtgctgacggagttgacggtgctgtcaagcccagaggtaaaagagtgcttgctgctgctattaatagtcacacctcatgcgccgagcttacaaatgccagtcaaccctgtatctcattcttgactaacgattttactactggatactataagacattagtggcaacaacacacagtggcatcctatgaactgcattttacaattaattagcaaattcagcactattctgagtaaagcctttgggttcgcttgtgtaggtctaaacttgcgtggtagaaaatgacacgcgtgggatggaaatttcctttcatgcagttattatgaaatgacaagtgctacttttn

SEQ ID NO: 343 - DNA, 772 bp, Zea mays
  Peptide Sequence Number=SeqID_9693
  Probeset Number=SeqID_14746
aacttcccatgggcgccgttgagcaggaacaatcctcaattcctcatcgcctcccgccaggccgccacatctgccttcctgccgtcgcatgctgcagagtgcagagcccccctcccgcccgatagactgcaccgtggcctcaccccccgcaacaacccgtcagctggttacacagcaccgccaaagggccaaagcggctcccaatcaccggcgcctagtcgttggcggccccatatatagcgccggcggctgccgctcaacacaccactttgctggtcgaagcttgcccgcttccgtctcctccgcatcggccgattttgcggacgcatgtcgctgccttctgctcgtcgaagctcgccaccgccgctccctcctaccgtcctacgccgggggcaggtttgctagccctaccgtgcttcgccggtgctgcagcctgcagccctcgcaacgtggggagcccgcctccgtcgaagccttccaacgccgctcgattgcctcaagcgtcaggcgtcacacacagtgggattgacaattcaatattaacccataaaaccgaaatccgaacaatgcggataccggtgaagattttgatccgtgggtgtaactcgcactcaacatcttaattcgaagtttcgcaagtgtgaatacaggtttatattcaagccacaaatgactcgtatctgatccgaaattttattcattctttattttgagaaaaataattaaggcacaatagtaattgttttaaataaataacttggttaatgattct

SEQ ID NO: 344 - DNA, 736 bp, Zea mays
  misc_feature (1)..(1): n is a, c, g, or t
  misc_feature (467)..(467): n is a, c, g, or t
  Probeset Number=SeqID_14747
ntagtatatatatatgatctgtcgatgccacacaacgtacaatataatattagcaagttacagtgccgccagtaatcttttctcaagcatggatgttctttaagatgagaggcatcccacatttgggagtgagggagacgacatactttggcttgtgaacgtaggtgggggagagcgagaaggagaagttcctgaggatgaccgccatggatgcgaggaagagaaagctccccttgctcggactccagcgcctggatcctctdctccctcagctcggtctcggttccagtcgcgcgctcctccaagccaggayctttctcttcctcgcatccatggcgccgatccgcccatcccctatggcgctcctccctggtgcgcacgtctttgcccagctcgctcggacctcgccgtggagcttcctcgccggcgcgcgcgcatctctctagccaaagctctgctctcctctntcttgccttctccctggtgccgtgcgtctagctcgccggccgaactccctcaacgtcggcctccatggcagccagcgcttcactgctccctgcaggcgccccctcactggatcccctccatttgtgaccagcgccacttcctggtccaagctctctggttctttcccctgcgcgcctagccgtcgaagctccctgcactcgcctggcgctcgcccctaacctcccatggttgtctgccccagctcggcttggccctctgttcaacgtgt

SEQ ID NO: 345 - DNA, 373 bp, Zea mays
  Peptide Sequence Number=SeqID_9694
  Probeset Number=SeqID_14748
gaatcgaatgtcacatctttactatataatcggagttttgtacaaaataaataaataattacattatatggagacaacggtccagcaacccgaagttgactgggagacgacggcctagacctcttacgaactcatcgcagcatcctccaagcgcctcatcatgcggtacctgttcttgacctgggacttgagatttcaggtaccaacttgctcttcagatgacacgtgacctcactgcgccaatggaggaggtcggccgatgatggagcgcggatccgtagcgaggcgcagacccagagctcgtgccttctccccgcgacggctttcccacgatcacccctcatagcagcgatggcgagcaaatactggaatg

SEQ ID NO: 346 - DNA, 1548 bp, Zea mays
  misc_feature (1548)..(1548): n is a, c, g, or t
  Probeset Number=SeqID_14749
acaatcagcacactcgctagccaaatccgagcgctggctccccagtccccaagcgtggctcttccagcccagcgccaccgcagccatgccccatgtcctctccttcctccacctccacctcccgctcaacactgcccctttgcattccttccgagtccatcgcactcgccactcccaccctcacctctccctccgtactcggcgcgcctcagcgacggcggcggccgccgaagcagagaacccgtccgcatcggcggacgtcgagatggtccgcgggcgggacggtgtttggacggcgcggtccccaactgtggtggtcctgtgggatctcgacaacaagcccccgcgcgggccgccgttcccggccgcaaccgccctcatcggcgccgcctctctcctcggccgcgtcgtctcgatttcggccttcgccaaccgccacgccttctcccacctccctggctgggtcaccgccgagcgccgcgcccgccgcgccctcgaccgctccgagcgcgcgggggtcgtcgtcccttccgtgccctactcctgctccgtctgtggccggcgcttccctacccgccccgatctcacccgccacttccgccagcttcacgagcgcgagcgaaacaagaagctctcccgcctccgctccctcaagggcaagaagcggcagaagttccgcgagcggttcatcaccggcaacaccaagtacgaggatgccgcgcgggagctcctcacccccaaggtagggtacgggcttgcctccgagctccggcgcgcgggcgtccacgtccgcaccgtccccgacaagccgcaggccgcagaccacgcgctcaagcgtcaggtgaagcactccgtcgcctgtggcgtcgactggctggtgctcgtctctgacgactcggatttcaccgatacggtgcgtaatgcacgcgctgccgacctgaggacggtcgtggtgggcgacggttgccgcgctcttggcaaggttgctgacatttggttgccatgggaccgagtcgagaatggggaggttgatgaggagatgctgaggagttgcacgttttcagagtaccgagaagatcagggaactgagcgggatgggcagttcataggggattgggatgcaggtgactttgatgatgttgttgacgatattgttggaactagaaccagtttgcttggagctacgacaatgtctgcgtttgctgacgaggacattgcagatggcatattcggagttgaattgaccggggataacatgttttggagtagtgacgatgaggaagaggatgattacttgtgaggttcacacctgtattaacaggtgagcaggcttgttcgttctcgatccacgtggatcggatgacattggatcgggtgacattgggtgagtttaaatcctaaacaagtcaaaatacttcatttttttctaatctcattcaatcaacgtgtgatagcaatagcggaacaagaccttggatggataaattcttttgttttatgtggatgtgacatgatcaattgatgttgctaaaattagaaaactattgn

SEQ ID NO: 347 - DNA, 1690 bp, Zea mays
  misc_feature (1690)..(1690): n is a, c, g, or t
  Peptide Sequence Number=SeqID_9695
  Probeset Number=SeqID_14750
gttcctgccgacgccgccggcaagccgcacgccgtgctcgtgccgttcccggcgcagggccacgtcacaccgatgctgaagctagcaaagatcctccactgccggggcttccacgtcaccttcgtcaacagcgagtacaaccgccgccgcttgctccggtcccgcggcgcggacgcgctcgacggcctcccaggcttccgtttcgcgaccatcccggatggcctgccgccgtccgacaccgacgccacccaggacgtgccgtccctctgccgctccacggaggagacctgtctcccgcatttcagggccctgctccagtgtctcaacgcctcctcccctgtcccctgacgtgccgctggtcacctgcgtcgtcggcgacgacatcatgggctttaccttggatgccgccagggagataggcgtgccgtgcgctctgttctggactgccagcacctgcgggtacatgggctaccgctactaccgcaccctcatcgacaagggcatcttcccgttgaaagaggagcagctgacgaatgggttcttagacacgccggtggagttcgcgccgcccgggatgagcaagcacatgcggctcaaggacttcccaagcttcatgcgctccacggacccctacgagttcatggtccactacgccgtcagggtgacggatcacacagccggcgcggacgccgtccttctcaacaccttcgacgagctcgagcaggaggcgctggacgccatgcgcgccgtgatctcatctgccgcgtccatcaacaccatcggcccgctcaccctcctcgccgaacagatcgtgcccagaggcagccaactggactcgctgggctctaacctctggaaggaggacgcctcctgcttccgctggctcgacggccggaagcccaggtccgtggtgttcgtgaactacggcagtgtgacggtgatgaccagcgcggagctggtggagttcgcgtggggtctggccaacagcggccacgacttcctgtggatcatccggccggacctcgtaagcggcgacgccgccgtgctgcccccggagttccaggaggcgatcgaggggcgcggcctgctggcgaactggtgcgctcaggacgcggtgctgcgtcacgaggcggtgggcgtgttcctgacgcactctgggtggaactcgacgctggagagcctctgcgccggggtgccgatgctgtgctggcctttcttcgcggagcagcagaccaactgccggtacacatgcgcggagtggggcgtggagatcggccacgacgtgcgacgggaggccgtggaagagaagatacgggaggccatgggcggggagaaagggaaggagatgcgtcgccgactcgccgcgcggtggagtggcgggagaccgccgtgcgcgcgacgcggcccggcgggcgctcgtacgccaacctggagaagctggtgactgacgtactcctctcgggtggcaagaattattaaacctccttgctatcaggcttcaggcatcagcactgctccatatgcatgcataaaccatcaaatacactttagctcagttttaagatctacgtgtcattgctctctctagtacgtgatgtattatgcacccgcctcttgttggcattattgttgtattatttagatctggtttctggaaacgagtgtgcatatattttgattctctaagcgn

SEQ ID NO: 348 - DNA, 451 bp, Zea mays
  Peptide Sequence Number=SeqID_9696
  Probeset Number=SeqID_14751
tcatgctcccttcccgcccgcttctgccactccacgcaaactcgccgctgccgcactcggagaaagagtgaagggaagtctcagatcggttgggggaaggcagtggcgtcatggcctagggtcgagcctttgctcgaggagtcatccatctcgtgccgcaaattttctagcgagaagccgaccggatctgcactaattgctcaccagagcatcacctccgtcgtggcgccgcacctcaccatggttggaccgctcgggcctcgttgcaagagaagatcaggtggttcaagaggagccacacaacgaggagttccattcaatctaggtggcatctcccagttgactttctggcgctaaggatagattttagatcctgttatatttatcttttatttttgtaagtcttccgctatgtaataagtactctgattatattgtgacatttatctct

SEQ ID NO: 349 - DNA, 451 bp, Zea mays
  Probeset Number=SeqID_14752
agagataaatgtcacaatataatcagagtacttattacatagcggaagacttacaaaaataaaagataaatataacaggatctaaaatctatccttagcgccagaaagtcaactgggagatgccacctagattgaatggaactcctcgttgtgtggctcctcttgaaccacctgatcttctcttgcaacgaggcccgagcggtccaaccatggtgaggtgcggcgccacgacggaggtgatgctctggtgagcaattagtgcagatccggtcggcttctcgctagaaaatttgcggcacgagatggatgactcctcgagcaaaggctcgaccctaggccatgacgccactgccttcccccaaccgatctgagacttcccttcactctttctccgagtgcggcagcggcgagtttgcgtggagtggcagaagcgggcgggaagggagcatga

SEQ ID NO: 350 - DNA, 703 bp, Zea mays
  misc_feature (1)..(1): n is a, c, g, or t
  Peptide Sequence Number=SeqID_9697
  Probeset Number=SeqID_14753
ngaacagacaaagcaccacacatgcgcactgttaaatcaacagatcacaggagaatcttgctgcaagaacagcaccaactctaccagcttccaatcaccaccagcgattaaccataggaatactagggacttatgtagctagaagaatggaacaaccagctgcaggaggagtagagaacgcttttttccaaaccaaggaagcactcgcccatcttaagcagacggccacgccaggcagttgcgcaggatccggcggagcgacgaatgaatcgctgatctgttcagcgccgccgccaggaagtttctgcgttcgtcctgtccacttctggttttttttcttgccgtcccgctcctcgacgagccctaaccagctgccactcggtgggctgctcggtcagctgggccttgaagcagcccacccggcttgcccccttctctttattttttttaataaagtgaaaactcaaaatggacagcagatgcagcagtccgacgatggtgatcgtcggcgcacggcaatagagaaacagagcatcgttgagattgagtggtagggcaccgggaatccgtcatagggcaggggatgtcgacagcagagcagcatcacgtcactgacgaacgaagacggactccggcgagcgacgcaagaataataggaaacgacgagggtaggaagaagaatagtgagataatggcgtcagat

SEQ ID NO: 351 - DNA, 742 bp, Zea mays
  misc_feature (1)..(1): n is a, c, g, or t
  Probeset Number=SeqID_14754
naatcccacccaataccctccaatccacatgaaacggaaataaccgaacaagccctgagttttttttctctcagagagaattatacatatgattctctagcaagactattatattactacaatggctcaattttccaaaatcgtcccctgatggttatgatacaaactctatgtcctttctccattcaacatttaaacgcctcaagtcttgccattgtatgcacttgtagaagtgattgatcttggattaaattcttgaatgggactgctgcgtttcgttctcccatctcttcctcttcctcacttgattttgggtgcatcatatttgatccaacactgttattcaaatctgaaattggttggtatagtggagctgatggcattttgcttgagcgatgtgcccggagatgactaccgtctctccacattgtgacattccagattccacaccgtcgcggccgcgagcgttcagtgtgcttctgtcttggactcttggtcccggacgacgaggcgagctgccgctagatacggacctcctgcagctgctgcccgaggctgaccacgccggcgacggtcttgagcgccgagcgagcggagcaggcgtaagagttggctctcccggcggagcagtcgcagggcgcggcggtgtgactgtgagcccggtgcgctcgaaggcgtggttgggaaaggctggacaccgttgctgtcacggtggccccagtccccgtggaggctgggatct

SEQ ID NO: 352 - DNA, 920 bp, Zea mays
  misc_feature (920)..(920): n is a, c, g, or t
  Peptide Sequence Number=SeqID_9698
  Probeset Number=SeqID_14755
actagtcaacgcaccgttccgtgtgaatcgatccatccaccggtggcctcctcgtcgccactcgccaccggcgccgcacttcccccgtctccccaactcattccttggcccctcctctccaccgaagcgatagcaaagccgcaggccgcaccaattgttcccttcccccggcggcagcaaacatggcgctggaggtgctgccggaggagtccaaccggtgcgtgcgcgggtgctgccgtagcgccaccatcccgctcgaccttcggtccgcctccttctccctcctcgcccccatcgcgcgaggctcggagagcactgtgtacgaggcattgctgggcggcgagcgcgctgcggccaagaagcctgtgctgtccaccgccgaggatttggacaagttccactaccagcttcagcttctctgcaagctggatcaccctgggttggcaaaactgatcgccacatgcacaccctccggcttacttgatgttctttgacttcttcgagcctccaaatcttgcagaaaagatacatgtcgaggaatggatcccttctatccagcaagtggttacgatggccagtgatctaggtctgtgtttgttacatatcttgtgttactcttagatactaaaataaatatatacttgaggggttactataggacgtataccgtcgattggttgcacggatgggtagagactggtccagacccagatgcaggctgacctgaacttgtatacgtggatgcaagtactcggttcgtttgcgtgtttggttgcctgtaccgaattagccaggattgactggacacatgtttggttcactgtttttgtatgcagcaccaactcagctcgtgtttggttgcatggacttgctgttggtggtgtgacctgttgtttgtgagggtgaagttgccaccctcn

SEQ ID NO: 353 - DNA, 913 bp, Zea mays
  misc_feature (913)..(913): n is a, c, g, or t
  Peptide Sequence Number=SeqID_9699
  Probeset Number=SeqID_14756
gagtgatcgatcgccatgcgcggcgcgcgggtcctcctcgccggggcgccgcagccgctggccgtcggacccgtcgctggacgcgccgcagcgcgcgcagctggagcgggcgatcggggcgaccaccaccgtgctcttcgtcgccaccgtgtcgtacgtcgcgctcagcgccatcttcagctgcctctgcaccggcggcgggtcgtcccagcggcggcagcaaccagacggcagcgataccgggccgcagcggccatctgccgctgccgaggagaccaagcgcgcgctcgaggagatccccgtggtggtggtggcggcgcaggtgacgcgggaccccgctgggagtggcggcggcgccgaggacggctcggaggagccaggggagtgcgcggtgtgcctggcggagtacgcgggcggggaggaggtgcgcgtgctgcccgcttgccgccacggtttccaccgcgcgtgcgtcgaccgctggctgctcacgcgcgcgcccacctgcccggtttgccgcgcccccgtcgccgcgcacgccgagccgcccgacgccaaggaccgctccacgggcgatgtcgatgccgcgcttccctaagtgacgacagcgatctggtaacggcgttgagctcggttttgctgttagcagacgatgttcaggcaaaacaaaaaagacgagaacattggttagattagatcaacgtcacttcttcacattttttttgtttaaatcaatgatgatagttgattaatggggtgtagcatcggaattacttgcccatgtttggaactttgacaggatgtacagcgttgggttgggtgtggctgtatgcagctgacaatttaacccaccacgaacctgaaaaccgacaggatgtatccaatgatgtatttccgaataagggcttgttcggtn

SEQ ID NO: 354 - DNA, 574 bp, Zea mays
  Peptide Sequence Number=SeqID_9700
  Probeset Number=SeqID_14757
aaccaaaccaagacccaacaggatttaccatgagtatgctctacataataaagacacatctgggtttgccttaccgtgtgatgagtagcggcaatccacagatcaaaatcatggtaaatcgtgttagatcgcctccctttgttggagcagtaatcccaatttatatgaatataattctctatacacagaaaataggcaagtggctgctcgattgcaactctcagatcatccgctctgtcagtccttcagttcactgtccacctgaagcccggacagcgcactagggggacgcaggggcggatctacgaggggggctgtcggggctgcagccccggtcgccccccataacacctattaatacatgcttcatctatcttaaaataatagtcatcgttttagggaattagtaggtttatataatttttgattgatacatatgttttatatatgtgtctagattcatcacccatttgaatatagacatagaaaccaaaagctaaaaggacaactattttgaaacgtaagagtatattataacttaaatgcagactataaaggttaactaagatagacc

SEQ ID NO: 355 - DNA, 574 bp, Zea mays
  Probeset Number=SeqID_14758
ggtctatcttagttaacctttatagtctgcatttaagttataatatactcttacgtttcaaaatagttgtccttttagcttttggtttctatgtctatattcaaatgggtgatgaatctagacacatatataaaacatatgtatcaatcaaaaattatataaacctactaattccctaaaacgatgactattattttaagatagatgaagcatgtattaataggtgttatggggggcgaccggggctgcagccccgacagcccccctcgtagatccgcccctgcgtccccctagtgcgctgtccgggcttcaggtggacagtgaactgaaggactgacagagcggatgatctgagagttgcaatcgagcagccacttgcctattttctgtgtatagagaattatattcatataaattgggattactgctccaacaaagggaggcgatctaacacgatttaccatgattttgatctgtggattgccgctactcatcacacggtaaggcaaacccagatgtgtctttattatgtagagcatactcatggtaaatcctgttgggtcttggtttggtt

SEQ ID NO: 356 - DNA, 710 bp, Zea mays
  misc_feature (710)..(710): n is a, c, g, or t
  Peptide Sequence Number=SeqID_9701
  Probeset Number=SeqID_14759
atggcagttgcgcgcaaccgcctctagctgtgcgccagccgctccctcctcgccgggataaaagcgcaggtgccatcgccttccctttcccctggtttcacccacaggcctcgcaattaaccgccacgcaaacccgaaccggccgccgcggaagcaattcgtgaagaccaggaaatggtgaccggagcgtgatcgagggaccccgcggagacacccttgatcgtgctcttgccgctagaagcagggagacactcccaatcgtcgtgaattggttgccggagttcctccacaaccgcgcaccaaactctcccgtgggcggaaggcgacacgtcgtaatcaccgacaagcaagtgaccgaggaatcgggagctcagctggttgaagaaactgagcaggagctcgctgaaggaacaatcagttggcggagtccgaaggagttgcaggtgaagaccctaagcagcagctggttggtgaaggttgtccacgttgcaaccactgctcaggagaagatgaagtcgtggaggaggacttccaggagttccaagagtacgatgagttctaggcgtgggttagcggcaaaccctcagtcggctgcctgtgaaggtcgtgtttatctacgtttcatttctgcacattgataattgttaatgactatgtggatgtctcggacatcatgacgtaatcaactattaccctcttttatgttattn

SEQ ID NO: 357 - DNA, 1020 bp, Zea mays
  misc_feature (1020)..(1020): n is a, c, g, or t
  Probeset Number=SeqID_14760
attgttgttaacaaattggtatcaggggtcgtagatcctgttttccagtgccttattcattattacatcggttgattcgagcaacggattggtctggattgatctcgggtgcgtcagtgagctgctgattcctcgtggtctcctataattctgtccacgctcggtcgatttgtggtgaattaggtctggagccgcatgagatccaccattcccacttcactagatttcgccagaggttggggcaatggattcgaacatgaaggtgctccttgatgagatgaaggcgatgcacgattcggtcgaccatctacagggttctctcacgcaacggatggagggcgtcgagaaatccttgggagacccattccagtccctggagtcgaaggcgacgacatttggagagtggcaacccgtgtcgaggcgtcgccgcgtcggtggacgaacttcgcgaggaggtcagcgtgcttcacaagtcggtgatcgagtggtgctcaattcctcacacccagcggcgcatcaccaatgatagcgccgttgggcaccccgatgacaagcattaccgggagtctgcgtttgggtctgtctatacccactcgcataccccggtcacgagtatgacacctgagccacctcctaaagtgcatatctctgatccacatgctaatatgagtgatctgcatgagcgatccgatcaatatcattctaagggtggtcatcgtcgatttcattcggacaatttaatgtccagccaacttcccaaattgagtttccccaattttgatggttctaacccccaaattgtggattaaacgtagtgaagactattttgatttgtaccaagtagctcctagtatatcgattagagttactacaatgcatttttctggtgctctagccctctggttacaatcggtagaggaatgccttagaagtatggcttggcttgaattttgttccatactccttggacgttttggtcatgatcagcatgaaattttggtccggcgatttttgcctgtn

SEQ ID NO: 358 - DNA, 636 bp, Zea mays
  misc_feature (1)..(1): n is a, c, g, or t
  Peptide Sequence Number=SeqID_9824
  Probeset Number=SeqID_14761
ngggagatctttcttcccttgagaaaaaaaaaaatctgggtgagagcccagaggtaacagtttaggcccgtgagatacgcaatcgggctccaggcctacaaacacattccagagcatgggcccgtatttctcttcttgattgacttaatctggcaccagcgtaaacaaatcgtgttcattgcgtacatgctatcatgcatgcctactattcccgctacgaccacggacaaataacacatccaattgcaggaccgatacagaactatcacgtattcacaggcagctgcatactacagacccatcacctgatgtttcgttaccggtattgtgtaggagcaacactccaatcccctcctcccccacacatgtgcgggatgtgcccttaaccatatgggaatctcaagtctcaagcgtcctcttgcaaccatccccaccatgaaatcagagagaacatttttcagagcaaagaaacccagagaaaaggcacagacgatggtttgggaattgggacgacacaagaaaaggacacaaaagcacagctatattaccgcacagtactatacacactcgtctttctatagttctacctctctccggcatatggtatgcagcagatcatgtgctggattggacatt

SEQ ID NO: 359 - DNA, 1025 bp, Zea mays
  misc_feature (1025)..(1025): n is a, c, g, or t
  Probeset Number=SeqID_14762
atcactctgcaatattcgggttctctactatgtgtaatctcatatcaagattaatgagtatcgtgatcgtataattttgaatcctatcaacccatatggcaaggcaaagaaaatgacagtggacatcattctagattttacaaaatcaaaggagcaaccagacatggctgtcatgatctaagatacttcaacgtgattggatcgaacccaaacatatgactaggagaagctccaaggccactttgtcaagggtctctgcaatgcacctactggtgcatgatttactggaggttgtgcgcatgaatgtgccacacattggtatgggggttggagttgaagcaggtgattttcaccaacattggtttgcgaactggagttgaagcaggttattcatttgatgaaagtgggagagcagtccaaggcaaatttgccatgttggagcagtcacaggagccaaggggctgcagtcacaggtcctgctagccaggatggagcaatcataggacctcctagcagtccaaggaaaatttgcgaggtggagtagttgcaacttttgaaacccacgtgataacatgctcaagcgttcgtatgataaaaaagatggcacataatcaaaagaagatctcatgttctgcgtttgtgaacctgtttgtattttttgaacttgttttgtgaacctctatttgtaaacctgtaaaatctgaggttgtgaatagatttgggtaacttcatacaagtggtggaggcctggtggtaatcctggatgcatataaagcgaggcatgcaatatccatagcactcgtttgacagaaggcaacaccatcaaccttgtcctccaccdttaaactagcatgagcaccatccttcttcacatttatattcatgtcccctatacgttcctcaaatacgtttgaaccatgtgtaccactatgtgaaccaactgagttcgtagactgatcaatgagtcaccttattgtggacgcagctctaaaaaatgttgtatctacaaatagattgtgtaaacn

SEQ ID NO: 360 - DNA, 717 bp, Zea mays
  misc_feature (717)..(717): n is a, c, g, or t
  Peptide Sequence Number=SeqID_9825
  Probeset Number=SeqID_14763
aaaaagggaaaaaaaaacagatagaaagcctcgtgtcgtccacctccaggaagcacacgccgccagggcagagcagcagatcgacatcggcccatggatgcttcggccctcaacaacccgcgcctcaaggcgctcgtcgaggtaaccttcagggcaacatattggtgtcgcttctgggcacagctacagcttaagatggaggaccaagagttaataaaatcttcatgtcgcaagatggagatggtgctactaaagttttttcgcaatttcggatggggagctgcttggcgattaacgttgtagtacctttggtcttgtcataggtggtcttgggtgcagtcatgtgttttgtcaaggcagtaagctgccttcagttgtaaacgttggccgtagcctctctagaggtcaaggtcggactatgtttccattatcaaaaaaattattatgtgctctcttcttactttgctatctctgtgcaaagatggacgtgtatatcaatttaggcctacatggacttatagtagtacttttggtaaaaggctatatcgatcatctatatcaattggtattcataagtcaaactcgtatgctcagccacaaagcagggcaacattgtaaaagtggtcctctgctgtggcaagaccatttgcctgggtatgtaacctactagtgtccagcgatttgtctggatcaatgtattaatggaaacatttatcn

SEQ ID NO: 361 - DNA, 1286 bp, Zea mays
  misc_feature (1286)..(1286): n is a, c, g, or t
  Peptide Sequence Number=SeqID_9826
  Probeset Number=SeqID_14764
gggtttgtttggtgctcgactgctcggcctccgtctccgtctccgggtttgtttaggcggttcgttcgcttggctggttcaacctcacttgttcttgcgagtcggtttccaggtactttacctaccgacgaaattctgttgttcccggtctcgctcctatcctccaagcatcgccttgtccaaagatcgattctttcctgttgttcccggtcccgccggatatttgtatctgctgtgattcgatcttcagggagttgggaggagagacgctctcctcgtcgagcagggaggagtggtcatggggtcgtggagatccctcgcacgatttgacgaggacaacctcataccatgctttggatttggcgacagtcacgcgcagcctccaaagaggcagtggcagcctcttctgagcccacaggaaagggagatgcaatggatgccaaatattccagtgattaaagactgctcttgacttgccatgaaccgatcgagtgttttgagcatgcatactgaggtcttctgtgtgtctgaacactgaatccatcgattctgcagtacccactttcaattgtgcttgttgggggtttgtggatgcagcactgccggagggtagcttttaaaagcatactaacgaatccgaatgccaactgaaggatgctttgcaggtttgagccttccagtggttgcgagtttgtggcacatttggttactccagtgagtctcacccttgggccaacctgcacgaggaaagcatggtctaggcatgtctcaaatatgaaatacaggctagtatttgttttagtgccaacaataacccaagcatgggtagtggtagagcgctgcagaaatgggcactcctgcccacctccaatcaccaagaaccatcatggccaagctactcaagacgaggcatgcagctgccgccaccggcccctgccacagccgccgcctccctcggatccgtcaaaggtaaccgagcagccaccggcgctgcctccgttcgcgcggcggcgaggccagtccggacgtgcgcctggtgtccagcctggtcctgctgccgccggagctggctgcggagatggtggaccaggtgaggagcaacacgtgtggtgctgtcagaggcgccttcagagtggaggcctgcaggttcgggttttgccactactcgtacagtcgtactggatgtacaccgtctgtcagctggagctcagctcactgcccctcctagcttgtggagttcttgttgcccagagatgcagaacaaaatgactgactgggtttaggtn

SEQ ID NO: 362 - DNA, 605 bp, Zea mays
  Probeset Number=SeqID_14765
gaataaataatgttattaatatgaatgtgacgctgttatagtgttgacgcgatcgaaacgagtcgaaacaagtttgtgacgcataacgtattgaataattagcattttacgaattaacgtcgacgacgtggcacgatgttatagccgaaaaaatagactacaccattgggccacaaagcacagccgcaaacgatccaacctatccgtcgaatgtggagagccgttcacactttgactgcatgcctgcatgcacctgtcgttcacactttgacagattccaaggcgcactggtgcacagcatgcgggcgaggagcgacgcgagcagctcgccgaggtcgaagaagatggccggaacaggctgccgacggctcgccggcaagggggccgggccggataggcacactgggatggcgcgcaggggctctgccctggccgctgcgcctggcaataggccggctgcgccgtcgcgccgaggcctcgccatggcccctgggcgaccttgccgcatggccgagtgggcagggaccaagggaagcggttgggcgtcgggtggagggagggagtaggaaatggggtgatggggctccaaatggaaccgacccggg

SEQ ID NO: 363 - DNA, 728 bp, Zea mays
  Peptide Sequence Number=SeqID_9827
  Probeset Number=SeqID_14766
atacgcacaggacgagcccaggacgctcggcgcggggaccgccgcggcgaaccgacgtccgactcgctcggcacctccacgcacgccggtgctctcctttacccttgctgcaatgggagaaatttctcctgcaatggagtcgaggagaacggcgccttttcctctcgttgacagctacgtggcacccggtgacgtcgtccttgacctctgcgagatgaacaaccagaccattaagttcggtgcgggcctgtttcaggagtgtgataccatccaggcgaccagtgctgggaagctgcggctgttgaaacccaacaagtattggattgagaactcccataagagggtaaggtaatgtgtgcttatgccatcaatgaatgtattttggaaaattgcttggttagatgccacagccgattcctgctaacaggaaaaatggtaagccctatcatctgagcagggcacgccagatgggtcaaggatgtcgcacataaactagatatgacaagaggatgctggtgtttttttccgattttgtagactgaaacgatagaatggatagttttgcaatgcaatttctgacaaatgctgcattgtttgttgcctatcttaaggcgatgggcaatggccagcaaatcatgtatatgaccatataaaacattgtattatattatagactgtattatttacggagtgaagtttgaaatgggagataaagataagtaagctcc

SEQ ID NO: 364 - DNA, 733 bp, Zea mays
  misc_feature (601)..(733): n is a, c, g, or t
  Peptide Sequence Number=SeqID_9828
  Probeset Number=SeqID_14767
agcacaacatcttcagaagctacagctgcagcacacagattcacagatacctgtagttccagctcggagcagatagagcatctagctagttagtttgtggcaagagcgtcagaacccaaccgaccgagtgaacgatcatatggcggcgtctctgctaggcccgaacaccggaggcaacaacggcttgggcgggagggtccacgcccggagcggcggccaccgccggtcagctgcggcggtgaagcggctgctgttgaggctgaggcgctcttggagaagacgcgcggcgcggccgaggcgaaccgcggtgaggttcgggtacgacccgcatagctactcccagaacttcgacgacggcactgcttcctacgaccaccactgcttgtagctatagttgtagctgtgcttatgtttgcttctaatatgccggtgactattatgtacaggatggcttaggttaggtctcgtttcagactaagagtaattgagaggatcaaaatcacttactattcaaaattgaatagtaataaattttggccactcaatccctttcattacacttacttccaagttgcaaaccaacccaccaacccttactccnnnnnnnnnnnnnnnnnnnnnnnnnnnnnnnnnnnnnnnnnnnnnnnnnnnnnnnnnnnnnnnnnnnnnnnnnnnnnnnnnnnnnnnnnnnnnnnnnnnnnnnnnnnnnnnnnnnnnnnnnnnnnnnnnnnnn

SEQ ID NO: 365 - DNA, 617 bp, Zea mays
  misc_feature (1)..(16): n is a, c, g, or t
  misc_feature (617)..(617): n is a, c, g, or t
  Probeset Number=SeqID_14768
nnnnnnnnnnnnnnnntctctaaagagagaagatgaatatagcttggaacaagtctggcttacaggttacaacgcatgtggtaatcagttttagtgaatctgaaattctagaaatctggagtctctgagtctttgtcgcataatttgcaggctgagactttgcttggctacctgcgggagcagcgacaaggggttgcctgcagagctggagcagtggcagctactagcttggctaggtaaaaggcaagagctatggtcgaaatctgctccattctctgtgaggtgttgagagcakatcagcgacgccaggggggcgcatctgtaaataacagctggctctggttggtttggctatatgtctatgtgaatacacatgtggtttgcgagtgaggatgcttggttggttactaacgtaacgtcagttaagagtcttaaggtctagtttgggtactctagtaatgaatgcgattggagtggatttatgatgtattgagaaagtatttgatctattgaggatttacatcctctccaatccctccaaaacactctaacctcaaagtatccaaactagacctaagagggagatttgggtggtaatgaagatgatgctggttttn

SEQ ID NO: 366 - DNA, 557 bp, Zea mays
  Peptide Sequence Number=SeqID_9829
  Probeset Number=SeqID_14769
aaaccaaaatccgccggtgatttgcataccgcgcgcaggaagactctggaggctgaataccgcaaagacgtccctggctccgtcgagatccgcccagaatcgtaggaagccccatatctgcactgctgccgtaaggacacgtgtcatctgaagagcaagttggtacctggaatctcaagtgacaggtcaagaacaggtaccgcaggatgaggcgcttggaggatgctgtgacgagttcgtgagaggtctaggccgtcgtctcccagtcaactttgggttgctggaccgttgtctccttataatgttctctagaggaaatggttgctggagtgacttggccgtccgccttaccaccgggttggactgttgagtgggaccctgcctcggctgaggaggagcataaagagtgatgggacaggcttccccatctctccgtttaattatcgttagttttattccgctgcacttcgaacaatgatggttacttttgcaaaactccgatgatgatgacggtgatgtaataatttaacaatgtgacatgtatggttttatgcttt

SEQ ID NO: 367 - DNA, 557 bp, Zea mays
  Probeset Number=SeqID_14770
aaagcataaaaccatacatgtcacattgttaaattattacatcaccgtcatcatcatcggagttttgcaaaagtaaccatcattgttcgaagtgcagcggaataaaactaacgataattaaacggagagatggggaagcctgtcccatcactctttatgctcctcctcagccgaggcagggtcccactcaacagtccaacccggtggtaaggcggacggccaagtcactccagcaaccatttcctctagagaacattataaggagacaacggtccagcaacccaaagttgactgggagacgacggcctagacctctcacgaactcgtcacagcatcctccaagcgcctcatcctgcggtacctgttcttgacctgtcacttgagattccaggtaccaacttgctcttcagatgacacgtgtccttacggcagcagtgcagatatggggcttcctacgattctgggcggatctcgacggagccagggacgtctttgcggtattcagcctccagagtcttcctgcgcgcggtatgcaaatcaccggcggattttggttt

SEQ ID NO: 368 - DNA, 757 bp, Zea mays
  misc_feature (1)..(1): n is a, c, g, or t
  Peptide Sequence Number=SeqID_9830
  Probeset Number=SeqID_14771
ntgtgactaaggctatattttgaatctttagagggtctccaatagtccaatagatcccaatatcctggtcccaatccggattttgggagaaaaaaaaccatccaacaacagtactgtatttatcatstctatcttctcgccagcgaaaaaaacccttccgcctgcgtaaatgttcgccgctccsatgctrccaarcctgwtaacgaaggcaagccccggtgcatttgccacctrccttgatgtttttaaaatctttctcacttgcttgctgcattaggtgataggagttgattgattaaacaattcctgcattaccttccttgatcttgattaccctccttgaaaccctgttaacgaaggcaagccccggtgcatttgccaccttccttgatgtttttaaaatctttctcacttgcttgctgcattaggtgataggagttgaatgcttaaacaattcctgcattaccttccttgaacttgattaccctccttgaaacccggtgtgatgcgtcggcgagaaatcgtcggttcttcggtcgtggttcacgcccgacgaggccacatatacgcgcggcaagatcctgcgacgctcctaaaccagccgctggggctagagagtcgcccccgggatagatcgccggtggtggcttctgccctctccttgccctcttcatatgagctcgctgcgcggcggaggcttggaacagaaccgatgggtggcgaagatatagtagaaccacaagtttatacaccgaat

SEQ ID NO: 369 - DNA, 1518 bp, Zea mays
  misc_feature (1518)..(1518): n is a, c, g, or t
  Probeset Number=SeqID_14772
gaagttcattcagagagagcgcgagagggggtgtggctgtctatggcgtacgagaggatacacgaagctcctcagatggtggccatctcgccaaccaggctcaggatgaagctgctgggctccaatcacaaggacgaccccactcgcaagacgctgcaggcgtcgaggctcgacgacgatgaccaccccaacaacagcctcctgccgcaagagctcgacgaagagtaccccaaggaccaccgctccgactcttcccggtcgcggtccgacgccagccacgacaggatcagtggcagcgacgacgacagcggcaccaactttgagttctgcaaggacgagagggcgtccctgccggcttcggcggcgcccggaccgttcttccggcagcaggtgccgtccaagtggaacgacgcggagaagtggatcgcggggcgccaccaccgccacgtcgtgcactccaaccctgtcttctccaagaagcccgcggcgggcgcgcccaccgagctgtcgtctaataggtcctcgcacaagaagccccgcttctcgccggcggccgtgtcgacgcgggacgtcgggacggagatgacgcccgccgcgagccaggagcagtcgcgcagcggcacccccgccggcgccgccacgccggcgctcagcccgctctgctcggcgccgtccagcccgcggcgcggcggctcctcgtccgtgccggagcgggagctccggctccggacgcggcgggagatcgctgcgctcggcctgcagctcggcaagatgagcatcgcgtcgtgggccagcaaggaggagggtctcctcgccgccgcgtcgccggagaaggacaagcgctacgcggccgtcgacacggtggtcaggagcaaggcgttcgaagctcgcgccgccgcgtgggaggagtccaacaagtgtaaactcgcggcaagataccagaggaaagaggcgaagatagagggatgggaaagcttgcagaaatgcaagttcgaagccaagctgaggcaggccgaggcacgggctgagcagatgaaagcccgggcgaagcaggacctggcgaagaggctgtcagcgctgagccacaaggtggaggggaagcaggcgagggtggaggcgcgccggggccggcaggcgtcccggctggcgcggcaggtggagcgcatccgcgagaccggccgtgtgccgtgccggctccggcggtgctgcgcctggttcctgtagtgtagtgtagctagcatgctcccaatcgtcggaacaagtgctgatggcagtatgtcatggcatgggctgcttgatttgtaactacatgaaaattcatcgctggttcatgttcgtcccaatgccagggcagtggttggtagctgctcgccgctgtggtttggatgccgccgcctgcctttgtgccggttgtctagcttggcctgcaccctgcagccagctgatctagtgatgtggtgcccaaattcacgcacatgtaaagctccttgcaatttcaattaactcaggttattcttn

SEQ ID NO: 370 - DNA, 619 bp, Zea mays
  Peptide Sequence Number=SeqID_9831
  Probeset Number=SeqID_14773
gggcaaaaatagaaaggctaataatccaggatgttgcaatgtaacaactctattaggcttggggcgtctgatcaatcagacactgaagaacagttccaaacaagaaagggtagtaaacagacaagcggcagggaaaaaaaagagagaggaaaaacaaagaaatgtataggaactaccaaaatggatcaacgccacaccctgaacggctataatagttgtgatggcccaaagctagtaattgcaaaaacacaatgccctcctaagttcaaactcacccagctccaactgctggagtacatgatctacaaaactcgacctgtgtgtttgggtgtttggtcagatccggccaaaggagacctcctcacgtcggtagaaccctagggttcctcacagagctggtccggcgcccaccgcggcgcccttcctcatcaccgccatctttgttcctagggctgtgggtttcagtggtgtggtcacgggccgcccggagtgggaacaagcggcacgaatgacagattcggaaggagtagcctcagagtcagagggctcgcttcacatgccgacatgcgccactgccaccgctgtccctggcaacacgcggtggcctcacacgtaaact

SEQ ID NO: 371 - DNA, 365 bp, Zea mays
  Peptide Sequence Number=SeqID_9832
  Probeset Number=SeqID_14774
aagaaaattttatgaaatttccacgctgaaagcacacacattatgttctcggatgagttcctatgttgttacgaggaaaatatacttttctatacatgcttggggctcctagcttatgttaggatcattttccaaatgcccccaacacaatctctgctgtatgcaggaagtaacaaacaatacacgggacgatctcataagtcccctcatgagggcggtggagagtgatcttgccatggtacccgagacgagatcgacaacgagtaggagtgggaggggaggaggcgccgccgcggacgggaaacggcggcgagcggcggaggtcgaaggagaaggggagtcggcgagaacctgcagctgcaacg

SEQ ID NO: 372 - DNA, 1482 bp, Zea mays
  Probeset Number=SeqID_14775
catcttctaccacgcgcgctcctcctctgcctctagccatccatgtcgccggtcgtccttgccagggcatgcgactctgctcatcgtcgagctactctccatctcccagcaagcctcagccgaggtccctcccatgacactcgccctcccatgacactcgcccttcagccatcgcgcccctggtccctctcttcagtgaaccatcgccgtgctctggtcgcgctcgccctgcttcgagctctacaaccgctcgagcgccgcgccccctcagttctcggccttgaacttgcccatggcgctcggccttccctaggtccgaccggagctcctctcaagctgctgcttcatctcccatccgagctcccggctccggatttcctacgggctccctcttctacggtcgtctccttcccctggtagttggctgccgctgcatcacgcccagaaagcgctcgaccgccgttcccagcgtcggcttctccagtccgcactggcttggcgcttggacaccggatccactctgctcgtcgataccctcgactctggctcccttcacctccctctcctgctcagcctccatggcgttgccgtggagctcgcccggattcgaccttgcccctgctacgctgccggtagctctccacacattcgcttacagtctgccggtgccgacaagttttatttcgcgctgtcgtcgatgccacgcggggtcggctctctgctctgcccagctcgtcgagtgccaggaatctgcgcgcacatcatggtcggcgccaaacattttcgtgccgccctttgtgtgctgtgacacctctttgctcttgtcgtcgtattgtttggacagccacgtcgtgtgtagccttattgctgccactcagaggctgctcgatgaaatgtctagcaaagagttgaagcatcgttcgaccccgtcgtcttcgtcgtcgtagcaccacctcgatagcaacgtaccgattgtcaaacttcacctcggcgatcttctagcctcatgcatgtggtcgcacgccatgagcctcacgttcgatctgcttgacgcaggcatgccttcgatgacatctactttgttgtgtttgtcgtctgtgtgctactcggctcatggggagcgggtctgctctcttctggcttttggttatgtttatggacaaggtggtgaagaagcgagacatgtgcccatcactcgctagatgctcaagaaaaggctcgaactggagatcatcgtcgtctcacatctgctaagttgattcggttatggtgagccgatttgtttttactattagttggattggttagttatattgtggcgatgctttgggaagaatacctttctcatttcctttgtgtgttatatgttgccataatgtgtttgcggaaatatttcctatgcagtagtcgtgtcatgtgttgttagacttgtatgcaaggcgcgattaaattaataatgcgagaagtgggattagcattttt

SEQ ID NO: 373 - DNA, 1425 bp, Zea mays
  misc_feature (1)..(1): n is a, c, g, or t
  Peptide Sequence Number=SeqID_9833
  Probeset Number=SeqID_14776
ngcaggaattgttagctcagttggcagcagaagaacaacatggtcatgagctcacaaaaatagttagagaattgttgcctactcctaaaaagactgcaaatttacaaagacagccacgacacagaagagtaagtttatttggttgccgttgctgttccattgattccagttaattttgtgcacctacgaaatagaatttgacataaatttattgcagaggagcaatgatagatcaaggatgtcaaaacgacttattgaagaggctgagcaatactctgtcgaatgttgaggactggacactgactttttatcttttgatggagagagaagtgactcgagttcaaccaggaaagaccttttagttcaagctatgacagaaacgccagttgcgttcccaaaagttgctttacggctttacctgcggtggcagacggtgttgtccttccctggctgcaatgggaaactaccaatgatcttcagacctcctccccgtgcaaaaccaaggcccaggtaacgacgtctgtttatctgcagaaattgtaatctgtatcttgaaatattgagtgttacgtcttatatggtaaggaactatggatgttgtatgaaatgatgaggtatttttttatgtttaattacttcaacatgttaccctttctctacttgcatgttgaactcaggggagaaagtaccagatacagaactagcaatcagacaaggagcagccgtgggagttggagccctggcgaccataccacttcagttgcctctaaagatagattactgaccaagctcggtgaggttgggatttgccgaagcagctgccctgaccacgctcgaaccttgtcgtttcacattgacgactatttgcatttgaggcagagtgaggatctcctcttggaaacgtggatgcagaaagaaagaatcgtctctggcggcctagtcctctgcagtagatcaacaatattgtagacagtgcagccaaataggtagctgatggctcctgctgcctggcgtgtatagatgtgtgcactgtggttaacagatcagataagccgatgttgtcgttgccgccctctgaatcgaggagccgatgttgtcgtgcctccggatcgaagaactgccaccgtcgtgccgctggactggagagccaccaccgtcgcgccgctggatcagggaaacgccgtcgtcgtgcctccagattagggtgccaccgccgccgcaccaccgaatcggggagccatcgtcgccccgccgccggatcagggagtagccgtcggtcgtgtgtccggaggctatcgtcgcgcgcgtctcaggccaccaccgccttttgctctcgagatccgccgccgcctcacgctctcggggaaccgtcaccgcgcacgcgcctgggtgagcattgtcactcatgtatcgaggtggggtgtt

SEQ ID NO: 374 - DNA, 545 bp, Zea mays
  Peptide Sequence Number=SeqID_9834
  Probeset Number=SeqID_14777
attccaatttttttagatgaagcttctatgttccactgttatctaccatgttacttctagaaccatttacatatgaaagagtgcacttccttcaactaaccaggacattttatttgcatacatacacataaatagaaattaaaaacacatgttatctatgtagcctgttcaataaatggttgacacatgaaaaaaggttgaagattgctcagatatgctgttctactgatggttcatatgtaatgaaacttgaaaaatcaactggtaaaaagatggtgcttagttgctagttgtgtgcgtgttgcctagatgcacttgatgggaaactagaaaatagaaaaagggttgaaagaagttctttttctaactttctaagaaaattaatcagtctgagactctgagtaaccatgctctgatggcctatggcctagtatgtctctgtaattcttcctagacagctgtctttacttccatttgtcaaggttctccttgttgtaacgatcatcatattgaacaaacatatgtcactggaatgccctgatgct

SEQ ID NO: 375 - DNA, 643 bp, Zea mays
  Peptide Sequence Number=SeqID_9951
  Probeset Number=SeqID_14778
gcaatttttttaaaaattttgaatttggtcagatattttcgatatttccgatatatcgtgtttatctatgacctccgatttttttgtttttccgatactgaaaaccctgttcccggttgcgagcgtggtgctaagccatggaattgctgtcacccgtgacccgccccttctctgtctccgccgagctgcctggtcacatgcatctggccgcgccgcctcatcttcccggccggcaagcccccaaccgctcgtgccccctcttgtgtgtgtccctaccggcccgcgccactacgagatacgccgccaccgctctgccatggctgcgcgtcaccgcacgtgcctcctggccgcggcagccgcttgctccggcgaggccacgcgcctgcctgctccagcgtggatgagcgccacccccacgctggtcctcgctccctactgcgtgtgcctcccagccgagcggtgcggcatagccatggcgccctgcgtgccgcgcttccccgtgcccttgccccagcctcgccaccggccaagggcggcagccaacgcctccgcatgcctatgctcgacggcgctgccagccgccagccccctagacaatccccacacgcgtgcctaggaactgtcgtgcgtgcagttgcagttt

SEQ ID NO: 376 - DNA, 506 bp, Zea mays
  Probeset Number=SeqID_14779
acggcaaagcaatagaaaaaacgacgtcagtgcgtcaggtgttcggcgccgtatttgcttgtgtcttgtgaattattggatcatactactctctatgggggcaattgtcataaggctattcccattccaaagtatctgttgggggtctttttctctgccgaaggtcctcaagacggagatattgtctgtaagcaacaagatcgaatgccgaagctacaacgaacatgtgtaaagagccgaaggatcagcttcggcttaaggtggcgacgaaggtcaaacataatgttgagtcgaagaggaaaagactagttaatccctgatattttgtattaggattatgtgtacatgttaaggtcataaatgtatttttactcaggctgcgtcctgtgcctataaatagatgaacagtacccccgtactgttcatgctggacaggaattgcattcacgctttcgccttcaagcaagccgaaggtaactataatatacagtatgtatcactttgtt

SEQ ID NO: 377 - DNA, 603 bp, Zea mays
  Peptide Sequence Number=SeqID_9952
  Probeset Number=SeqID_14780
cacttattaaaagcagcctctcatgtttttcttaaacaatccaccgtccgtccaatcccagataaaaaataaatggaaccgaaccacggaaccctagcgcgagttcgtcctggcgctgtctgttctacgccgtccacgacagactgtatgtagcgagcggacccgcataccagtctctctcgccttcctctcgctccccacgcacacgcacgaacgctcatcgccaccgccgccaaaaccggaaaaccccatcccgactaggcaatctcaacctcctcggcggtgcgggcgagckaggcggggagagatmgggaagagcaggggcgacacggatgtkaccaccatcgacaaccagacgctgccatggacatggacaacgttgacggccacctgcacaacaacctacctctccccccttgccactccgattctcagttgtcgaccaagcgttccccaaggtgaatgccgggggcggcggggcaggcccgcgggagcggcagtggtgggcgcaacaggagcaggcgggggcgcgccggcgaccagggtgcacgagcttctcgagtaccctgtctgcaccaactccacgtttcccgctcatccatc

SEQ ID NO: 378 - DNA, 597 bp, Zea mays
  Probeset Number=SeqID_14781
gaaattcagttgcgataggacttattctcgcgggggaagtgggggcataagaagacctggcgtcgcttttcctctggtttcgctatctttccgaaatcactcgcactcagaaaaccttgagcatcaccaaagcttgggtccgccgttaccgccgtgagagtactccctcgttgcgattgattttttttgggcgtggcgggtagctagaggtgccggggatccagccgcacgcatcgcgtccctcggctggcgtgattcaccaccggagggccggtgatttcacgacattggtggtcgtcgccgcgggtccgcgcttcaacgtgagcctgtgctctctcacggccatctgatcgcgaggacacgtgtcatctgaaaagcaagttggtacctggaatctcaagtgccaggagaagaatcagatggttcaggaggagccgccaggcgaggagtttgatctgatctaggtggcgtttctcagttgacattggcgccgacaatccttagttcgagttatatttatcttttattttgtaagacttccgctatgtaattaatactctgattattgtgacatttatctctatacactctgttatt

SEQ ID NO: 379 - DNA, 597 bp, Zea mays
  Peptide Sequence Number=SeqID_9953
  Probeset Number=SeqID_14782
aataacagagtgtatagagataaatgtcacaataatcagagtattaattacatagcggaagtcttacaaaataaaagataaatataactcgaactaaggattgtcggcgccaatgtcaactgagaaacgccacctagatcagatcaaactcctcgcctggcggctcctcctgaaccatctgattcttctcctggcacttgagattccaggtaccaacttgcttttcagatgacacgtgtcctcgcgatcagatggccgtgagagagcacaggctcacgttgaagcgcggacccgcggcgacgaccaccaatgtcgtgaaatcaccggccctccggtggtgaatcacgccagccgagggacgcgatgcgtgcggctggatccccggcacctctagctacccgccacgcccaaaaaaaatcaatcgcaacgagggagtactctcacggcggtaacggcggacccaagctttggtgatgctcaaggttttctgagtgcgagtgatttcggaaagatagcgaaaccagaggaaaagcgacgccaggtcttcttatgcccccacttcccccgcgagaataagtcctatcgcaactgaatttc

SEQ ID NO: 380 - DNA, 776 bp, Zea mays
  misc_feature (776)..(776): n is a, c, g, or t
  Probeset Number=SeqID_14783
caagatacaagctcatggttgggagagccaagagggatagcaagaataaaaatgctcataatatgagtatggaagaaaggatacaagcacttgaagtgaagaataaggccaaatacatgctcactctgaatctccaagagaaagcaaactcaacccaatatcttgtcatggaaccaaacccaatagatacgcaatcaggatttaacaataggctatccattatatatgcaatcaggacctaccaacaatgtgtggtacacataatagaaggtgttgttgtcttagaatcgttacactaacattttgccaaatattttgtatgccgttgcaacgcacgggcacgtaactagtagtagtacatagtggatatagcaacgtaacgtgagacccgagttgtcagtgggacgagactaactgacgatgctgcccactagcgcacgggccccgcgtgctagccgcagcgttggcaaagcgccaagtgggcacggaactgttggcgcgcatggctctccttgcacttgcaaattgcaatgctgcgcgctttgtgcccacctgctcgctggtactgtagtgtgggcgatgccgtggaggaggacgacaccggcgtagcgtggagatcgacgtgtggacctggacctggacgtcgccgctgcgtggacaccagattccacgacgctgatacgttggcaattggcaccgattgggtggcactggcacctcgactcagtatgttcgcttttctttaatctgtactagattttgtctatgaaaatttn

SEQ ID NO: 381 - DNA, 966 bp, Zea mays
  misc_feature (966)..(966): n is a, c, g, or t
  Peptide Sequence Number=SeqID_9954
  Probeset Number=SeqID_14784
aaaccctatttcctcttttcagccacagccgccgcgcacccacgctcgtacactcagctgctgctgcgccaagaagaagctgtgccaaggagaagctgtgcgcggtccaagcacaggtgcagggtgaacaggaggcggcgacggcgctccagaggagggtggatgagctagagagcggcagagaggagagggctggtgtgttggcagtggagggcgtggagctgcgtagggcgaacactgtgctagaggagaacaacagggagcttgccttgaggctgcaggacgcgattgagcaggctgctgcatccgcctccgctaatctagctcctaaggtcacttggtcgtggaagggcttcttattgcagtcagtgtttcagctctccagggagagctacaaactaccaaagaagccactcactgaaaagtttgtaaatactcttcatttcaagatccattggggacatggatgtttgggagttcattgtgcctatttcgcatgtaaagcaaatcaagctatcaaacgttggaggaaggctgataatagcaatggaggatgcattatccaatgaagcagctacaaaagcatgcacaagattgcctatagaactggtagagaagcttgtcattaaggtgagctatgtaattgacccaaaaggcacttcaagcgggcaggaaagtctaaggcccttactaattacttccaagtaagtagagcaatcaccatcacacggatttattcaaggtttttttgtgtgttaagccaattgttcgttttcatgtaattgttgtccactaatattttattgaataatttgtgtgctgtcgcaacgcacgctcattgtactagtagtattgaatgctccatttgtagttcttgtgatattacagtagtgtagtctaaaatactgaaacattgtacactgtaataccctgaaaggctgggccaatcaattttgactcttcttn

SEQ ID NO: 382 - DNA, 648 bp, Zea mays
  Peptide Sequence Number=SeqID_9955
  Probeset Number=SeqID_14785
atgtttgtccttatttttaggtgagctttggttttgcagccatgtagcttgactttccagcgacccccttgctatatccgctggccccggagctgacggttcttggccatggatgggcacggacagtcagatgaagcggcgtccaaggcgtggcgcggcgcagcgagcggcgtggtgagcgcgcccgtggcccgcgtgtgggagctggtgtcctccacgtctcggctgcgcgagtggatgcccatggtggagtcgtgcaccgcggtggccggtgacgaggacgtgccgggctacgtgcgcctcgtgcgcggcggcctcatgttcccccagcagcagcaggggtcgtcgtgggtgagggagaggctggtggccatggaccacaccgcccgctcctacacctacctcatggaggacggcaacgtcggcctcgccggctcccgcaacaccatcagcctcctggactacggcggaggcgcaacgctggtggtgtggagcttcgagatggagccggtggacgacgccaaccaggatgccctgctcgactacctccgcatcctctacaagtcgtgcatcgacaccatacctctttgtctgctctgacctgatattaaatcatctattcaatatatatatatgcgtcatccttac

SEQ ID NO: 383 - DNA, 567 bp, Zea mays
  Peptide Sequence Number=SeqID_9956
  Probeset Number=SeqID_14786
gctcaagtgaacgcatgggcagagaaggccaccggcaccccgggtagaaccaaggagctcctgccgccggactttgttgatgaaagcacgatgctggttcttggcagttctccatacatcctccttccagaagcacgagatggcctccggagcgtggccgagaagctgagcactgagcaaggttcgagttaggcggatgaagttgtcctttgggttcgaagcgtccgagctgctcaaagctttggggctccggctgccttttagcccggaagaagcagatctgtcagggctcgtcgctgatccacccgtaatgaggaggggtgctgcgcgtgggaggctgggagccgcagggattgtttcatcgcgggccaccctttcgtcttcttgatcctagaagacacgacaggatgtggtgctgttcgtcggccatctaatcgcttgaacgtggctttgtcttgtctgaaacaaacaaaggttgtgggatgatccatgtagctcatgactgcttcactgcgtactccgtatgatgaattgatgattgcttcgctgatgaatgcgtatcaggct

SEQ ID NO: 384 - DNA, 703 bp, Zea mays
  misc_feature (1)..(101): n is a, c, g, or t
  misc_feature (702)..(703): n is a, c, g, or t
  Peptide Sequence Number=SeqID_9957
  Probeset Number=SeqID_14787
nnnnnnnnnnnnnnnnnnnnnnnnnnnnnnnnnnnnnnnnnnnnnnnnnnnnnnnnnnnnnnnnnnnnnnnnnnnnnnnnnnnnnnnnnnnnnnnnnnnnncagcccactgagatccccttcgcctcgtatcagtttcccccactctgtgtcatcctcagcgtcgagcgctggtgcgcagttttctctactcagcgctccttgccgtcggacgccgagttttctcaccgagattcttgttgcaccatcatcgtcctagtgcctcgtcaccatagccccgtgccctgctcgcagcgccgccgcacctcgtcgacaccgtccgtccacctcatcagagccgcactcaaagcacctccgcgacatcgccctgttcttcgcctgctgctgctaatcttcgtcgtccatgttcaacgctggaaaccccaggtcctgaatgtgacttcgcatcgccatgaccaagtggttgatctagtagttaagaatcaagatctatttagatccgtggaagagtctcaagttttcaataagcaagaagtttgcagatgaagatatgatgctgaactccatggatgctagtctagtgatacccccggtcatcttcctgtggatggatgtccttgtttcgctgtactttgatgaataaaggttaagacattatgtctgttcaaagtgtaatatgttaatataatcgttatttacgctnn

SEQ ID NO: 385 - DNA, 530 bp, Zea mays
  Probeset Number=SeqID_14788
cagagtattaaattattacatcatcatcatcggagtttttgcaaaagtaaccatcattgttcgaagtgcagcggaaataaactaacggtaaataaatggagggatggggaagcctgtcccatcactcctcatgctcctcctcagccgaggcagggtcccactcgacagtccaacccggtggcaagatggacggccaagtcactccagcaaccctttcctccagagaaccttccaaagcagtggcagacaggtcctctagtgcaggctcgggtgctggatcgggggctacctcctgagcagctccttgctccggcacgaggatgtactctccatcggcaagattacagtcttcggacggcgccaacgcgggaatccatggcggcggctcgcttctctccctacacgatgaaggtggctcggagttcgccttggatggatgcgacggccgcgggtttgcctatacccccagagggacgtccgacggttggagtttgagcctaagccatggcggatcggtgcccggaaatcgt

SEQ ID NO: 386 - DNA, 717 bp, Zea mays
  misc_feature (717)..(717): n is a, c, g, or t
  Peptide Sequence Number=SeqID_9958
  Probeset Number=SeqID_14789
ctcgcctcgctccgccgtgccttgccgtgccagctctctgcgcttggacttggactagctagtggcacgtacggtacgtgtacaaccagccgtgcatgccagtaggagcgctgtccctgtctgccaccactgcatagtaacatgcacctggtgcaggccgacggcgacggtggccacggcgatggcgacgctctccgtggtccagcaccgccgtgcctcctccgtcctatcctaggtacggacaagcatgcaaaggaaggagggcactcgcacacgcccgcacacacccaaagctttgagctttcactggcttttggctgcctccaacagtccaactcgatccaagcgcgcgctgcctggaagaagccaggaggaggaagtctgcaaccgaaggatgcttgttcgctgcggcttgctgcggctgcaatccggctgcggctgcggcttctacagtatttttctctctatggattgcggctgcagcaatccaaacagctgcaacagtgtcggcttgtagccagccgaacacgccccgaacgatgtagacacgtcgctctcacgtagtcacgtacgtacgtacgtaaatgcagtgacattctctcttagtgccatgcttgcttgggcttacaatactgtgctgtgtattaggcattcggatctcactgagctaaacaaacagagataaaggaaccgaggaccggaaaaagcagtgcgtcn

SEQ ID NO: 387 - DNA, 676 bp, Zea mays
  misc_feature (676)..(676): n is a, c, g, or t
  Probeset Number=SeqID_14790
gggccatggttcagcttggggatagcttaagcgcgcagcaccaatggaacagcgggaaggttgggatctggtggcggccgtcccgagcaatcctcgcccgcaccatcggttcatccactaagccagccctggaagttcctcttcaccgtcggggatgcgtctgtgggcgtggcgtggaagaacaaccatgccgacatccccaattgctcgccagacgtctctggatcgccccgtgccatggttgggtctccgcgctgctcaaatcgtcgagcgaagtcacgtgtcatctgaagagcaagttggtacctggaatctcaagtgccagactgtaatcttgctgacggagagtgcatcctcgtgccggagcaaggagctgctcaggaggtagccccagatccagcactagagcctgcaccagaggacctgcctgccactgctttggaaggttctctagaggacatggttgctggagtgacttggccgtccaccttaccaccgggttggactgttgagtgggaccctgcctcggctgaggaggagcatgaggagtgatgggacaggcttccccatctctctgtttaattatcgttagttttattccactgcacttcgaacaatgatggttacttttgcaaaactccgatgatgatgatgaysatgtacataatttaacatn

SEQ ID NO: 388 - DNA, 156 bp, Zea mays
  Peptide Sequence Number=SeqID_9959
  Probeset Number=SeqID_14791
actgcaagcwccgcctcccgggttcacgccattctcctgcctcagctactcagaggctgaggcaggggaatcgcttgagcctgggagacaggctgcagtgagccaagatcgcgccactgcactcaagcctgggtgacagagcaagactccgtctcc

SEQ ID NO: 389 - DNA, 156 bp, Zea mays
  Peptide Sequence Number=SeqID_9960
  Probeset Number=SeqID_14792
ggagacggagtcttgctctgtcacccaggcttgagtgcagtggcgcgatcttggctcactgcagcctgtctcccaggctcaagcgattcccctgcctcagcctctgagtagctgaggcaggagaatggcgtgaacccgggaggcggwgcttgcagt

SEQ ID NO: 390 - DNA, 1264 bp, Zea mays
  misc_feature (1264)..(1264): n is a, c, g, or t
  Peptide Sequence Number=SeqID_9961
  Probeset Number=SeqID_14793
attttccactcccacccctattctttttcagccgccactccctttctctcttctcccagccgtctcttccgtggagtcttcttccccagcgcgcagggaactcccacgacgccattcatccctgctccccatccatggaggctcggctccagcttcctcggcgctcccttcctgctcccagtcgctggtccaggcacaaggggcttccccctcggcagcaccacctggccgccattttcctccaagtgcaggcgcctaggacaaactgcgagcccctctgctcctactcgtccatggcgcctcccacggcgcgggcgctcctctggtccagcgcgcgcgagaaatcccccatcgccggcgcgcgccgctgccgcatttccccctgcgagctcgagcttcttcctcccggcacccctcacaacagcaacaaatcaccgacgcccaggactgagcgtcccttccctccctcggacctgtgggcactagcgcaggctccctttttttccccactgtctccctcagccagtagccgtcgacctcctccccctgctgttcttgtagtccaagttctccccacgccgaccttcttctccggcaagtctggccgctgccatccctcggcaccgggctggagcacacgccgagctcctcctcacgtgctcttccaccggtctgcgtccccgctcgagcagcagcagcagcagcggcgacgccctccactgcgtcgcgctcgccaggacaggccacccgccgtcgatctcgcagtccccgtcgcgatgtcgtgaatccgtgctagctatcggtgtcgcgcttcgtgccttgcctatgtaacgaaatgctagccggtggacagcacatgcgactcaccgatccggccaggaccgagagatgatgatcgagcctgatgtggtgccaaccacaagatgccgtggtggacgacctgaaggatggacatgaccagtggatgctcgccaagcgagtgccaccccagcaaacacaatctaagtgttaaattaaaggtactctttaggatgattggttgctggtgtgacttggccttcatccctgccaccgggatagatggtcgagagggttattgcttccgctggagaggaccaggaggagtagcgtggccaggcttcgccatgttactcggttttctccgttagttatttccgctgcattaaaatttatggttattatttctgaaactccgataatgtaatcactaatgatacttattaaatttgtggtattatgttcn

SEQ ID NO: 391 - DNA, 941 bp, Zea mays
  misc_feature (941)..(941): n is a, c, g, or t
  Probeset Number=SeqID_14794
ccctcccaatggctaatgtcaagcggtcgactccagtgactgtgcccgctcccgctcccgctccctcgcctgcgcccttggacccgggggctacagccgccatggccaagaagtcggcgtccacaggggcagtgattacggccacgaaaagccccgcggcggcgtcaccgctgattgtgatcgaaattccgtcgtcacctgatgcctccacaggtggcagccgctcgacgacgaaagcgcggaagaggcccgcgctgtggccgctcgttcttgacgacgagatcgagatgtggacaccgcgggagaagcggcgcctcgacgaggactgtcagatcctcgccggagaccctctcacctccaacatcgaggtggcccccgccgccgccagtgacgaaatcgcggtcgttgcggagcgaggaaagattgcgtgcagagattacccacatccgaggtctgcttgtgcaaagcacccatttagtagaacccctcatgaacgctattgtgaccagtgtttctgctatgtctgcgacatcgctgccccatgtgtgtcctggaaggggcctggagggcactgcgacgcttcggacagggacaaacagtggaaggctttgaggcgcatgatgcaagtcaacaaaagcaaagcctagttgattttgcccccgatgctaggtctggcaatcggcattttggagtctcagcttgttctgatgggaagattatcttggagtaacttgtaaatatggttagtgctggtgatagatctcatcccaagatttggtgcgtgcatctgtgtactgcctatcagaaactgaatgatgcgcctatataatataaccacctatgaagtactagtatcagtcctgtgctcttgtgttccacttaattctagcacatgtatgcatctcgcggtttctaaagtcttaatggtcctctccaatccn

SEQ ID NO: 392 - DNA, 642 bp, Zea mays
  misc_feature (642)..(642): n is a, c, g, or t
  Peptide Sequence Number=SeqID_10087
  Probeset Number=SeqID_14795
gcgtgaaatttaccaagagtggactgttgttggctgaggaacgtctctggctcgatgttcgagaacatcttcgtccctgcgttggagagattgcagccgtctcctccagatccgttgttccccgtcttggatccgtgcttaagtcatctgctccaggtctggtctcttctattcacaactcgtattcgatctgtgctcgcacctcttctcttcctctccctgtcttccttgcccatctactccatccgcatggtgaggtcggacgccatgagctcggacgctgctcgctccagtgctagtgactcgacaagctcgcaggccgcaggccgtccatcgcagagggagattctgctgctgggtgcacaccgtccattcgaccaggtatcttcacccgccggtgaacaccgctcattcttcaacatctccggcgaccatggggtcggcggcgctggtgtgcgcagccccttcgtggccccagggcgttggtttcatatgtgtatggttaatttatgtgacctgttctgcagcaagctggggtttagtaaagtgcatgtttcagtttcaagtttcagttatagcaatcttcagttatagcagtatctgaaattttatctattctgtatctaaaattttatccagttn

SEQ ID NO: 393 - DNA, 435 bp, Zea mays
  Probeset Number=SeqID_14796
aaagactagagtcatttacataatataaatcaaagtacacagaatagaaacgtagccaacgtakacaaactcaccacaagtagctssactgggggagatcgccagcctaaaccacgaactcgtcgaagtcctgaaactcctggagatccgcctcgatgccttcttctttacctgagcatagattgcaccaaaggcaacctttaccaaacagatgctcggggttttcaattttgtagaactcgaagaatcagatcacttggtcgccaacgcttgatcgtcgattccttgaagcttggagatggatcgcactctgggaaggaggagatggccggagaaaggcaccatcggcgacgtcgaagtggcaggttgtcgtgacaccgcgcgagcacgcatgaagaggatggctgcacgacgggggagaagttgtggtggact

SEQ ID NO: 394 - DNA, 195 bp, Zea mays
  Peptide Sequence Number=SeqID_10088
  Probeset Number=SeqID_14797
cttttacctgtttttccattctaagcagtgcattcttttttttatagcagtcttttgataacaatagttaagaggccaggcacggtggctcatgcctgtaattccggcactttgggaggctgaggcgggcggatcgcctgaggttgagagttcgagaccggcctgggccggcatggtgagaccccgtctctactt

SEQ ID NO: 395 - DNA, 195 bp, Zea mays
  Peptide Sequence Number=SeqID_10089
  Probeset Number=SeqID_14798
aagtagagacggggtctcaccatgccggcccaggccggtctcgaactctcaacctcaggcgatccgcccgcctcagcctcccaaagtgccggaattacaggcatgagccaccgtgcctggcctcttaactattgttatcaaaagactgctataaaaaaaagaatgcactgcttagaatggaaaaacaggtaaaag

SEQ ID NO: 396 - DNA, 1389 bp, Zea mays
  misc_feature (1389)..(1389): n is a, c, g, or t
  Peptide Sequence Number=SeqID_10090
  Probeset Number=SeqID_14799
acggtaaggggaatacaagggtccagtgtgtgcgcgctggtggcgttcggcgccgtatcttcttgtgtcttgctaggggtccggttccaacaattggtatcggagccaggttcctgcctgtggccatgtcgctagtccctcacggtggcggggcgagcgtaatgtcgatggcgtacccggtgctcgtgccggcaagctacactgcgtgggcgatcaaggtggaggcgaaccttgatgcccaaggcctctgggaggcagtagctccggcggcaggcacgacggtggatgtgcagaagagcaagacggcgagggcggtgctgcttcaagctctgccggaggacatcctcttgcaggtgtcgtcgaagctgacggcgaaggaggtgtgggacagcctcaagtcgaggtatgtcggcgccgaccgcgtcaagtcggctcgccttgcgacgctcaaaggcgagtttgatcggttgttcatggaggacggcgaggcgctcgacgtctacgccggcaagatcggcggcatggcggcgcggtacatcgcgcttggcgcgacgctcgacgacgccaccatggtgaagaagctcctcgacaccgtcccggatcggctctacccggccgtggcgggtatcgagcagttctgcgacgtcgacaagatgccgttcgaggaggcgctcggtcggctgaaggcgttcgaggaacgctgccagcgacgcagccgtacgagcggcagcgagcggcgcgacgaccagctgatgctcacggagaccgagtggaaggctcggcaaaagaagaagtcgacgatcggcaagtgcttcaactgcggcaaccgcggccacttcgcgcgggactgtcccaagaagaaggaggaggaggcacttctcgccaaggccgacgaggaggcgtcgctgttctaagcggcgtacgatgccgtgtttagggggagtttgttaggaataaacccggcatcgtgtgcgtgcgtgatgccggggttgtgtgtgtcgtgtcttgagttgtgcgtgtgtgcatgcagccgtagatgctcctatgtgagttgcgtggagtcagctaggcggccgggtcgtgtgcgcgtacgtgcgcgtattttgtggccggccaagtcgtatgtgcgacctgcttgttcgctgcttgccgtggaggtaagctgcacatgcacaggttgttagcagggagtggtgatctgttaggaggccttgactggggcgtggtcgcgagtcttgcggatcaccatgcatggcgagatagctgggatagagttagtggctctcgtgtgtactcaggcctataaagcctcctgtaattgctctatgaagtcacggtaaggggaatacaagggtccagtgtgtgcgcgctggtggcgttcggcgccgn

SEQ ID NO: 397 - DNA, 1912 bp, Zea mays
  misc_feature (1)..(500): n is a, c, g, or t
  misc_feature (1544)..(1912): n is a, c, g, or t
  Peptide Sequence Number=SeqID_10091
  Probeset Number=SeqID_14800
nnnnnnnnnnnnnnnnnnnnnnnnnnnnnnnnnnnnnnnnnnnnnnnnnnnnnnnnnnnnnnnnnnnnnnnnnnnnnnnnnnnnnnnnnnnnnnnnnnnnnnnnnnnnnnnnnnnnnnnnnnnnnnnnnnnnnnnnnnnnnnnnnnnnnnnnnnnnnnnnnnnnnnnnnnnnnnnnnnnnnnnnnnnnnnnnnnnnnnnnnnnnnnnnnnnnnnnnnnnnnnnnnnnnnnnnnnnnnnnnnnnnnnnnnnnnnnnnnnnnnnnnnnnnnnnnnnnnnnnnnnnnnnnnnnnnnnnnnnnnnnnnnnnnnnnnnnnnnnnnnnnnnnnnnnnnnnnnnnnnnnnnnnnnnnnnnnnnnnnnnnnnnnnnnnnnnnnnnnnnnnnnnnnnnnnnnnnnnnnnnnnnnnnnnnnnnnnnnnnnnnnnnnnnnnnnnnnnnnnnnnnnnnnnnnnnnnnnnnnnnnnnnnnnnnnnnnnnnnnnnnnnnnnnnnnnnnnnnnnngctgaaacatgaaaactttgttgacatgttggggtactatatcgagcgtgatcttcacatagtatcctacaaattcgccaccatgggttctctgcatgatcttctacatggaagaaaaggagttcaaggtgctcaagctggcccagtgcttcgttggatgcaacgagtgtgaattgctgttgatgctgcaaaagggctcgaatatcttcacgggaaagttcagccttccattgtccatagggatattagatcaagcaatatcctcttgtttgaagatgataggaatcgggcggattccctgatcgatctcaggttgtagtggtgggtgattggtggccagggtttgaggcgcgatgcacaacggcggggcgccgtgttcaccgcgcgcaagaggagagacgcgaggaaaggggcggctaggtcacagtaatcttccggctctctctggaaagccgaaacaatcttgtttctgcttaatccctatagagtggtgcttacaattatttatactcccttctagttcttatctaatgagataaatcccctattttctctctaacaaattdtatctccttaatcttctaatccttatcatcttctaatccttatctgcatgcctatgctgttgcccggcgcctatagtggcggccgatcataacagaagacttcaaggcaaagatagcagacttcagtctctcaaaccagacttcatatatgtctgtccggttgcacattagctcacctcgggcctatggatatcatgccccagagtatgtaatgactggtaaactaacccagaaaagtgacgtatatagctttggaatagttcttttggagcttttgacaggtagaaagccaatagaccatacaatgcctatagatcagcacaacctgagagcttggaccacaccaatgttaactgaagagaaggtgaagcagtgtgtagatccgcgtttgatgggtgtgtatccagcaaaaggagtcgcaaagctcgctgctgtagcggctttgtgtgtgcaatctgatgctaagctccgcccaaannnnnnnnnnnnnnnnnnnnnnnnnnnnnnnnnnnnnnnnnnnnnnnnnnnnnnnnnnnnnnnnnnnnnnnnnnnnnnnnnnnnnnnnnnnnnnnnnnnnnnnnnnnnnnnnnnnnnnnnnnnnnnnnnnnnnnnnnnnnnnnnnnnnnnnnnnnnnnnnnnnnnnnnnnnnnnnnnnnnnnnnnnnnnnnnnnnnnnnnnnnnnnnnnnnnnnnnnnnnnnnnnnnnnnnnnnnnnnnnnnnnnnnnnnnnnnnnnnnnnnnnnnnnnnnnnnnnnnnnnnnnnnnnnnnnnnnnnnnnnnnnnnnnnnnnnnnnnnnnnnnnnnnnnnnnnnnnnnnnnnnnnnnnnnnnnnnnnnnnnnnnnnnnn

SEQ ID NO: 398 - DNA, 873 bp, Zea mays
  misc_feature (873)..(873): n is a, c, g, or t
  Peptide Sequence Number=SeqID_10092
  Probeset Number=SeqID_14801
gggtgcactggtttgtcggttgcaaaattctggtataacacaaattttcattcatcggtcggaaggtctccgttcgaggatcgtgaggtgatgaccaaactggtgcaacaacatctccttcgcgcccaggatcgtatcaagcgccaagctgacaaaaagagatctgagcgagccttgccgaggacgccgactggcctcgggccgacggccgatccttccacgactgtcggccagcgtttatgtagacaggaccaattactgccgcatcagggtctgcctatgcagaatttgggaagacaggttattgtatctgtgtttggaccaagggaaagtaagaaagcaatgatgcacactgatgttggtaggctcaattgcaatggagcagacaacaaagagtattcattgatactttataaagctttggaagtcctgttttggcaagaacatcatcatcgatccgacctcggacgaggaagcacggcaagatggaagccttgtggtggctttcatgccagtccgcaaggagataacacaactcgcgctcactggagagtggagtgatggcataataaccaaccaggcggtagagctctgtatggatgcttgcagcaagcacggtgacatactgcgtgaccgcttgaatgatgccggcaccttgacgacgagtgaatggcgtggcagatacaacacttgcaagagcagatatccttggctgtataagttctgtaggcaagggaggctgatgggcctgatgtttgagtgagcgtgcatggttgatgatgattttttctctctttctttttcttgtcatacctaatataccccttgcaactcacttctgacctgaaccctttggcttcatatagcatctgn

SEQ ID NO: 399 - DNA, 567 bp, Zea mays
  Peptide Sequence Number=SeqID_10093
  Probeset Number=SeqID_14802
aacaagaagctcgacggcccccactcccagggccagcttatgtagatgaccatgatgggttccaccttcgttaccgcgagaacactctctgaacaaggaggacagactgcttcgcttttgctggctggttgtgaagcacagagacgcggtatatggactggagttcgtcaatgaggatggcgggaggaacgagctgagcggtttcagccttgctcatagaaaggatgactacgatactgaacttgcctcggacgatgaagattcggatagcgattcagacacgacgagtatgcggtcgaggaggagaagtagaactgcttggctaggtttctgcagtctcatttgtgttggcagatgcattttctgcagtctcatcgagtacgtgaatttattattattataatatagtagtagcataggatgagagtcagaacctatcaacttgattctaacacacttttgcagtgtcgagcatatgcttgtcattagatgtttaaggcgtgttctgcttctttcaatcatggtgtataacgttccgggtagtgagttaatggttaaggttaggtg

SEQ ID NO: 400 - DNA, 742 bp, Zea mays
  Peptide Sequence Number=SeqID_10094
  Probeset Number=SeqID_14803
caaataaaaagtccgcgcggctcgctgggagggcggcggcaggatctccccgactcccaccggtggatctggggcgggcgcgaccgccaaggttgccatgggatggctcgccggcatggcgatgctccacggcacgcgggctcgggacgtacgtttggcgaggcttggggtccttacctggaccaagcctgtgtcggcactggcgctgacccgtcggtgggcagatttgagcgggggacagcacacaacggcatgggtgactcggcggggctccgacgaccccttggcgtggtggagctggccaacgcgcgggctgcgacgaggaagaccactaggtggtgtctacggaggagctctggcggtgcagtcgcagcgctgttgctgcctgctagggctacagagtggtccgacggtgatggcgggctacccggctgtggcgtgtgggtgttgtgctatgtgcttccggcaatggtgagggggaagcttcgggggcgaaagccatggctggcttccccagagttgacaacgacgacacttagtgtcgttgtcttccttggaagcattgtcgttggcgcttcctcctcacagtgggaattctcctagggaaacctcgcctgagctagctcgggtaggcgacggcagcgtgcattgtcattgtcctccgtggaggtgttgccttggagccccacagggggaaattttatcggcgatatgatatccaataaacccgattttcctgttc

SEQ ID NO: 401 - DNA, 665 bp, Zea mays
  Probeset Number=SeqID_14804
acaccagcacaagcaaaacatacatagagcagcagaccagcagctcgacgatctactatagctagctagaaagcatatattagatccaattaatggcaaaatccgcacaggcatcagctgcgctgctcatgcgccgtgttggcgaccctcgccatgatggagagcgcccacgccatctgcggcatggcaaacgaggacttcaagctgtgccagcctgcggcagcggccaacgacccgacggacagcccgtcggcggagtgctgcgccgcgctgggtaaggctgacctcgggtgcatctgccgctacaagggtgtcgccggcatatggatgaggatctaccacatcgaccccagccgcgccatggcgctgccgggcaaatgcggcctcacaatgccaagcaactgctcctgatgcgcgtgatgccgtgattgacgtgctggcccctggccggaaacaagttgtgtgtgtattctcgtacgtatatatgttatgggtagctaaataagtggagctcgagatgatgaaatgccctgtgctccttgatggctgcttcatctagctagttttggtttgagtgtgtgattgtgtgcgtgcgcgtgtgtgctgaaagctcaacgtgtaccttattatagggaaagatctatggaatacaaaatatggatcgg

SEQ ID NO: 402 - DNA, 948 bp, Zea mays
  Peptide Sequence Number=SeqID_10095
  Probeset Number=SeqID_14805
gaggttgttgcgatttgatcgtgacacgaggtaagagtatggttcggtctttttgatcgagtcagtgagattaatccaacagttgttactagttgaactaaaaataagcttaaattggttatggttctctaaccatagctaaataggacgggagattaccctttcacaaccagtcgatctcctgtcatttcattgggagattacccctccaaagttcggttccatctgttcttcatttcagcttcagccatcgagagattttgatatttgtcatcagcaataaacatgtttgtaaaattgccatcatgcccacattttatagactcagctggacccacaattcatatacatagtggtaattataacaagaagacaacattgtaagtggcaaaaatccaattatctcttcagccatctgtgtctctgggtattctggagttaccatcataagactgtctttcgaactgcaaacccgtcagttcatcgcttgcgtcgccgatgcatagacgaagcgcgtctttggagctaccgtctgcatttggttgcaatgataagacaggacgtgataggacgatacttcaaataagattgtttggttcagggtcaaragttgggacagaactatcccagtattatctccaratgttcctcaaaattgggggacgaraaaggacgtcaraaracgtytctgttctagctatcctgcaaccaaatacmctataataggacgcgacgtgatctatcgcmcggaatggtgctcaatgtttgacgtgcattaaggccattgctccagctactcctgccctccacggctccacccctttytytggcttgatgtatytgcagctccctcatytaaacaactccctcattatgtaatccattgaaagagtatgtacagtgatgattaatatagagggtttttgagatctttaaagggactatttg

SEQ ID NO: 403 - DNA, 649 bp, Zea mays
  Probeset Number=SeqID_14806
tagcctcacgtttcacacaggccaagtgccagtgccagccctgcacggccgcacggatgagccgacgaaccggcgagctcgccgtcctcgcgctgtttcacctaacgcgttgacccggtggccggtgcatctcgtttcacctaacggccgtgcatcttgccggcaaacgtactgatctcaggagagagagagagaggggaaggtgatcgtgaggttctgaagaagtctccggcaggccgtaggcgtcgcagagcatagctcgcttcgctaatcctgcaggcccgtcaagtctccagcacggataatttgcatggtcgcgctcgcgccgcgcggaaaaagattacctgctccctccagtactgtgtcattgtatcgttctgctccgattgaacccgtggaaccacaagatcacatagggatgacaatagatcggtttggatcgggtgaagaaaaaacccgccgcgttcataccgatgaagtctactctcacgatcatacctgccgatgcaattctaaacccatgtcgtgttttagttcacctgtttttacttagagtacactttagttataagcaatgaagtaccagcaatagtttagttatatctaaggatcttaagtctttttatgttgagaagtaacaaaatatttc

SEQ ID NO: 404 - DNA, 562 bp, Zea mays
  Peptide Sequence Number=SeqID_10096
  Probeset Number=SeqID_14807
gtagcacttatccccgtctttctctcttctagcctgttctaagctgccgtcgttcgacagaggcatctccccatggctccacctcccagtgctgtccctcacagtcgcgccaccctccacccatctccctcgcgcccagctccattttctccacttcccagccatggccccgggggcaggctccctgctgctgctcgtccgtggtctggaagctctgattggtgggcgccatcgtctcctacctccatctgaaacaccacatcgagctcccatcgtcgcgcccctccttgctcctctgctggccatcgctgctccctggtgctcggactcgccagtcatcgccccagccgagatccctcctcagtatcgctcgcccaatccgaggggcactggacatgtttgggacatgggaggttcaggcagcgatgggtagaactacaacactacaatttccattcaatcaaactgtttctgctttatcatgctatatgcttctgtggaagctttaaattattgtgatgtaggtcatttagctcaagtaattgctagcccaacggtcatg

SEQ ID NO: 405 - DNA, 517 bp, Zea mays
  Probeset Number=SeqID_14808
gtcgccaaacgccattactgccgaagggagaaaggagagagaaagcatagggtgtcgctgttgggcaacccttctacgtagtcgttcgaagccttggggttgtgccagggagctctgtgagatcatactagaggtgctggttggcgttctgtgtgttgccggtgggccctgaccacgcggttggcgcgccgcgtgggtccttcctcgtcgcgttgggcaagctcgtcgtcggcatctagttcatcgacgagcaagctacagaggattctgaggttcagttggtagagactgctgagcaggagctcgttgaaggagaagagcaggtggtcgaagaggagccgcctaacactgaggctttcgacttgatctaggtggcgtctcccagtcagctttctggcgccaaggataaattttagttcctgctatattcatattttattttttgtaagacttccgctatgtaataagtactctgattttgttgtgacatttatctctatacactctgttattatat

SEQ ID NO: 406 - DNA, 816 bp, Zea mays
  Peptide Sequence Number=SeqID_10097
  Probeset Number=SeqID_14809
atggatgtccgccgtcccctcgcccccagatctcgcgcacgcccacgatctcgtgcacgcccacgcgtgaaacccagccccagttatgcccgcgccgagccctcacccacggatccgaggatctcctacccctctgcgccggatctgctcctcccttcgcccgagattgccgtcatcaatggaagtgccgaggatccgccggatcgcgccctcctcccctctgcgccggatccgtccgctcccccatctgtattggcagtgagggatgcggcgacctgtagtgcgacggcgtcagctcgctgcccgcttccccacgaaaaccctaatggtgtcccgcctccttcacctctgtcgcctgattacacctcacttcaccgctgcttccttctccaccgccatcagcccgaccttgcatgtctccgcctcgtcaacatgacctgtgggctcaccctcgtcaaggccttttccctggccaatgctctgcgcgaccacctcgacgtcgaccagatgcccccactagctatccctacaggcgacgccaaacagcttcacggcggtggagtaggtcccgacgcggtcggcgaggatgcaaaggccaaggagaaggaggcgttcgacgtgaagctggagggtttcgacgctgccgcgaagctcaagatcatcaaggagctaaggacgttcacgaatctgggcaaagaatgtccatgtctgtttggtagagctccccttgccccctgataatgtgtctgaaagtgattatgtaggaataaaatctttggaggaagtgaatcaggcgaagaaattttttaagctccg

SEQ ID NO: 407 - DNA, 644 bp, Zea mays
  misc_feature (1)..(1): n is a, c, g, or t
  Peptide Sequence Number=SeqID_10098
  Probeset Number=SeqID_14810
naatttgaaggtaattcattaccaaatatcattgttcgataatacataataccgaataataagttcattattacataacttcaaatgaaacacctagactystgagtgcaatggggccatttgcccttgcgaaatgcatcagggttgtccttcattgcttcctttgcacgacgtgcacgctcaagcttattctccttctcttccctgcattcagcaacacgcctcattttctgctcgtcttcacgttgttgctcggcagcaagctcctctcttcttttctccatcctctctttgtcctctgcatcccactttttaagattatccaaccacttcttgtctttctctgatatttctgtgtcaatccactgctcaaaatcacatagcggtggaggagtctggagtcctgggcggctacgaagtacttcatgggcggcacaagccagcaactgcctggcttcctgcgcggctgcgccctgggcggacggccggacgcggaccacggaggtgcggcggcgcgctcaggtcgggtggcgcgctcgggtcgagcgatctgctagagcctgaagcgcgcgcacgtggagcattgcagcctggcggctagggttaggacttccacttgctgctcgctggatgccgcctggatt

SEQ ID NO: 408 - DNA, 515 bp, Zea mays
  Peptide Sequence Number=SeqID_10099
  Probeset Number=SeqID_14811
aaccccaacttatcgccggaggaccatggcactaggccaacccatcagatgcgcggacagggtgctcgccgcgacacaccgcaactgcgaccggaaccacccctgtccagcggtgcgcccactcctccccttcctctccggccgtgttggtcgtccctgaccccaccttggcgcagcgccgccagctcccatggtggattgaagggtcctatcatgcccctctactcggcttcctgctcccacggatgtttcacccgtcaacagagggcttcggcactccaatccttgcacgaggttacgcgaatctgaagaatcaccctggtagctggaatctcaagtgccaggtggttcaagaggagcctcatagcgaggagttcgattcgatctaggtggtgtctcccaatcgactttctggcgccaaggatggattttagatcctattatatttatcttttattttgtaagactttcactatgtaataagtgctctgattatattatgacatttatctctg

SEQ ID NO: 409 - DNA, 518 bp, Zea mays
  Peptide Sequence Number=SeqID_10215
  Probeset Number=SeqID_14812
gagataaatgtcacaatataattagagtacttattacatagcggaagtcttacaaaataatatataaatatagatcgaactaaaatccatccttggcgctagaaagtcaactgggagactccacctagatcgaatctaactcctcgttatgcggctcctcttgaaccacctgttcttctcctgacacttgagattccagttaccagggtgattctttggatcctcgtgaccgcactgcggtggttgtgccatgcagtccccaggccgcgacgaagtgtggttccgtggcaattgttggcgctggtgagaaattggggcagcaccaaaggcttcttccacctgcgagcaccacaatgatcgtcgctgtaccccggggaagcccactgacccgagcttgcgcctcaagcaaagacggaacacaatttccatggcggcggcatcacgttcttccccacgcacggcgtcgatgaggattgggcagcgcagcgtggtctcatgcgtgggaggctcgatcaatc

SEQ ID NO: 410 - DNA, 668 bp, Zea mays
  misc_feature (668)..(668): n is a, c, g, or t
  Probeset Number=SeqID_14813
gttgtcctcgtctcttctccatcacgtaccttatctcccaagttgtttcctctctggccatgccgtggagcattagccaacctcctccacaggtccgcgttccagctccctcctgctcctgctcaacccgtccctctacttgctagcctcggcgaatttccctgcacgctccactgcgccatcgctcctgccagccatggacgtgcgttcctcgagcttgtccagcgagtcgcgcccaggccacgtcaagctcctcctcgggtcgctgtcttcgagcccgacctcaagctgcagcgcgcccagcgactctgacccaacgcgcgctctttgctggagttcgccggtgttctccacagctcggctttccatcgcgccgctcgccctcagccatggcgccctcgcctccatggtgctcaactggggcggatcttgtgcccctgctcttctccgcggttaggccgccatacgcacagtcgcacagtacgtttaggccgccatactcacagtaccggtcataatgatagtcattatatgttatttttattttaaaaagtaggttattaatatttatgtaatttttggtaataattattaattatacatttttatatgtatatgataaagtttacgtggcaatgtaatttaaacgaggagtgctttggtggtgn

SEQ ID NO: 411 - DNA, 720 bp, Zea mays
  misc_feature (720)..(720): n is a, c, g, or t
  Peptide Sequence Number=SeqID_10216
  Probeset Number=SeqID_14814
gttttccaaccgcatccagctccagccccttctccagccggcgtttctcccttcccatggcgttcggccctgctcggcccccgccctcagccatgccctggacttcctccgcggttcctagctcggtcttcttcctggcgtccaactggaactccgtattttctccctcagctcccatggcgcccagcagagctctctcttcccttctcatggccgccgtgccgacttctctggcgcgccctggcgtctgcgtccagttgagctcctccagctcgcaaccctctccctaggtcctcgcgtgcgccggctctggctcggccactcctcttcctcctcccgttccctactcgcccatggaagatgcgacagctcctctactcggcgctggaatttctgcgagctctctttccatagccgagctccctcgtcgtcgcctctccgtgctggccgaccagcccgccatggtggcacacgcccctgctccttgttcctggctcgctgctctggttttcatctcttcgcgtcggtattgttgttttcaagcgctcgcccaggtcgccgtcgtcaactccctgtgcacgcagccatgtccctctgttcgtcgtggccgcttccctgctaattggactttattacgcttcattaagtttggctgattactgtttaacggggaaaagttgcacctgtacgattatttatttgtacctgtaatatttatgn

SEQ ID NO: 412 - DNA, 575 bp, Zea mays
  Probeset Number=SeqID_14815
gaaaaaactcatcaacttcacaccccacgaggtgtgtatatatctctctccctccaaaaccgagatctgaacatcaccattaaatttgtacatgcatcacaattcacacgtcatcttccagctagtacctcaaagcagcagcataacataaacacctcctccgacaagcgtgcagacgagccaagaagagtaggcagttgccctggtcgccgcgccacggcggtggtggcttctggcgttgaggttacggggatcgacgacccctgcgccgccctgctccggcgtgccgccgctcgggtgcccgccgctgtggctgctgctgtacccgtgcccgtgcccgtgccctgtcctcaccgtgaccctctcgccgtcgtcgtcacctgctgctatgtccttggcatctgcaggctgagctccatgggcggccgacgccaggagcaggaagagaagcagagcgacgacgccaaggcatggtttcttcgtcctctccatggatggacgctgctctgaagaaaacggagcagcaaatcccggaccacgagctgctgccactgacgctctccaccgttgccttt

SEQ ID NO: 413 - DNA, 641 bp, Zea mays
  misc_feature (1)..(1): n is a, c, g, or t
  Peptide Sequence Number=SeqID_10217
  Probeset Number=SeqID_14816
ngatgttgatgtcgatatgatacatttggaaggagctacatcataatttgtatgtcatctttaacatttatgacaatgttgtttcgccgtacatttttttatatgctactattagaatttatggtcgtttcggcccgggtcttagctaatttctgggtccgccactggacacattattacacgcgcacgcacgcatgcatccatggccatgcacaagcacagcgttgctcctcctccgccaccgaygccgccgccgcctccgaacccgccgaacgggcccgcgccggcgacggccccgccgaacgggccgaacccagcgacgccgccgcccagcgggccgtggacgccgccgccggtccgcccgccgaacacgtcggcggtcttggcctgctcgtcgtcctcgtccacggcgccggcactgccgtcgcccgccgcgaaggcggcagtagtgtcgcagtcgcggggcgttgctcttgccgccgccgatgcgacggcgaggcagagcagcagggaggcgacgagccaccacttggctgccattggcctctctcgcttattaccagctaggaccagctcttgttcttcgaggtaggcctatctggcctggtgctgctgctgctggaggtggcgggggttcgatt

SEQ ID NO: 414 - DNA, 635 bp, Zea mays
  misc_feature (1)..(1): n is a, c, g, or t
  Probeset Number=SeqID_14817
ntatccgaatgtatcttattattatatgttgactccgtagcaaagcacgggcatacacctagtaaagaatgagaatgatagacatgggaatgagaacggtggcagaacgggaatggcagaacatgaatgatggcagaacacgagaatgaccgactactcttgcagccttaatagcagtagagatttcactttttctttgttttttcttcctcccagcagtgccgcaattgcagggcccaaacccaagagtccagcaacagtgccacgatccaaagacaggctccgccactgcaggtggccccccagagcgaggccggacatccctttcctttccttcacctcactcgctctctcgcctctctctccgtgcggtgactgactgggcaaccgccaccgccctccccctccgtcgggtcttcgccggcgccaccagcgacgactgggcggtctgtgtccctcttcgccggagacgatcacccaccaggtatgcccgctcccttctctcccttcccttccttcctttccgaagcggagcaccccaaaccctaagctatctgaacccggatctgaccatgattcctactagcttcgagttttttgcaagaaacaacgggtgcacgtatcctggattcact

SEQ ID NO: 415 - DNA, 582 bp, Zea mays
  Peptide Sequence Number=SeqID_10218
  Probeset Number=SeqID_14818
agtctagtaaaataataaaccgctgaagcttggttgtgcagtaggtttcgttgcattgagcggcggtacgtggaggagcatgtggaggttaaagatcggagaggggggagggccgtggatgcagacggtgagcggcttccatggccggcaggtttgggagtacgacccggacgccggcaccgacgaggagcgcagcaaggtggagcagcttcgccgggagttcacagagaaccgcttccgaaggagggaatcgcaggacctcctcatgcgtatgcagttaactggacaaaaacatctgcatgcggacgaaatgggagcggccaccaagatagaggatggcgacgaggtgacggaggagaggttgccggagtcgctgaggcgagcgctggggtggattgtctgctctccaagctgaagatggccactggcctggtgatttcagtgggattacgtacattatgccgttctggattttcgccctgcacatcacaggatccatccgatgttgtcctatcgaaagagcatagacgtgagatctgccgccataatctacaaccatcagaacgaggttttgtagcgtgt

SEQ ID NO: 416 - DNA, 531 bp, Zea mays
  Peptide Sequence Number=SeqID_10219
  Probeset Number=SeqID_14819
acacccatactcgcatgtgccgtcccaaattcctcaccgattgtcgcctttgcggaagaattccgccgccgcaggagcaactcgctggtgactataaattggcgtggggcgaggtattgtggcgctccggagtggtccactgattgagactctgtcgctaatagcccaggaagtactctagctgggtgtgaattgctcaccggaggcatattccggcgaggattcgcgcttcaccgagtcggaacaatcctaccctgcgatttccgacgagccggctactgaggatcctagggttcagtagtggagactactgagcaggagctcattgaaggtgaagagcaggtggttgaagaggagtcgccctacaatgaagcatatgagttgatctaggtggcgtctcccagtcgactttatggcgccaaggacggacattagttcgctttatatttatattttattttcataagactttcgctatgtaataattacctttatgatattgtgacatttatctctatacactctgttatt

SEQ ID NO: 417 - DNA, 531 bp, Zea mays
  Probeset Number=SeqID_14820
aataacagagtgtatagagataaatgtcacaatatcataaaggtaattattacatagcgaaagtcttatgaaaataaaatataaatataaagcgaactaatgtccgtccttggcgccataaagtcgactgggagacgccacctagatcaactcatatgcttcattgtagggcgactcctcttcaaccacctgctcttcaccttcaatgagctcctgctcagtagtctccactactgaaccctaggatcctcagtagccggctcgtcggaaatcgcagggtaggattgttccgactcggtgaagcgcgaatcctcgccggaatatgcctccggtgagcaattcacacccagctagagtacttcctgggctattagcgacagagtctcaatcagtggaccactccggagcgccacaatacctcgccccacgccaatttatagtcaccagcgagttgctcctgcggcggcggaattcttccgcaaaggcgacaatcggtgaggaatttgggacggcacatgcgagtatgggtgt

SEQ ID NO: 418 - DNA, 982 bp, Zea mays
  misc_feature (982)..(982): n is a, c, g, or t
  Peptide Sequence Number=SeqID_10220
  Probeset Number=SeqID_14821
acacggatcgaaaacgaattaccctcggtgccctccctctcggcggcggcgcaagtccccttcatctccggcgcggtgagctccccttcttcgtaccccagattcttacttcctttcccggcgcctgaccctacaccgctacgcgcctgctcgcgttttgggaaaaaaacttaccctttcggttgccttggccattcggatctggctccccctcggcgccggcgcgctgggttggcacggcgaatctatgtgtcggtgtcgatggtgtgcaaggcgagcgtgttaggtcgccgtgcatatagcttggtttggcggaggatacggcggccgtctctgcttttggttcctgggttggatcaagggacgcaagggtcgtctgccaatctgccatggagttgggaatggtaatactgatccaatccgcggcaaacagttctggtgtgttattgttatgcaccggtatatgttggcctgcgatgcaacaaggatgctggtggcgaaaaagaaatggtggctgttgcagggaaaataccgactagtcaaatgtatatgcaaagagatttcttttggcgtgtaacaatgtcctgtactcagtttttgtggtctgattagggatccaaagtcagcagggatgggctagaatgcaaatagggtattttgaatcaactgcactgagattgcagttgatcctgatgttaataaactggattgggggttctggctgcacttgactgttgcctctagagtttagatggcgcataggcagtttctggtctaccatgttttcatgttgatgagggtttgcattgttcatattcatcatttggatgcaattctgctccttaatctgggaccagggtgcttctaacctaacacaagtttgtctgatgagtgtagtcttcttgcttactaggtgtttgtttcatgatgtacataagcacatcacatatcctgaatgtagcaataggaaaaatgtacattn

SEQ ID NO: 419 - DNA, 702 bp, Zea mays
  Probeset Number=SeqID_14822
cgcagccatcaaaaacacatttattccgatgattccataaagtcgaagctagaaaacggttttcttggagactcctatgagatgcacattattttttttcaagtcagttctccttcggattatctctttatgttgacggagctgttttctagttgtcatgctatgaagactggatttctttgskccttagttgaacaacctactaaatcattgaacattgagggaattacgatggttcgggactatgctaatatcttttgagatgagctttctggaatgtcacgcatcctccgacgagcaagacttacctgtggtttgacccatcctccgatcgcaaatctaaatgtatgtaccatctgacatggagagtcggtggaaatggttgacacaaacttgtattaccagttgtacatcattaatgttctagtttagtgatagacgtttgacacaaatttgtggttgtgttactagggaaccaaaacaaaacattaaaataaacgtaaaatagtaactataagtcttctaaaaataatttaaacaatgtgaaaactcggtgcgattggtcatcatctaatacacgtgtttgccaaagcaaacccatggtagctttatttcaagtctctgacagcaatgaagaggtggtcctcaccccaatcttgtttgccaaaaacttgttccacgtccatttcattttcccaacat

SEQ ID NO: 420 - DNA, 749 bp, Zea mays
  misc_feature (1)..(1): n is a, c, g, or t
  Peptide Sequence Number=SeqID_10221
  Probeset Number=SeqID_14823
ngaaaacaaactattatttatttgaaaagtgaataggattttactcaaaacattaaatatctgtatatactakctattaagygggcagtgtagaactgccccgctccctacccacacgcgccagcgaaatcccgccccgcaacggcctcccgcaccgcatggccgcgcgccgcagagcgtacaccgcccccgcccgccctccgcctgcccgccctccaggatcctcgccaccgcaaacagctcagcctaccacggtcgccccctgccagtccttccgcgaatcgggtgtccccaacaatcccgcgcacccgccgcactcgggcagacggagcgcgaccgcggcgccgcacgctccgacttcgtgcggttccgcctggtgtgcaagctgtggatggacggcagcggcatcaggaagccccgtgagctgggcgcactcgtcatcgaccacagcttccaccctcgccggtggatcctactgacggaggagaaggaggaggctgatgaggcgacgcccacgcccacgcccacgcgccgcacgctgctcaacctcaccacccggaagaccatccaggtggatctgccggagctcgccgggcactccgtggtccccggacccgccgcggcgccggagggcatgctggtggtgcgcgatctgagaggccgttggggctgaagtgggaatgtgacaggcatgcctgcatgtgccccgcatgatgtctactgcctcacaggtttcattgcttttcggt

SEQ ID NO: 421 - DNA, 1178 bp, Zea mays
  misc_feature (1178)..(1178): n is a, c, g, or t
  Probeset Number=SeqID_14824
aacctggttcaaacacctcgcttcactagaggaataatctagcagcttctgttgcctccaaattgtccggagaaaggagttgaagcagtgtgagagggccctgagacgatggcgaacctgttcctcaagcaggcaaagcagtacgtggcgacgcggccggtctacccgccggagctcttcgacttcatcgcctccaagacccctcgccgcgacatggcctgggatgtcggcaccggcaacggccaggccgcagcgtcgctggcgaagctgtacaagcacgtggtgggcacggacacgagcgcgcagcagctcgcctacgcgacgcgcctcagcaacacccgctacgtgcacaccccagcggacctgcccctggaggggatccacgccaccgtggccccgccggcctccgtcgacctcgtcaccgtcgcgcaggccttccactggctcgacctcccgcgcttctacgcgcaggcccgctccgtgctgcgccccggccacggcgtgctcgccgccctggtgctacaccgagccacgcgtcgacgccgccgtcgacgccgtgttctggcgcctgtaccacgggtcccagggatactgggcgcccaaccgccggatggtcgacgacgagtaccggagcgccgacttcccgttcgacccggtcgaaggggagaaccacacgggcccgttccagttctccacgcaccgccggatggacctcgatgactacctcatgtatatcacgtcctggtccgcctaccagactgcccaggataacggcgtcgagctgctcgatgcgcccaccgtccaggagttcgcggcggcgtggggcggcgatgccaaggaggtgaagaccgtcacgtaccccatcttcctcaggattggcaaggtcaggtcggagtgagctgcacggaaaaatgaaacttgacaaactatggatacactacggacgcgccgacgattgatgatcgatcatctaggaatcgatgcttataacctttttgaataatgttttattcgattgcagatgtttgttcttcacaattgtatttcaaattctaatgcatgcactattctgttcgactttttttttctctgtgtcttcctgatagtgtaaatttcaatatctatactgtgatgacaaaatatccacaataacccatgtgactgaaatctttggtttn

SEQ ID NO: 422 - DNA, 1225 bp, Zea mays
  misc_feature (1225)..(1225): n is a, c, g, or t
  Peptide Sequence Number=SeqID_10222
  Probeset Number=SeqID_14825
atctggaatctcgctggccgctggtgtggtatcccggtgggtgaggctgcggcgcgtcgaagaggagaatgcgtagggatggtgctgggtggcgacatggcagcagcatggggatgccgtcgtcgtcatgctattgggcgccgccgagggcgatgaaaccgccgtcactgccagtgccaactaccctgagcagaccggcctgagctgcgacctctaccgccccatcctcatgttcgtcctctgcatcacccgcggtggtttatctttatagagggctgcaccatgctggtatgtttttttctttctatataggagaagttatcactgaacatctcaccatttggtattttctattatgctttgatgccttccatattagtcatcgtggaaacagaaaaaataaatatatgatgtcttctagctcagccatttcttatagaccacatgaatatagttatatgagaacagtgcatcacctgaactatgggtgcaaacctcgccgacgatctctaattccgtcaactgtgattatatgcattccttccacggaataaagtggagccaagcatgcattgattgctagccttttcgaatgctgctatggcactatttttcaaaccagactgtacaaagagatgcaaactaaaaaacaacaagaatagacaatcttaaaattaactaacatgtaactatccttagatcatttgtaattggagcgttagaaacagggatagtctggttcaagaaaaagtgacaccagtggatttttttgagctttttgccagcctcttttcgttcaagtttatcagtatgaggagcattaaattgtgattcatgagctacaactaacctctaatgatgaatgcatgcaatatattctggataatgcataatgttactactatattattccatagattcaaatataatgacaatatagatggtagacgtccagttgtgggatttcaatgattttataaatgtacattcgaacctaagtcacaaacaacacaaactttagaacattgaatcttaatatccaatttcctaattcatatgaaattaatagttggtctcctgttttggcataaatttggttcgaacttatcagctggcattactttactgtgtgtgtgatcgagaaaaacgtctcttaattaggacagttaagaaaaatgtatctttcctgtgactgttaggggacgaaggtagttagggtacaccn

SEQ ID NO: 423 - DNA, 1638 bp, Zea mays
  misc_feature (1638)..(1638): n is a, c, g, or t
  Peptide Sequence Number=SeqID_10223
  Probeset Number=SeqID_14826
tgatcctccaagcatccaaaatatacttagttacttaccttactttttggcagatacacttcattttaccatgccaaaacatactgaattgtgatactttaccaataataaacattactctcattcaacaaacaattccattacccacctgaatcgaaaattttataaattagttgcctatcattaacacatatccaaatggttaaatgatgtctcttacatgacctgctatcagtggtgaaaggcattgcaatgcatgtggctttgtaggatcactctggcttgtgctataactcttaatcctcttcgtcaagaacccatccttactcccaaggacctccatccctgcaggctccccaggttcacaccagttaatctctggctcattctcagcctcaccattccaagagtccagaattatttagcattcactaacaatgttatatttaaagcccacacaagattatcaaccaattcaacaagtgaacaccctactgcaccaattcaataattaagttacaacactagaaaattgttaattggacaccatttttatccaaacttccaaaggcagtactggtcttgatggtgtttagttcaagttgtgtgtaaggtactaaaaatgctataagtgcaaagaagagttggaaaattgttgtatgttaactaaaataatactatgtttgtttattagctgcaagatttatgtattagcttcaagtactactatccatgatccttattaacttgaagtttgcaatccattagttaagttttggatgttgagaaatttattaatccaatagttcatgtttctgcaacatataagtccatggcagtgaagagatattgagctaccacaactatgtcttgatgaccacatatccattggagcatgttgaactgactgccaggaccaagagagataaatgcactacaagttgtgcatgtgtggattcagtcagcatcgacgccatactcgagcaacacctggacgatgttggtgtggccttggccgacgacgaggtcgagcagcgtgcggtcagactcgtctatggcgtctgcagcacgtcactcgggctctctgtggttgagcacctccttgagctcctcgaccgcattgtcctcgacaacaagtcacgtggccacagatgttcctacaaagctcgccctgattccattgtccacaaacaactgcttcatcctcgttgagaaccactccaggttgactgagcccagcgttgtcatgggttccttcgccacgacgccgactgcgaccacgctgtgtagcagggacacctcctcacctcgatttcctcctcctcgtgacatcatcaccaactactctcccaccatcctttgcatccaacaaggacaagcactacaacaagaggccatggattttggaggatgagacggggaacatcaacatcagggacaaactctgcttcatactattcgctgacgctaaaaagcaatgacatgattgatgttcaagttggttcctggtacagtggtactgtactctctgattccctctgttgttattagtctttaaatgaactatgatcatatatccatcatttgaacatacatacttgtaagattcaaatacattaaattgtctagatttcatcn

SEQ ID NO: 424 - DNA, 1531 bp, Zea mays
  Peptide Sequence Number=SeqID_10224
  Probeset Number=SeqID_14827
aactgcccaaagagccatcagccgccgccagggcctattccatccgccgccaggaaacgcgctaggtccggccgccgtgctcaggaggtcgagtgcccctgttcgcaccgccagggcgcgggtctagtgtctgcgcgccgccaggagcgcgggtccagccgcgctgagccacctccgcctaggcagtttgcccgcggccggccgaggcgcgcctatgccgggtccgtgcgtttccgcgctcctgcgtcgagatggggccgagcccatgctcgctcgtcgtggccagagccaccagggcccgcgcgtctggccggagccgctagggctccgcgctcctagccgggattaggtcgtgccctcgtcaagcgcgcaacccgtgccatgcccgagtcgtcggacaccgcctgcttgtggccggcgtggccgagtcgtctggcctcccttgccgaggagccgccagtggacaagacggtaggcggcgtggccgcgccaagcgccgaggctggccccgcccgagtgtcgcccccaccgggacgcgcccgcatcgctcccccacccctcccccaaatcggtcgtcgtggcgccaaccgccaccagctggatcgagggccattaggccctcccattggaggaggaagatggggccaccccgtttgggtggtggccagtgaagatgacgcgtcctcgtggagcgtcgatggcgtgagggggctgcccacgacgggcagcgatggtcccaacaaccaccgacactagtggagatggggaacgacgtccaacagcccctgcagtgggtggaggaggcggtggtgctgccagatcgacgtccatgggggtagatgcagatgaccccgcgtcacccgccggctccggtattgacggggatgcagtggggaggccgcactccaccaccggcagcggaaccaccgctgtccacccgtggagcacacagaagtgcacattttgcacttccacacggcgttcagggatggcatgcactaatgggagtgttgtgtcttgcccggcagcgaacgcctccaacatcgcatcatcaacaatgtgcagaacttcgtgtatacgacggaagcgcaaggaaatggtttgctccatacctttctgttgatttgtagatcgttgttgttgttcttgtcaagaacagcaagtgttcttctcctttcttcctctaatcttccttgagacaatgctgataacgtgttaagttttgtagtgctcagtggcaaatcagtggagagggagagacaaatgacaggactcagttctttattgcaaagagtcttgtatatatacaggggatataaatactcccaaggggtgtgtcccatgggagtaactgccagttgatcacatgacacaatagtttgtaacacctttattctatatcgctttgtgtcacccattgcttccatgtggcagcaccaagcagcagcaagtgcaaaaaggtgaggatgtagttgtttggggaaatggaagggaattgaaaagaaatgatataatatatggtagtttatgt

SEQ ID NO: 425 - DNA, 785 bp, Zea mays
  Probeset Number=SeqID_14828
ccaagcacgctgccccaggcggacggaacacacgacgcagcagcggtcgtctcgttctcgtctctgcagatgacgggctgttgtcgtcgcggcagcaggagcagggtggtgtgtcgtcccgcactggcgctgctagtggcgctgcttctcctgctgggtccgtgttcggccgagctgaacgccggcgcgggccggcggctgctggtgtcgcggccgtcgacgagccggcaaaacaaggccgagcagcagcagcagcagcagcagatgcgggtcggcgggaggaacacgcccttcaagcaggccgccgccagcttcggccggaggatacccagatccggctggaaccccatccagaacagatgagagggaccgcgtcctagatgaagcccgtccgtacgtcggcggcagggtcccggcatctgatgggctgcgtcttggaagcgtgctcgagctctgtccaggactagctcagaaaccacacgcgcccacacggcgcgacccatcgagttttttttttctttttttgtgtgggatccttggcgccgctcatgcttgtgtgtacaagctcgtactagcttttacaattttgtagtcttactcatctcctttttttttggtttagttaggtattagtgcaggttaattagccagtcaggatgggtaatggctagcagcttatgtcagggtagccagctctccctgtttattccacttttcttgtttacaagttcttttattggtttgctaatattcagctgtggtataaataaactctcggtacatgc

SEQ ID NO: 426 - DNA, 697 bp, Zea mays
  misc_feature (697)..(697): n is a, c, g, or t
  Peptide Sequence Number=SeqID_10338
  Probeset Number=SeqID_14829
ctagtcatcctcctcgccagtcgccaggtgtcggccgccggttgtgctccccgtcaggcgtcagcgtgatcccatcggtcgtcgcagaaacacagtcgctgctcgccgtcaccactcgccaggcgccggttcttctccaatccacgactcagcggctctccagtcctccgtccgttaccgtgtaggtcatgccctccaataatttctacccgatgtcgctccacattattctgatatggagcatgattagcagctttgtgattaagcattgccatgcttcgattgtgctactacatcattccatgatcctattccatgcctcttcatcactgcttaaaggaaactcttatgacaaagataaaagagctgaacctcctcttcaatctcctccaaaaaaaatcaaacaagaaccactacgcatcatagactctacaagccaaaaaggccaccaagaataatgcatgcgaccacaagaaaaccacattttcagcacttatctgcagtgtcccttcttttgctatcaatcttaaacatatgtacataacccctcaaccaagctagtcaactatacaggcaactgaagcactacaactttgtttattttggataaggccccgcttaaatatggcataaaacaatggatgtcatcattttgtaacttgatataatatatgcatacacagttgcccttcagatn

SEQ ID NO: 427 - DNA, 1826 bp, Zea mays
  misc_feature (1825)..(1826): n is a, c, g, or t
  Probeset Number=SeqID_14830
aaaaaaccacccccacacctcgctcgcggcgcggcgacggcaatccaccgcggtgcgctgccttcgccggtgatctgacctctccgagcccgggcaatctcctccctccgaatcggcccggtccgcccggagaggatggcgtaccggcggggaagcagcagttgcgcgctctgcgagggatccaacctgccttcctgttgtgccttgtgcgtcaacgcgaggttgctcgagtaccacacgaagcttcgcatgatgaggagcctccgcgactccctccacgcccgaatcgccgcacgcctcgaagccaagagcaaaacagatgagcagaggatctggagatcgagcaaagcacacgatattatggagttgagggatcggctcactgaattgaagagcaaaactgccgtagataagaccaaggtcgagcaggcatcgagtggtctcaaggcaaaaactgcgtcattgaatttggctcttgtcacgctgaaaaagaggcaagctgatgcagtggccatgcacaccagtgccatggaaattgcgcagatgaatctcatggcaatcacctcagattgtatgaaaatgcaatcaaaatctgtaaagcaactttgcagattgtttccaatgcgacgagttcttaaagagggagaaaagaaagacaactacagtggtccgtatgattcgatatgtggggctcgtcttcctcgtggtctcgatccacattctattccagcagaagaactgtcagcatctttggggtacatgctacacttcgtcaatattgcagtccgtatcctatctgcgcccgttcttcatgtatcaggctttaagggttcatgctcaaatatatggcagcggagttcctactggagtacacgacagtcccagagcaaggtttaccctctttttatacctaggaaaaatgcttgcacaggcggtgaagaaacctcattgtcagaaagtggttcgagtaacttcggagttgactttgtggattctgtcaagaaacagtcttttggttccacgagaagtaatagctttaacctctctggtgcatcttcccactccatggagaggcatcaatatttgcagagaggaatatcactattgaagacaagtgttacagcaattactacttactattataactcactgggcttggatgtgccatccaatctttctacttttgaggcgttttctaagttgctccatacgttatcgtcatcaaaggcctttcgaactgcttttgaattgaacattgcttcaagttcagaaaagcaagcacagcagttaaacagatcgatttggaagtcaagttcagccgtatcatcggacagcagttttatggacagcatgcacacaaccatcatgcactctagacaacctcctcctgaactcaaaccagagcttcttgtacaccgctaagctggtgaagcatggtggcgtgcctgatagcatattcgacggctgggacctggtagagcgtgaggtcctaccgccaccgccctcgcgggtcgaagatgtcgcgcagtgggaaagagccatgtatgctggcacaaaaaagaaatgacttctattgacaagtcctccctcaagtacaaactgttagaacatcagtttagatatgcccttgatcatcagtttctggttcatgtacagtagcagtacaggactagcctaaccctgtggctgtgacctgtcagtcatctacactgcaagaatgcagagaggagaattgtagtatagggtttatttgctgccatatgtacatgtacatgggtgcagccctataaatttgtaaatataaatccggtagtgtttagaaagnn

SEQ ID NO: 428 - DNA, 1314 bp, Zea mays
  misc_feature (1)..(1): n is a, c, g, or t
  Peptide Sequence Number=SeqID_10339
  Probeset Number=SeqID_14831
ntaaagggtcgagcccccctcctctataaatagagaggtctacggccgatttgtaataatcaacaatcgaatcaatacaacttttattcgcattttatcctaggagtagttctagtctagtttaggtttagcctcccaatctccaaattctccgtctctcttcggctctacgtcgattagaggagtctaggtcggccggcccgagcctagacaccacctaggatctctcctccccgacggggtccctcccgggagcgagatccaggcgccgccggcgactttcaccgcctctgcgtacgcgcggaccgtccggcccccagggcgcggaccgtccggccgtcaggcagagaagccctaaccacgcaccaggccgcggaccgtccggccctaggccgcagacagtccgcccttgcgcagagagtaccaccgcgcctcgtaccaggccgcggaccgtccggccccgcgcgcggaccgtccgcccctgtgcagagggcaccgccacggttcttttcttgagtgtttgacgctccgaaaaggcgtcaacaatgcccaagtggaggtactcgagcgccgacgcgatctgggcggccatcgcgaggctggtccgccaggggagcggcggcgatgcggcgcttccggaaggtggtgcgagagcgtgccgttggggacgaagtcgtagacgaggagcagcgcgcgcgggtcggcgcagaagccgtggaggcggacgaggtgcgggtggcggagcgcggagaggatgagcacctcgttgcagaaggacttggtgatggcggcggaggcggagggaagcgacgacgacggcggcggcgggaagtggaggcgcttgacamcggcggggcgsccggcgggcgggaggtgcgcgaggaacaccgtcccgaagccgccgtccccgagcttgcgcgccgggtcgaagcccgcggtggcggcgcacagctgctcgtaggtgaaggccgggcggtggtggtggagcctgtggcggcggaggaaggccgcggcgcgggacgccgccggctcccgcgccagcgccagcgacgcgccgcgggagcggaaccggcgcaccgcgatggcagcgcagaggtatagcaggagcagcgccaggagcgctgccgttctgctgctgatgccgccgccccagcggcggcgggggcgggtagatatgccggcacgcggctggcggcgggaggcaggcggctacgaggaggatgagcaagcggaggcggaggtgatgcggcggtcgcatttcggcgcggcgagcgatcaggcgggtgagaatgagatgcgcgagaagagagagat

SEQ ID NO: 429 - DNA, 670 bp, Zea mays
  Peptide Sequence Number=SeqID_10340
  Probeset Number=SeqID_14832
agtccacacaaccgccgatccacgctgcgtgcctgcgtacagcctacttgagaaaccccatggcctacaacctcgccctcgcggccgccatcgccaccgccgcagctgcccgcgccccccgtcgcgccgtggtcgcctccgcctccgccggagaagccgcgcaccgcataatccgccgccgtgcgccgtcggggcagcagggctctgcgaccgtggcccccacgccacccgctcagcccatccgtcgcggaggtgtgccgtgccatcggcgtctccgacgacgccgcgtctgccgccgcatccatggaggcgaaaaactctgcattcatggacctcgtcgctagcacgccccatcgggcagccggagagcgagcccgagcgccggcctccgcgaggccgccgagtgggtagtcgacaccactgagacgcgcgcttgcgaaggacagaaatctttcttagtgctatgcatgatgacgtttcctgcgtggttcttgcttctatttattgcccttggagttataaggttaccatttgatattccggttttggatggtctcctaatgtgaggtgtttattgttattatttttttcttcttgattatacgagcttcagacactgaataaaaagaaatagtatatcactactgaagttattcactccctttgttcc

SEQ ID NO: 430 - DNA, 722 bp, Zea mays
  Peptide Sequence Number=SeqID_10341
  Probeset Number=SeqID_14833
agggttgccaaactagccaggatatataaaaacccaaagacacaaacagatcgcataatggatatccggaactccaaattccaaaagcacttaaaacggagagttgtccaggacaacgcagcactgctgctccacgagcattagactacacgctacggcctccctcccctattactatttatgtagtaggggcaacagtcgtcccctatgtcccgcaacggagatcgctacagagcacttttggtggcgatcctcttctctctcacgccacatcaagaggactgctgttcaccccctcgcagttgcttctagaggacgcaaccacgcgcgcgctctagaagaaacgaccggttccagtttcctcgactgcgttgtgtcgcgccgccgctatccaatccaacaccgacgggcagaggagcagccgccgacagccgtccgccgaggcaatcgccgccaacggaagtcaggaccgcgtccgccgagtggctttggcaacgacccagcgcaggacgagacgaggcaatcttcagctgcggcccggtatcgccgccgtcgggttgctgccgccgccgggacgacccgccaccggtgcagaggcagctgaagagcatggtggtggtcgccccgatcgcccgctccagctacgcgcgccgcggcgcgtccagcgacgggtccgacgccagcggcgccccggcgaggaggatggagtgccactgctacct

SEQ ID NO: 431 - DNA, 954 bp, Zea mays
  misc_feature (1)..(3): n is a, c, g, or t
  misc_feature (430)..(430): n is a, c, g, or t
  misc_feature (665)..(665): n is a, c, g, or t
  misc_feature (954)..(954): n is a, c, g, or t
  Probeset Number=SeqID_14834
nnnaacacagctctgacctctgaccgtaattaccaaccactgccagcgacctctcctcggaggcgtgaccgtaattgctccgcaactaccccgataccattcccaaatcctccgtcgacccctctacaccggcgatcggcggcgaacgatggggtgggcgacgcggttcctggcggcggtgtgcttctttgctgcgggcgtcctcttcgtcccagaggctatcggttccccatccggcgcaggagccgkcaccgccgccaagctggcccacgtcctctcctttgccacctcctggggcgccgccctctgggccaccttcatcggcggcatcatkratgttcaagaacctgccgaggcacatgttcggcaacttgcagagcaagatgttcccggcctacttcacgcttatatctgcatgcgcagccatctnccgtsgccgccttcgcgtaccttcacccgtggaagacggcgtccactgtgcagcgctaccagcttggattcctcctctcagcgctcggstgsaacctctccaaccttytagtcttcacttccatgaccatcgagatgatgaagaaraggcmcaagatcgagcgggmcctkagtatyggcsaggaagtyggatggtyaaagaaccagcaggtggstaaatccaaccccaccctcgntgcaatgaacaagaagtttgggatgatccacgggctgtcatcmctggccaacatcatgtcgtttggcagcttggccatgcactcctggkacctggccagcaagctagagctgtkaagaaggggagacaagacgacmcctttytccgccttgttgtgaatyttgtcagktgtcmcgawggtgttgcytgstgctctcaaaccagtttcaaaattggaataactagaaaatggccagacacawacagacagggttttgtaaaatcacactatytccgatytcgaatatttn

SEQ ID NO: 432 - DNA, 1062 bp, Zea mays
  Peptide Sequence Number=SeqID_10342
  Probeset Number=SeqID_14835
aataaatgagacgtctctacagccgtctctatggggttttctgtaaaatttgtatccaccgggctctctgtggatagcccgtctctggtgcgttgctcgatggggaagagacggggacggctcaggctgtacatgttcgagtgtctcttccagatccgatgcggattgccagcttcattccctccaaatttctatcttcgcgcgggttttttcatttcgcgttgcgctttccttttgggcccattctgaactgaagcagtgccaggagagatcggccatgcagcagaagacgggcgccgctgcaggcatcggcttgcgacggtcgacctccactgccccgacaagccgccgctggatcccaccttcccccgctgtggcccctttgcccgcagccgccccgtccgcggttgccccatctggcccgtatgcaaccaccagcgccgcccaggcaggctccccgtcagcgtcaccagacgacgcgctgctctcccgcggcgcgcggatgggtttccgcgtcggcaccccgcccgacccgtcgtcttgtccaggcggtgcacggctctacaacgcaccaacagcggcaatgttcccctccaccaccggcccgtcgttctttgatttgcttcaaagcttcgagggcatcatgagctgtgaagatgcttatgaagaagatgagatggagatggagttaggaccgtggcacgactaatctagaaacaaaaagatgggagagtggctacaatatttgagttgtgcgtcttttgcaatggtgttcctctctgttcactagtttctctgatcaccaaggatatcatggcttctctagtcaccaaggagcttcggcaccggaacacctttgatgcaggacaatgaaggggcgacgaagctagcttcgtcatagcaacacatggagacaatgcaaggagaaagagtcatcctgaatgctgaaagcaaaagataatgttgcccttgtattatttgtaaattctgtgtaatccttgtgggtgtacatgtaatttcgtacgaagctgtacgattccctataaatagatgaatagtgtc

SEQ ID NO: 433 - DNA, 1069 bp, Zea mays
  misc_feature (1069)..(1069): n is a, c, g, or t
  Probeset Number=SeqID_14836
attagaaaaaaactataccaaacatgctggcatagtacgtggagatccacgcaacgtcgtcctgcacatcgcagccgtccagatgccccgccgccgtcggtccatagcatcgattcactccgcgcgcgccgctgtctcctcgtcgtcgccgcgttcctcgattatctctccatggcggccgcctcatcccccgctgcatccgccgcctcccccggtaggggtgccggcgaccctcccgcggcagcagcggcggcgacggctgggtgcccctgccccatatgcctcgaagccttcaaagacgaggcctacctcgacacttgcttccactgagaatctatccgtcatacatgcttttgatggcgaatcatttgagcggtggtacataaatcaggaacctaggaagaggcgtctttcagatgcacacgagttggtgtcacaattctataacatgaaagagaccacaagcaacatttctagggtgcagcaatactgggagcaacaaagatatctccgtaagaaaatttggcttcaaacctggctaagacgggaaattcaggcccttactcgggacgagaacgttgaggtcatagtccaccacattcacggtgtcatcggatccttcatgaagaggctcgaaaaggagcacacgtcgtcaaggtggacgacttcaccggagaaaaggagggaagagttcaggagattggtttccgatgctgctaggccgttcctcctcggccgaacggagcgattcgtcgccgaggtggagctcttcctggcctcggatctcaacatggaagcctacaacaaactgcgcgtccagaggtttagggagtgcagctctcatctaacgagagagcaagatgcactgccacgtgatcggtcgcttgaggagcactacatgtatttcctgtgttataacgacacggactgtgatgagatgtagtgatctgcgatttctttttcttttttggcaacatgcgtccttgttaatccttggcactatgctgccttttttagtctggccccgattactagagagttcactatacaacctaatgctgatacatgn

SEQ ID NO: 434 - DNA, 1477 bp, Zea mays
  misc_feature (1477)..(1477): n is a, c, g, or t
  Peptide Sequence Number=SeqID_10343
  Probeset Number=SeqID_14837
accatatcgccgcgcagcagcctctctagaagagcagcgtcagcacgagccggtatagccaccagcttgatcgacacacacacacacatgttgactatcacgagggggcgtctgacggtagtaccagtcacacacacacacagctgtggtcaaagtacggcgctcggaagtcggaatagtacacacacatccacgtctagaaacagaccgaaacagagatctcggtccaaccaatgaaccatcagcaccacgtatagtaagtagtaggcgagtcgtcgtacgtgcagggcgcgcagaggcggtctgaaacggaccccaaccgagctggaacccagttcccccgacgccgccatccgctgcctgtgcgctgtcctgtacgttcgcgcaggcgcagctatatatatacacgagcccccggcggcccccatgccttacacaactgcctgcctgcctgccgcacgtcgctctcgcgtggtcttgggggttaaccagctagatcgagctatgcagccgccgacgacggccaagagggacagggcggcgtgggaggcggacgcgggcgccgcggacacggcccgcctgctcatgctcctcgcgcaggcgcaggcgcagcagcagcagcgcctcctgcagcacgcctaccaccacggggtggcgccgttgttccccgcggggcgcgtgttcgagtgcaagacgtgcagccggcagttccccacgttccaggcgctcgggggccaccgcgccagccacaagcgcccgagggcgctccagcagcagcagccagtcgtcgtcgccgacgaccacgacgcggggctgtgcctggggcgccagccgcccaagccgaggcgggtgcacgagtgccccgtgtgcggcctcgagttcgccatcggccaggcgctcggcggccacatgcgccggcaccgtgccgacgccgaggtgcggccgccgcccgacaaggcccgcgacgtcgccggcgggatctgcctcgacctcaacctcacgccgtccgagaactgcgccaagtgccggagcgtcgtcgtgctaggcgccgccgccggccagggtgtgcataaggcgctcgccatgttagattgctcgctgtagtcgtcgatcgagcctcttcgttccgttaggctgcactgcacatatatacatcttctttcatggacgttgtttgttactactagtatagtartatactatgccgtttctttgtttctgctcatmttcgtgtataccgatccattgttacctttttttttggttagggtaacccagttccttccggggaagatgacacgtcagattctccggttctctgtaagctgtgtaattctaggtttctaccgtacgtatggagttttaggtattattttcttaggctaggatagttttgaaagaaacaataatagagaggaactcgtgtgccgtttccgaggtgtaaatagtaataaatcattagatgcatttcaagttn

SEQ ID NO: 435 - DNA, 1436 bp, Zea mays
  misc_feature (1)..(1): n is a, c, g, or t
  misc_feature (1434)..(1436): n is a, c, g, or t
  Peptide Sequence Number=SeqID_10344
  Probeset Number=SeqID_14838
naaagaagaagaatactgataatttaacatttcagatctttgagaaattgagtatttctcacagatatattatacatgtacataaattctgaaaagtttgccaagcaataacaatatggtgtgtttggtgtttcttcaggaatttccctagacaaacccattgatgtcacttgcggatctggcatgactgcctaaattatgatggatcttggacagaatgggaagcacaattagattccaattacccaagttaccgctccttcttgttaaactcaccagtcaccagctctgaaaaaattaatgcagtttgagaatcttggaccattcagtttagattgtcagcaagataacattatgctgtaacaagctttgcactaaataacagcgaatattgtatggaccagaaatttgctatatgttttatgttgtcctgacacaaaaagagatgaaagggaacatgtaaaacgaaaaaaagtgcccccttgccatttcccacgagtcgtgaccctattgtcagcatcaaacttatggttgacatgtactgactagtaacgttgatattcaaggaacatgtgcttgacaacaacactaaccatctgaactgattttattcaccatggtaaacattgtatttaccatacaaattattaccatcattgacatattgtgtctaaatcaggcaaattcttgtttattgcatcatactggcaacatatgacggtggatgtatgagagtttcaactctcataccatatttcttttgtaaacttgagatctaatgatgaagttgttttcttatgaattttcaatgaacaattgatacaataagtcaaaaactgtcttctgatcagaaaagaaacaatctgctcactctccagtacacgtgttgtaaattgtaatcaaaaggcattgtctgccaagacttctaagaacatatagtacagttagtgttacctttttctcccattatacacttcaaaaaacaattgcaattttatccttgactcatctgggaagaaatttacactcatcatggtgcatgaagctaggaattggtatgagcttccacatgtcatggctcaacacaccttttgcagaatatgatgaaataaactaatcaatccagcttgaagttgtctttgcaccaatctgcaatgtacatttccttcagttcacactttcctcccaaacgttcagaccatgcctaatttgcagtaacgcttgaagctaaaacaacagtgaaacctgaggctcccaacaccagattgagcctgctggattcaactaatattggtttaaggtttcagtgaagatggtagcaggctagcagcagcaccagatttcaaatcatccagcacaggtttcatctatgtgcacttctgtcatcccagaagtgtccccattatcactgaacattgtgcgttctccaacatnnn

SEQ ID NO: 436 - DNA, 1586 bp, Zea mays
  misc_feature (1586)..(1586): n is a, c, g, or t
  Probeset Number=SeqID_14839
atccttataccttacgccatgatacaggaggaatacaggatacacctctgtgcgacaccactagctttcgcaatgtatggtaattcatctttggctattgtgatgcttcttctcgattatggtgctaatcctaacaaagaagacaaaaatgggatttatcctctccacattgcagcgcagagaggttactatgaaatagcagaattgttattgtcaagaggggcttatgttgaccctcagtgggaatctagaagcccactatatattgctgccaattatggaaatgcaagaatagtggagttattgttgcatcatggcgcacagcctaacatagcgatgaaagcagcaatctcggaacgttcattcataggcttgaaatcacttatcgagactggtgctcctgttaatattggtctgcctgaaactccattgatagcagctgcaactgctggcttaactgacttcgtcaagtgtttggtgcaagctggcgcagatgcaaacatacccgatgataatggtagggttgcggtagaaattgctgcaatccaaggataccaagaatgtgtcgaggttcttttccctgtcacggcccctttggctggagttgcagattggagcattggtggattacttcaacatgcaatgtttatgactttaattccacaacatcctgtgctccatgaaaacaatgaaccagattatgaagcagaagtgcttcatgaagacaatgaaccagattatgaagcagaagtgctccatgaagacaatgaaccagattatgaagcagaagttgaagaagaagtgctccatgatgacaatgaaccagattatgaagcagaaggggatgccacattctgtaaaagggattattctcatgcattggatctctatactatggcaatggaaattgatcctgataattcaaccttgtatgcaaagaggagcctttgctttctgtacacaggcaatgaaggaaaggctttggaggatgctactacctacagagatatgcaaccagctcttgctctggtcaaggagtattgcatgacatgcgaagcactcttgcctggcttgaactcggattttttaagcaaaccaactgacgaagcgttcggggaaggacaatccgtgaagaaaggttattagtgtacagggaagaaagaaggttgttactgcacaggaaaaacagaggttcctagctgttactgacaggcaagaacggagattctagttcttagttgttgattcgattagatgccacagtggcacgggcaagataatgatgcatgagcatccgttcaaaaacctagagtgctgtgttttgcttttttctaaactgtggaacttgttcatgttttgaacggcagttgcgtgttagtacaaatgtacgcgtcatgagctataaatgcggtccaatgctgggcccaacatttagacttgatcaaacagttctcgaatagggcgagcgattcgaggcagactactttctcgcttctccttggttaggccactctaggccttgttcgtttggcctgggaattgtctggattaggaaggaaaccatatggatcaaacttacctggttn

SEQ ID NO: 437 - DNA, 791 bp, Zea mays
  Peptide Sequence Number=SeqID_10345
  Probeset Number=SeqID_14840
gcaagagaatcaaggactgtatccttgggacaacagccaagactttagggcttggcgaagactgtttcgccagatttaactactacccgccgtgtccaaggccggatctcgtcatattggcgtgaagcctcactcggacagtggtgtccttaccattcttctcatcgacaaggacgtcggtggcctgcaagttctcagggatggcgtgtggcacaatgtcccagctagtagtcctttcaggttgctgattaacgtaggagacttcggagcaggctgtcggtttgacgaccttgacggacgcagataattagcaacggggtcttgaggagcccggtgcacagggcggtgaccaacgcgcggaaagagaggatctcgttggccatgttccacggcctggatcccgacgaagagattgagccggcgcccgctgctcttttaagcgagaaccagccggcgcggtacaggacagtgaaggccgccaaggagtacctggccgggttctatgaacatttttgtagattcatcgagtctgtgaagatccatctaaacgaggtttgatgtctcgttccccggctgcgtaacgaaagcattgttttgtttgtctcacgcgcacggttcactcttgggagttgtgtgttctagcggtcccgccggtytctgttagggcgcagttcctgtttgctccctccgtgcgtaaaaaaaaacatgaaatgtacttgttggacatgttcgtccatagatgtactatgtatttcagatttgatgtaaaataaacactttgctcgcttgtc

SEQ ID NO: 438 - DNA, 779 bp, Zea mays
  misc_feature (779)..(779): n is a, c, g, or t
  Peptide Sequence Number=SeqID_10346
  Probeset Number=SeqID_14841
gtcgtcgccgcttcttcgtctcccatcatctccctccctttatcgcgctcggcaccaggcaacacgaacacatcgtcggtgggatcctagattggccggtgggtgagttcttccgcgacgttagtgacttcaacgacgactttagcttctgcgagagtgacaccaccaaggctccttctgccggagcacgtcacagtcagctggtccctcgtcctctgccgacgtcgcgtctcctcttgctgtcatgaatgttctacagcaagcaaaatttatgacctgatcaactatgtaaggagtccatcagtgataatataagaagggaggacctacaattctgatgaaaaaggacaattattatggtttcacttggtgtgcactgtgcgggcaagatgaggtttctaatcccttctgaagtaagtctacaccagtgacacattgcagcccatgtcagaagaggaatcataaaagcatatggaggaactatgtataggctacaaagaagcataagaagcattttatagcagaagccaagtgttctgatgattttgttttttcaattgtgttttctgttattggttcagcatgcacatatattgacatgatttatggcatggcatctgccatctttgttatatttatgacatcgttcttgattgatgtgtgcgacatgaatgatggatctttttaacatcctgaccatcattgtgtcactcattatcgtattttgtatatcatttatgggttcacggatatgaaatgacaggtttcttatttttgan

SEQ ID NO: 439 - DNA, 785 bp, Zea mays
  Probeset Number=SeqID_14842
accaagccacaattcacaggtactcctgcttaagaaacctatgttttccctctatgctatactgtttgctatgctttttgcatctctattgccaaggctttgcacacacggacttgacaacagcaggcctctgaaataactagtgttcaaatgttcatctgctcagtgaaggacaccaatcatgtttttggcggaatgttagtgatatgactgatcacttcatcttctttttggtactgactctaacgttcggttgctaatcagcactgctttattcacgacttcatcaagcgacacgactagtccgactggcaatatgtctgctcctgggtatggtttctcctttcagtcatatacatctatgttaatttgtagctcgtttatttcaatatgtgtcgtggtttcggaaccggggataatatatttgtgttcggaagggatacaagcacggactcactctgaatggtggatcacggggatccgagcaagaaactgagacattggggttatactaattcaggcttttgctctaatccagtgtaatgctgatcgtagtattgctttgagacgtgttacaacatatatgatggtgtgggaaggagggggccctgctgtccttttatatctcaagggtaggaccttataggggatatatattttctacaagaaagagagagaatggatcgcacgggttatcatggtcagtcctccgtatggtcttgcgtagctgtaatcttggtatggcgtatcgtcttgctcgtttgtcacacgatgtcttgtatctg

SEQ ID NO: 440 - DNA, 771 bp, Zea mays
  misc_feature (1)..(1): n is a, c, g, or t
  misc_feature (771)..(771): n is a, c, g, or t
  Peptide Sequence Number=SeqID_10347
  Probeset Number=SeqID_14843
ntcaagtctcaactacaaccaacaactccttgctgcaggtcggcatgtctgaggagcctcagccttgtgtcgtgccccgaggtcaccaacaaagggttcaccgacctggtcacgaacgcgcccaagctggaggacctctcgctggagctctgcccgaacgtcggcggccgccacgtgctggagtgcgccggccgagcctgcccgcggctggcgcgcttccgcctgcgcagggagtgcttcaggttctcgctcaactactcccggcgcactgcggaggcgctcgggatcgcggccatgaccgggctgcggagcctcaccctcgtcagcagcaacatcagcaacgacgagctggtggccgtcctcgacggctgcccgcgcctggagtccctctgcctgcgggactgctacaaggtcatcgctgacggctccctgcgggccaggtgcgccggcatccgggccctcacgcttcccgtccccgatygagtttggtgagtccggccggccggccgtttcaggaatttccmcaaccacatggcctgggccccgcgctgtaggtatcaggaagttacacgtgcaacctgatgactcagcatattattattagcatatacacagaagctagcggtcaggactcaggactttgtttgcaatgttctgataggccccatgtcagaatacctactcatcaatgtacttgcgacaaaaaaaaacctgcggacttgttagtcctattttgtcgactttatttttttaagtgattcttatttttcn

SEQ ID NO: 441 - DNA, 651 bp, Zea mays
  misc_feature (1)..(1): n is a, c, g, or t
  misc_feature (651)..(651): n is a, c, g, or t
  Peptide Sequence Number=SeqID_10348
  Probeset Number=SeqID_14844
natggaggtcgaggacacactaatccagctcttaaggctccggcgggcggggccctccgatccctgtacggccatctccagctgtgatgcccacccctatcgcttccaccgccggtgagctgttccgggcagcgagtgcaacagtgctgctttgcctctatcagggagctccatgtcctcatcatcaagagctcgtcctcccttttggattactcagatattaggtggtggtggcatgtcaacaaaaaagtgggagacaatgtggagcgtatgcaaaaacatgtgttctaacttactatcctgacagtagtgtaaacaaagctccggtgttgtgttcaaatgtagctggagaagcaagagggttaatatccaataaacccgttttttgttgatggccttactgaaaaggagaaggtaaccatgctgcatcggtttctaagtttccttcaaacaagttcagtgaaagctattacaacagtgtagatcccagcataccctttgacacacaagatcttggagctgcactgaagggcttcattgcgaccatatcaaagcctaatgggttattcggttaggagtgaattgagaaggttttaggaaattaaatctcttgctagtcaaaattgaatagaaagtcctttaatttctttn

SEQ ID NO: 442 - DNA, 702 bp, Zea mays
  Peptide Sequence Number=SeqID_10349
  Probeset Number=SeqID_14845
gagcttgaagcgtgcactttgtctcgtgcagcctgcatgtttatataggccaggaatagcccctgaacgtggcttacacaaagggaagagaagatccagaatcatcttcacagtgcaagtaatggtgacagatcctttcaggatgttgccgtgatcaaggttcctatctttagtaatcctaactatggcaacaacctgaggcccaccatatactttacaaatataacagattttgtctaatacgacacacgacactcagtcagcctgtcgcgcgcggagcaggaaacgaccgcgcggccaacagaggagccaggggcgcggcacagtaagaaccgagcagggccgagccagggaccgagctcggcatgggcgcaggcataggcatgtagggaatttcacgactcgcggtgaccatgaccgagcgcagggggaagaagacccaggcgctcggaacctgacagcgacgcgtgcgcaggcaactgggtgcggcgcgcgcagagagccggcgaagtggaagacgagcagagggagcaggggcctcggcgccggcgagcaggagctggggcgcggcagccaggacgaacgccagggaacctcgcgagcgcggcatgggagcaggcttgctgcagaacgctcgatgcacaggtgcagggagaggcacaaggccccaacgtgagtggaggagagaggcgcgcgagagag

SEQ ID NO: 443 - DNA, 779 bp, Zea mays
  misc_feature (597)..(597): n is a, c, g, or t
  misc_feature (779)..(779): n is a, c, g, or t
  Peptide Sequence Number=SeqID_10470
  Probeset Number=SeqID_14846
accgcggcccgcctccgcaaattcgcgtcgcgcaaggcgacgctcaaaccccgtcgcccccaccaaaataagcgcctgccccccactggaaagcgaacgccccctcccccttccgcttcggcagggagggctcgctggaactggcggcgagggcaatgctgcgtggccggcggctgtgccggggcgcggtgctcctccttctcaccgcgttggtgctcgcgcccctagtgctgtacggcggctcccccgtctcggttctattaaggaaagtgctactcatagtttatccaacaagactagagagcagcaaacaagtgcaagtaacagtaacactgctcaccatgcaacaaatagtattgctggtcaaaccacaactttgtcagatgctacaatccacatcatcaaggatcagctaacaagagcaaagatgtaccttggattgtttgcttccaagagtaatcatggcttcgcaagggagctccatgcatgagggatatactagtgttattaaaactacgtttaaacgatgtttaaactacgtttaaacgtcaaaactytaattagaggttgaaatcacgttttagcgttttggcgttntaaactgtaaaacgcagtgttttatgcattttagaccattagctatttttgggcccggtcaattagttacttttggggttcaatccagctcatggttgaagttttggtaagccactaacctctctgttttggtatttaacttcatattattgtctgaaattatgatatattggtatttttcn

SEQ ID NO: 444 - DNA, 779 bp, Zea mays
  misc_feature (1)..(1): n is a, c, g, or t
  misc_feature (183)..(183): n is a, c, g, or t
  Peptide Sequence Number=SeqID_10471
  Probeset Number=SeqID_14847
ngaaaaataccaatatatcataatttcagacaataatatgaagttaaataccaaaacagagaggttagtggcttaccaaaacttcaaccatgagctggattgaaccccaaaagtaactaattgaccgggcccaaaaatagctaatggtctaaaatgcataaaacactgcgttttacagtttanaacgccaaaacgctaaaacgtgatttcaacctctaattayagttttgacgtttaaacgtagtttaaacatcgtttaaacgtagttttaataacactagtatatccctcatgcatggagctcccttgcgaagccatgattactcttggaagcaaacaatccaaggtacatctttgctcttgttagctgatccttgatgatgtggattgtagcatctgacaaagttgtggtttgaccagcaatactatttgttgcatggtgagcagtgttactgttacttgcacttgtttgctgctctctagtcttgttggataaactatgagtagcactttccttaatagaaccgagacgggggagccgccgtacagcactaggggcgcgagcaccaacgcggtgagaaggaggagcaccgcgccccggcacagccgccggccacgcagcattgccctcgccgccagttccagcgagccctccctgccgaagcggaagggggagggggcgttcgctttccagtggggggcaggcgcttattttggtgggggcgacggggtttgagcgtcgccttgcgcgacgcgaatttgcggaggcgggccgcggt

SEQ ID NO: 445 - DNA, 584 bp, Zea mays
  Peptide Sequence Number=SeqID_10472
  Probeset Number=SeqID_14848
tctagtttgtgcctcgactagggtgagtgccgccattgccgacctctgtggttgtcacttggtccgccgccatcgtagatgcttgtctgcactggcgcttggcgaccgtgggtggcgatgtgagctcgcgggtgtgtgtgggtcgcttgcctaccctcctccgacgaatttgtgcaccagagccctcccaattcctcgtcgatgtacgagtgctgccgcagatccgcattgcgccatgggcagcgcggtcgaggccataatcctcggcagcatggacagaccccacaagtaataaatttggaagcctgcactctgcaactatgaaaaggaacaaacaaaaaggatgtggggttcaccacatttcatctcctagacgagaccaagggcctatcatcacatcccttcctttccaatggcgtcattggtgtcaaaagccttggttggtcagcggttatgacctccacgatgtcgactatctgttcaataacctctttgtcatgtactaacccaatctatcattggtgagtggtgcctggtgtacctgactgattgtaaagaacaaaagaaaatcataaggtattcct

SEQ ID NO: 446 - DNA, 584 bp, Zea mays
  Probeset Number=SeqID_14849
aggaataccttatgattttcttttgttctttacaatcagtcaggtacaccaggcaccactcaccaatgatagattgggttagtacatgacaaagaggttattgaacagatagtcgacatcgtggaggtcataaccgctgaccaaccaaggcttttgacaccaatgacgccattggaaaggaagggatgtgatgataggcccttggtctcgtctaggagatgaaatgtggtgaaccccacatcctttttgtttgttccttttcatagttgcagagtgcaggcttccaaatttattacttgtggggtctgtccatgctgccgaggattatggcctcgaccgcgctgcccatggcgcaatgcggatctgcggcagcactcgtacatcgacgaggaattgggagggctctggtgcacaaattcgtcggaggagggtaggcaagcgacccacacacacccgcgagctcacatcgccacccacggtcgccaagcgccagtgcagacaagcatctacgatggcggcggaccaagtgacaaccacagaggtcggcaatggcggcactcaccctagtcgaggcacaaactaga

SEQ ID NO: 447 - DNA, 622 bp, Zea mays
  Peptide Sequence Number=SeqID_10473
  Probeset Number=SeqID_14850
gcacgagaccattacctagaacatcctaatcgaaaaacatcctatatttaccatacattttctctataatctaagaagtaagctgatggaaatagaaggcatcaggaaccacatatatccccactgttccacatatatggcagcatctatgggggtgtagttttgttctctgtgcagaccactagttagaagctaactcgcatgtgtgatggcgtctgcggtttggccgcaagatagagattggctgtgagcgcacgttgtgttgtgtgattcttaaggatattgctccttgctcatgttaccatgcacatgcctcattatttgtggtgcgactgtggcatcacttacaatatcacacacacacgtggatttgtttcatattttcattgttcagtttgagtgtgtcccgtggaacatgtctagtatcctgcagcgatgcctcatgacagtaagcataaaaaataccttgtggaggtacgtcacctatgccactatgtattgattgatgggcttatatggtgtagaaaactgatggaaccatgctgcataggaagtacatagttcatgctctatcaacgttagataattttgcaatataaaaaaatatcataaaagcatttct

SEQ ID NO: 448 - DNA, 1643 bp, Zea mays
  misc_feature (1)..(189): n is a, c, g, or t
  misc_feature (1643)..(1643): n is a, c, g, or t
  Probeset Number=SeqID_14851
nnnnnnnnnnnnnnnnnnnnnnnnnnnnnnnnnnnnnnnnnnnnnnnnnnnnnnnnnnnnnnnnnnnnnnnnnnnnnnnnnnnnnnnnnnnnnnnnnnnnnnnnnnnnnnnnnnnnnnnnnnnnnnnnnnnnnnnnnnnnnnnnnnnnnnnnnnnnnnnnnnnnnnnnnnnnnnnnnnnnnnnnnnnnngccgcttaaacactggataaaatcctgcacgccgaggttcttcctcatggcgctcggcctcttcccagcgctaccggccatccctctgctcgcccagctcgcgaaaccctctgcgcgcggacctctctcatccccatggcgtcttcccctgctggttcgtcggcgcccgagctccctctgcccgtcaatggcctcagcccgggagttcgtctgctttccccgctcgtccttccctcaaaatcgcctgaccgcgcgacctccatggagctcccttcagttcttcccaattaatggtcgcgtccctcaagctcgctctcccatgccgcacccagcccctgctctgctcgccgtggagctcgcctccgacccctgcttgccgcgttcctgtgcgccgtcaccttgctgcgtgcgtcgtggttttcttcctctgcgcgccaggctgtttcggagcttcctttgctccattccttggttgcgtgttgagcccctcccgctggtcgcgagctgtctgttcgtcgtagtcgagccgttcttagttgctcgccatcgaagctcccctgttggctgcgtcctgtttgcgccgcatgcgctcactcctcatccatcgggttctgacgggttcacgtttagcgtcgagtcgtcaaacctgtcatcctctgctcaaacccacctcgtcagctcgcttcagacataatcctgtcgtcgttctgtgcgtcgggtgaagacgaagctagccgagtaatattcaccgagagcacgaccaaaaagctcgaaccagtcgtcaatcgcctcaacaacaaccatatccacgactctcaccgttccaataattttgccgcatcgcccttcaaatccgagacctcgtccgtaggatcgtcgttgacctcgcaacttcagctcgagttaattatggacgataaataatcacgtgatgcggaagacaagccaagtcgacaccaagcgcgggctaatccgcaggatgaagctgatggaccaacctgaagatggttaaatcaaacaagtactcggttgagggatactcgtcaaacggacatcgtctaacaacactaacctagtgttactcagactgtaatcttgctgacggagagtacatcctcgtgccggagcaaggagctgctcaggaggtagccccagatccagcacccgagcctgcaccagaggacctgcctgccactgctttggaaggttctctggaggagatggttgctgggataacttggccgtccaccttgccaccgggttggactgttgagtgggaccctgcctcggctgaggaggagcatgaggagtgatgggacaggcttccccatctctctgtttaattaccgttagttttattccgctgcacttcaaacaatgatggatacttttgcaaaaactccgatgatgatgatggtgatgtaataatttaacattgtgtcatgtatggtttn

SEQ ID NO: 449 - DNA, 630 bp, Zea mays
  misc_feature (630)..(630): n is a, c, g, or t
  Peptide Sequence Number=SeqID_10474
  Probeset Number=SeqID_14852
gcacgagaccattacctagaacatcctaatcaaaaaccggcgtgcgcgaagatttgatttttttttttgtcggggagaaggcggagtaagaccaggccgggaggaaggagatcctgatctgttcttggagtggggaggagaggagaggagaggaggaagatggcggcgcaggagcaggagcacgagaagcagcaggcgaagacgagcacgacgagctcgctcccctccagcagcgagcgctcctccagctccgcccccaacaaccttagggaaggagattctgaagaacacgacggcgcacgcgagcaagaggagcggcggcggcggcggcaagggtggagacggcggcaagaagcaccacttctccaagagctagagaattgagggactgagggagggagctggttcgtgctctgctcgcgctcgcgctcgcctcacctgaccattgttggtggtgttggtgccttggtggtgttgatgttgctgttgctgttgctgatgacgtcttctcttttttttctccttttttttctaatttctactgtacctgtgatcctcttgtctcgctgatgcactgttttttaacgtarcaaatcccgtctccccggccgctgctgggactgactactn

SEQ ID NO: 450 - DNA, 946 bp, Zea mays
  misc_feature (946)..(946): n is a, c, g, or t
  Probeset Number=SeqID_14853
gttcatggcgcccagaatttttccagccgccaccagcagcttcttctcccccatgtcgtccttctctctgttctcacggcagcagccagcagcagggacagcagctctgcacgcacctatccatggcgccctcctccccggcttccctcgcgcagcggcagcaagcatggagcttggctcctctccccatggccgagctcacctccctgccaagagctcacctgcgaccccccccactcggacctccatttcccctagctgctgctagccgcggaactctctgttggcttcttccccgtcgcgcgcagggtaccaccggcgttcgcccctacgagctccctctgctccacagcccagccatggtggccgcccagctctctactcccatttcctccaaccgcaccctccctgttcctcttccacgcagcgcagttggctccctgtccatggattgcagctgctcgtccatctctctcgccccatggcattttccccctgcgagcagttttctctgttgtcttcaacctccagccgccctctccattttcccctgctccatggcgcccttcctctctctgttgtacatggcgccatgcagcggctccacttccctgaccacgccctgcttcgagctccgccttgtgctctgctgcagctgcgctgtccgacctcgccgggccacacgccatagctcctgtgcgcttgtccgcagccagcgtcgacccgatctgcgcagcggcgccggtccaaaacagcagcctcggatcccctccgcatcgcgtgcttcgctcgatctgcgcagtcccgacccacgccgtcgcgttggtgtttggggacagcccatgtcgtgtcgttgatctgcgcagttcgaccatctacgtgtctcacttcgccggatctgcgcagccccaacatcgacgacgttcaccccggtgagacgacgatn

SEQ ID NO: 451 - DNA, 203 bp, Zea mays
  Peptide Sequence Number=SeqID_10475
  Probeset Number=SeqID_14854
acggattctcgctctttcacccaggctggactcagtggcgctatctcggctcactgcacgctccgcctcccgggttcactccattctcctagctacttgggaggctgaagtgtgagggttgcttgagcccaggaggtcaaggctgcagtgagttatagtcttcattgcattctagtctgggtgacagagtgggaccttgactc

SEQ ID NO: 452 - DNA, 203 bp, Zea mays
  Probeset Number=SeqID_14855
gagtcaaggtcccactctgtcacccagactagaatgcaatgaagactataactcactgcagccttgacctcctgggctcaagcaaccctcacacttcagcctcccaagtagctaggagaatggagtgaacccgggaggcggagcgtgcagtgagccgagatagcgccactgagtccagcctgggtgaaagagcgagaatccgt

SEQ ID NO: 453 - DNA, 612 bp, Zea mays
  misc_feature (612)..(612): n is a, c, g, or t
  Peptide Sequence Number=SeqID_10476
  Probeset Number=SeqID_14856
gaagcgctaggaggacgggtaacgcttcgctttggggcagaagcgctcccaaaacgtcacgaccgccttgttggagcagccgctgctggctcccgctgccctcagaccgcgcgcagcgcagcagtatcggggccgggcgccgttatacaccggatgcgggaggagagagagtcacgcacgcaggatcaccggccggtgtgcggaggaccggaggcgagggctcgaggcgattggcaagaggcgggaggggaagcagctgatgccttcgctgagagcccgagcatgagctccgccgccgtcgcctgtgtgcccagcgcgatgaagggagggagcggaagatggaactgcgggaagatgaagatgggagatgcagaaacatgcggcggctgtgtgcctgcagtgaaaaggttaggccgttagggtaagaccatgtccaccagctaaacactattttgcatttgaatatgtatgaataaatatcttaatatttatttatatgataattaacaaccgtaattaagtatggataactagctagttttaaaatataaaacmcaaagatatgtatgttatgttgactagataggtgtgaatgtaagtttggagcttaan

SEQ ID NO: 454 - DNA, 857 bp, Zea mays
  misc_feature (855)..(857): n is a, c, g, or t
  Probeset Number=SeqID_14857
atctagcagccacgctatggctgggcaccgcttcccctgaagccttaaccacgcacgatctgaaagcgtgaggtcaccggcgagcacgaattcaagagagaacaaaaaaatcgtcgccgcgctgagaagagaaagaaatcacgccatacgcatggccatggtcgtcgtcggggcttcagggccactcaagcttgcagcagttgcttctgggggcctaaccacggcgcgccctgcgtagcagggttgggaagacggactgggatcgctcctgggcagctgttgcggtgccggtagggcagttgcgtgtttgcggctgctcctgtgcgctggagggtgtgagctgcaatcgccgtcgctgctcttctacgccggcgccctggatcgggaagtgttgggagaactcctcttgcgcgtgaacagtgtgtgcgtgcagttgtgcactctggggacgaccaggacacctcctgtcgctcacctgtcctccatcgccgccgccgtgggcagctccatgcgccgccgcctcggctggggaagggagaacgcgtgtgccgtcggatcggggcggatggtcgagatttggcctgaatactcccttcacgactctggcgcgtggccgtttgatcgggatccgagggtcgcgattgaatctcagcgtgaggtcacgagtcatctgaaaaaagttggtacctggaatctcaagtcccacgcaagttgtgctcttgaccactttttacccaataatgttctataatatcattgcataggttaattttgttgggacccaataggttaccctagattgtttatctcattaccttgtttacccctgaatcacttgggtagtttgctattgcnnn

SEQ ID NO: 455 - DNA, 1894 bp, Zea mays
  misc_feature (1894)..(1894): n is a, c, g, or t
  Peptide Sequence Number=SeqID_10477
  Probeset Number=SeqID_14858
gcacgagaccattacctagaacatcctaatcgaaaaaatgtagtagagccagaggaggaggagcagggggaggacgaggctagggttgctcggcgatggcgtcggcggcgaagacccttgcacgggttggatcatccctcttcggccgcattctcgcgtctccgtcctcgtccataccccgcgccgggctgccgctagccaggctgcagccacacgtcccgccgccggcaccggcgggggtggacgcttacgaggcggagaccgtcgccaggctgagctcgctccccggcgagatatccttcccttgcggcctcccctcgctccgcttcttcatcgacgacggtacagcttctctctcacacacgcactcatgaacggattgggccgcgattgagtattgaagttgggctcggatcgctagtcactgccagtttcagaaatggggaatagggggactgggatcaatgtttttcgtaatccgttcgttgaatatagagattgtagtgtcgttgaatatagaaattgtagtgtgtgactattcgaaactcgcatgatttctgttgtaatgcgtattttctgtgatttgcagttataccatttcactattaagctttgctttttgcggacttgggaagaattgccaagatttcatacagttaccttatttgggggcattgttttctgaaaagtcatggttgccttcatcaatgctgatgtgttacctttatctggcttgtgttgaaagttactaagtgattgatcaaccttgagaagtcatgtttctagtgttattgatgctcttacgcatagaagaacacgttgcttgcaatacagtactcagattgtgtggagcttaggaaattatgctatgatttatgttgaaattaagtctggtagaaagtgcagtagaaatactcaattacccaagtctccttttgctatcctaagactgtttatttgcatagtgccaaatggtggccgtttcttgttccagctgctgctattgtcctaaaattgggtagaaagtgtatgacaaatactcaagtacatgcagttcgtcctgctgttcctggattgtttccttacatggtcccaaacagtgaatgttccttgctacttctgttgctggaaatattgccgtagttatatttggtgaatactagagtcttgattatgatatgtaggctttgggttatgacctggcagctaggatcaacttttatttttgttagtttgatgtctttttctaatccgttgcttctgttctgctatttgtagtcgaggatcctgttcctaatgacccctttcagttgctcccgaaaagaacttaccagcccagtacaatcaagcggaaaagaacccatggatttcttacgcggtctgtctctctagcttttccctggccattattttgcttccctcgtccttcattgaaaaaggaagatgggtttctagttggtactatcaaattctgtttccgttcatgttttcctttggcacctcatcatttagattaggtagtttatctggcatgattgtggttcagtgccctgatgtccttgttacattggttctgcagcaaatcgaccaagggtgggcgcaaggtgattgcccggagaatcgccaaaggcaggcacagaatctcagtttagctagatccggctcgtagcagccctggatgttttctgtaacacagattcgtatcgtgttctttctatggttagcactctgctgaaggtgagcccccgcgcaagcagcagtccatgtatggatttttattgtgaaacttttttttgggtggtttcagtcctggccatctgtaggatatgccttcttccattttattttgcgacgctgtgtgcgtgtgtgatgatactatcatgatacttgttgn

SEQ ID NO: 456 - DNA, 158 bp, Zea mays
  Peptide Sequence Number=SeqID_10478
  Probeset Number=SeqID_14859
gagacagagtcctactcttcctgcccaggctggagtgcaatggcgcgatctcggctcactgcaacctccacctcccgggttcaagcgactctcctgcctcagccccccaagcagctgggaccacaggcatgcgccaccatgcccggctaattttgcac

SEQ ID NO: 457 - DNA, 641 bp, Zea mays
  Peptide Sequence Number=SeqID_10479
  Probeset Number=SeqID_14860
atgatgcatggctatcctgagctacctttattcattgagcagctgctgggaacgggcgtattgagtgaaatcgcgcctctgctcgactgtgaccaggccctacaccagcccttctatttccaagcccctggtgctgctacggtggcctgctcggcagccgttgctccctccccagcaccctctgctcgatgcgccccctctctgctccctctccacgtttccaccatagtagggatagagcatgcggccaccgcggtggatccacgccggcatcacgggtcctcctttgggggtgtgccggggaacttcgccgggccgtggggagcgcactggtgggaagtcgtggtgcactggtgaccgcgtggctttgggaatttgacgtcggacttcatggacatcactgtgtcgcatgcgtcgtgggctgcctcactcacctctcgatcgccggacaagagcaggtggttcaagaggagccacacatcgaggagtttgacttgatctaggtggtgtctcctagttgactttatggctaaggatgtactttagtttgttttataattaactttaactttgtaagacttatgctatgtaataagtattctgatgatattgtgacatttatctctatacactctgttatt

SEQ ID NO: 458 - DNA, 594 bp, Zea mays
  Probeset Number=SeqID_14861
aaatgcattgaccatgacagtactcgagagcggcatgctagagaacattgaatatggtcactctagaggcggtctcagaactcagctcaaccagtgaacacgcaacccttcccggtcgtcggcaacagcttcgaacagattccatggtttttcttctgaaggtaacaccgagccaacagcgttgagtcttgagatatttaaagcgctggaaagagcaaaagttatggttgccttgccactaggaaataataatgctactctgaggtgtggaataaccgacaaaggagtttctgcagcaagcccacacacccaacacattagcgtgtagactgtggcaagctacgacaagcatactgcatactactacaggtaccgctaccagcgagaaagttcgacaatacgtacctagcagtcagtccatcttttctaagctggttgctgctgaaggtctattttctttttctgcgtatcggcccatatgctgcttgtgctaaattggaatttcgggtctgtctatattctggaatttcgagtcctaaatatacaattatctttggaaaatgaatgcggtgccggtgcagcaaccttgatgtg

SEQ ID NO: 459 - DNA, 1035 bp, Zea mays
  misc_feature (1035)..(1035): n is a, c, g, or t
  Peptide Sequence Number=SeqID_10480
  Probeset Number=SeqID_14862
acacgaaatcccgctttcgcccccgtcctcttccccgctccacctccctttccccctccctccttactccagtcctcccatggcttccagtgccacgggacctgcccgctccccgtgagtccgagacctcctccccgaccgagccctgccctgatcccgacccgggacccacccttgatccggaccgtcctaaatcccaacggggtctctggcgatggcggcggcctccccgccgcaggatcagcagcagccggcggcggagggggccgttgcgcgggaggaccccgcggcgctgaccccgaggagggctcggttcccgcgcgcgtgccactaccgtccgaacgcgccgccgctcacgcccacacccgcgccctcgcctccgccgccgcggccgaggcggaacgggaatgcggggtacgagacgccggagtaccgcgtggtaacgccgctggtggaggaaccggcgtcgcccgctgagctgccgcggtggagattgcgcggcatgtgggagctcgcctccgtcctcaacttcctccacgtgttccggccattgctgaacattccggtggagttcactgcagaggagctggaggacgcgatcataacacccaatggaacgttggatgacgttcatatgcctttattaaagtcaattcctccagtaactcgaatggccatgggacgtggaacatggatagcggtgttatgtaaaaaattgaagcactggtggcattgggttgcagaaggcgatataccgattgtagcctcacatggagcggaaactgagctttacaaggcacttgagccaggaattcgattagtgatcctgaaagccatatgtgatatacgcagtgagcaagaggacgttcggaacttcattgatagttctttgaagcatggttatcatctttccatcttccgtaaagaaaggattggaggagattcacatggaatctcatactggtatgaagatgacccaatccttgggcatcggttgtatcgtgaaattagacgagtggagcatgcgaaggactn

SEQ ID NO: 460 - DNA, 161 bp, Zea mays
  Peptide Sequence Number=SeqID_10597
  Probeset Number=SeqID_14863
gcggtcagggcgagagaactagcgacaggcggggagcgcgggagaaaggggcggagcttctctctctctctgcccctttctctcgcgttccccgatggccatggccatcaaccggtcgttcccgagctcaattggaacatgaattagactccacaaccgcc

SEQ ID NO: 461 - DNA, 660 bp, Zea mays
  misc_feature (1)..(40): n is a, c, g, or t
  misc_feature (660)..(660): n is a, c, g, or t
  Probeset Number=SeqID_14864
nnnnnnnnnnnnnnnnnnnnnnnnnnnnnnnnnnnnnnnntcacagtcaggcagtctgcaggcatccatggagtactactacgcctaccagcacagcagcagcggcggcttgagctcaaaggagaagaggccgccgctgaagcgggggcagctcaagcggcagatcgtgaggaccatcagcagcctcgtggtgccgaggcacgccgccgtcgctggcgctgctgctgctgctgggtcgagggagaaggaagatcgcggcagcggattcggcggaggacggagctacgactgacgatggatctctcggagaaggcgtgataagagatacgattcccagcgtcagtttgtgtgtacgtactacaactgatgaattagcttcgtagcagttccttttgtataatatgtacatcttgcggaatgaaagcttgttacatttacattgaagagaacgacatgtgaagacttgtttcacaggggaaaaacataaatcagggtggcggcgaccctctctgccaagtcacagcattttgttctcttgtgttttgtttgtttccatgctgatcccgatcaatgttgttctgttaacgtattttcccggtaatacaaaaatagtgtggataaacggtacaagacataccctatccgttttcaccaccgtcn

SEQ ID NO: 462 - DNA, 1685 bp, Zea mays
  Peptide Sequence Number=SeqID_10598
  Probeset Number=SeqID_14865
agttttgccggcagcagtgcctgcaagtgcaactcagacttttggtttaccaccgcgaccacccaacgccccaaccaaaccaacccacacgctaaaagcctaaaaccctcctctccgcgcgcctcctcggctcctcgccatggacggggacgacgccggcggccagctccccgcagcccctgcttctccgcgcaccgaggaggcgatcgccgcggcccatgatgacgcccgcttcccacccaccccctccgacggcgaggactacgatgacctctacggtgacgtcaacgtcggcttcaactccctgctgccgctctccccctctccggctccgacatcgcctcccaaaaccccatccccgggcccctccttccagttgccaccccagtggccgcaccgtcccccgcctccagaacccctgcccgcgcctgcgccccagcgcgagcccgagccgcaaccgagacaagataccccgcgacaccagccgccgcagcctaccccgtccgtgccgagacaccacatgacgccgcgcggtggcggcgcctcctactcgtcgtcgcccaggtgcacgtcgctgtacatcagcgagctccactggtggacgacggacgcggaagtggaggccgcgctcgcgctcgcgccggacggtgccgccgccgcgttatacggcctccacttctacaccgaaaagatcaccggcatgtcgcgcggcatctgccgcgccgatttcctccatccagccgcggccgccgcggccgccaccgcgctccatggccacgccttccacgggcgcaagtgcgtcgcctctctcgcccgctctccctccctcaacctcctgggcgacgacctcgactcctacgccgaagccgcctggtcctggaaccctcctggaggcctcggcaacggtggtcatggtgcgagcgatgccacggcgggtcgaggcaatgtggccctcgccttggctgatcggctgcctctggcgcgacctcagctgtccgtggttccccggccgacacctaggagcgttccgttcgctggtattggtgggtacggtgggttccagtcaatgagacagtacagtgcggggatgggcattgctatgatgccgtcagcattggcacacctcgtgaacccaccgttcttggcgttgcaaggttcaggagtttggtatgatcaggggatatctgggagcttttggggagcacagcaggaacggaatttcggaggttgtcaaatgccatggcagctgcagcaccaacaggcgcagcagcagtttgggaattggaactacgggatgcaggggcgtggcttaagacacgaaagactaagtaatacgaggagcgttggcaatgtgaggtatctggatagaaggcaggctaactgtgatgggggtgatcggtacaaagagaatgattttgagaagggtcgtcatcaggagggcatcttggacaaggaaagggagcaggagaagcactggaatcagagggatagacatggtggcgacaatcagatggatagaagagtacgtgcaaggtcaaggagccaatcaagtgatgatagtgatgacgataatccaaggaggcggcgctaatcttgggctccasgaaacatgtaaatggtaattgaaattctcagaaacacattgtacattgttctattaccaagggccgagtaaacgaccgtcc

SEQ ID NO: 463 - DNA, 1590 bp, Zea mays
  misc_feature (1590)..(1590): n is a, c, g, or t
  Peptide Sequence Number=SeqID_10599
  Probeset Number=SeqID_14866
aaactccacgactcggtctcctcttcctagcaccatccggcccatccagccgccgccgccttgcatcctccacctccccggatcccgccgcgatggaggaagacgacgagttcggcgacctctacacggacatcctcatccccactcatacccccgcatccacctccgcgctatccaaccctgttctagtcgaaaccctacaccgcccgcctccacaccctaatcctacccccgtggcggcagccagcagaggaggtcgacgatgactggctcctaggagggagcgaacccatacccggggtcgacccgaccggcgattgggccgacgaggacgacgatggaggggagcccgcacctcccgcgaagcggtccacctctgcggatgatatcgatccgctcatggggggtggtgcgggggattccgggccggtcatccctgggctctcgtcatcatcggcagctggtgcggccgggagcgacgaatgggacagcgatagcgaggacgacatccagatcgtgctcaacgagaccgatggccgcccggggcttgtggaggatgaaggagacgacgaagacggtgaggacctcgtcatcgtcgccgacggaccagcgatggaggagcaggattggggagaggacccagcagcggcaggggcagaaggagagcgaaaggacggaggtgagcctggtaagacggtggcagcaccgaccggaaggatcgggtacagtggcggcggcccagggttccatcagcagcaccattccatgttcaagtatgtacgacctggcgctcctggtgcttcagtaggtggggtccctggtggtcctggtcaattccgccctcctgggcctttaggccctttctctggtcgtggcagaggtgaatggaggcctgctgctggtcgaggcatgaacaaaagttttcattcaggctatggaatcactccatggggtggttcagggcgcaattttggtggtggactagattttgcacttcctcctcacaagtctactcaaatgacactttgcataaatgaggaatgcatgaatttgtgttttttttggaatgataactcacatgtgaagaatgaagtggagaatttatttcttatgagagatgtagtcaggacacacagtgcaagtgcaacatctgttccacaatgaggctcgggcctgtttggttcagcttttttctgaccagcttttctgagaatctggctgtggagagaatctggctgtgggaagaatctgagtattgtgtggattacgtgcggaggaagatcaagtggtccaaaaggttcaggatctagaaaccaacagattcctactatcatgacgattcgatcgattttgtgttcatgttgattttggacggtttttaccaaagcgattcttatagaagcaggctgaaaagctggggcgtttggcgatctgcagcagcttttggtggtcagaagctggaaaaagcccaaacaaacagggggcagcactgttttctaatactgtggttttagaatactatagtatattttttttgttgtgaaatgaatactgtggttttttgttgtgaaatgaatactgtggttttcn

SEQ ID NO: 464 - DNA, 608 bp, Zea mays
  Peptide Sequence Number=SeqID_10600
  Probeset Number=SeqID_14867
cacaaaagctccacaaaagcaccataactacatcactcatacaagctatatatgttatcgtgtttccacatttgcaaacactttacagaatcattcataaaagaactaatgcttcaagaagttcaaaagccttcacacaacaattatagcttcttgtatcctcctgttttaagacacaagctttctttgtccagaatttccatctctatgaacctgatgtgtacgtgtatctcgtctgaaccccctctagtagctcatgagtttcccagatttcttgtagtcgcacagacgaagactggtgacacctcgtgttccttgcggatggagttggggacgaacattgccgatagggggaagacgaggctgcagtcgatgacgaacaacgacagcgatgattagccctctccttgctccgacatggccgagcaatgcatttgggcgacgaagacggtggcgattgctccaggatgtcagtacccacctccgtcactgaggcgcgcgtgcttcgtggccactagactcgggatgctggcctacgctacgcgtcgctgctcactcctcaagccgtgggctcggactcgaagacggttgcttctggccgatggcac

SEQ ID NO: 465 - DNA, 739 bp, Zea mays
  misc_feature (1)..(1): n is a, c, g, or t
  misc_feature (739)..(739): n is a, c, g, or t
  Probeset Number=SeqID_14868
naacaaagaactatttcctaatctctctttctcttctccaaaccggccgggtgtgctgaggggcaaaacctcgcctccccccaaccacggatcgcggctacgaactccggagccgaggtcctgctaccctaaggcttaacgcccttgacactgtccattatgtaaaattgatctgggctgcactccaatcgataagcttaggttattgaatcctatggcgttcatgtcaaagaaatgcatagtgagctgatcacaatatacaggatgtgagatcaaaagtttttcccttcaaaaggaagaaggatctaaagaaaaaggagaaagaactccaggctatggaggccgagctaaacaaaagagaacggggtgccaagaaagatgaattgtgtcatggattccatcattgtatcagcgattaaaggagagactgctcccatgcagactgaattcccatctattagctccaactcgtttgcagcagttccaatcttcaggaaaccaggtcgtccggatagtctaggtgttccgctagatggaacgaaactgtcaacaaactacaacaaatgcaagaataaattaatggtcaaatatcatacccaaatcagccacatggctggaaatatatagcacaactttgtacccagttgtcaggttcgtcataaccatctctccaagagaatcaacccaagtacgcccaaatatcagtaataaatttataactggtcccaattcagctttn

SEQ ID NO: 466 - DNA, 2315 bp, Zea mays
  Peptide Sequence Number=SeqID_10601
  Probeset Number=SeqID_14869
gttattatgagattgcggtgaaacatgtttaataattttttgttacttaataagaattaataaaaattaatggaattgtgttgcggagatctcagttacgaaattaatttgttaagtgactttctttagtaccaagaagaaatttttttttataaataaaaaaatatattttatatctacataaaaaaattattttataaataaaaaaaactattttataaaaaaacttttaaatcgtaaagaaatttgtaaaaaaataaatcaatgtgaaatttgtgtgaataaaacgaaaaaaatggaaaaaattgataaatcgggtaaaaagactaaattgataccccccgatgggggttatggctgggttattgtgtttgctagtgctttaaataacttcgtgctcattccactcctccaaaactttggactagttttcaaggacactttcgctgaactaggactatccgctactcaaggatcactcatcatcaatgtcaattcagcttttggattgttgacaggattagttaatggccctctattgaacaaatatggatatagaaaagtatcctttcttgctggatttcttttagtcattggtgttattttgacgtcttttgccaagtcttttctagcgtttttgatcacttatggatgcataacctctctgggattcggaatgacaatgtcctcctactcgctagccatcaacacgtacttcaaagaaaaaaaaggcaaagccatcggaattgccatgaccatcaccggtctaggtccaattataatgccccaaatcataaacctccttatcgaaaactacccaatttccggagtcactttaatccttggcggtatcctaggacacagtctcgtagccgcagctcttttacaaccagtcaaatggcacatgaaacgagtaccaatcgacgagggcgaaaatgaacttttaaagaaaaacggagctgtgggggaaacacaaaatcagaacggctcagctgagaagaataatccacaggaaaatggagttgagagggggcgcaaggactcgacgtcatcgaagttgtcgattaattacgaaactgagcaaggggctattttggggttggattcaaatttaggaggaagtgtcatttcgttgaactcaatcaacgaaacagtggcaacaaatcgccgaaaaatctcgacagtttcccgaacgaagacccaatggtggaaaagccagtcgactgtgaacctcgaaagctcagtggatctcttcgacgaaaaaaaccgtaaaaaccaactcgacggaattgaatattccaaaccacgcgataacactcgctacacttccgtctacaacccggaaatgacggaaaaagtcgaaaccaaatcattctggaagcgattctttttacgattggctaaaatcttcgacttgaatctgctcaaagacccaatttacgtcaacataatgatcggcatgtctttagccgtcttcgccgagcttaacttttctgttctaaccgcttttattttgaacgatttcggtttgacaacgttcgcaaatcgccacgttcatgtcgtgcttgggcattgctgacattatttttcgwtttctggctccgtwwatamrragactgcctcaagaaaccgccccggatgatgtatatgtttactttgagcgcattgatcgccacgaggttcggacttttgttctccaatgattattattacctcctgggagtatccgtggctctgggaatagctaagggcgttcgaacggtttacatgtctttggtgattcccacgtacgtccctctggaacgactagcggccgcttcgggaattcaaatgatggtgaacggggtgtttattttaatcggaggacctttcttgggctgggtcagggacttgactgggagttacagtctgtgcattgtccttatgaattgtgttacgttctcaacgattatcatgtggtccactgagtacatctatttttattttaaagacaaagccgaggaggagacgattgaaacggtggaagtcactacgaccaagtgatttgaaatttggaaatgatttaaaagactgcgaggattgtctggagaattgacagtattttaaatttaaccagtgcaaatttttgacgaattttttgtaaataaaatattgtgcaattgcagaaatgtactttggtactacttagaaaatacttcagtactacataggaatttytaattytttttaatttgttcttttctgtttattttaatgtgtttatgtaaattgtgatttttgttaacttaataaatttattttaaataataataatt

SEQ ID NO: 467 - DNA, 514 bp, Zea mays
  Peptide Sequence Number=SeqID_10602
  Probeset Number=SeqID_14870
agttcgccaccaccagtgacgccaccgcgaggaaaattcaaaagtgagaaggttgtgagattgccgctgtggctgccctcccgcgatgtgaatcctcaacccgagggtgtccggagatactcgcggaagccacatggagtgattctagggccatgatgcgtagattctccatcagcgccgtctcaattgctcgccgacttcgtcctactccatcatgccgcacgtctctatggtcagccctctccaccgcttgtcagccgcgcgaggtcacgagtcatctgaaaagcaagttggtacctggaatcttaagtcccaggcaagttatgcccttgaccactttttacccaataatgttctctattatcacttattaatgcataggtttaattttgatgggaccgaataggtcaccctagtctgattatcttttactgtgtttacccctgaattatttgggtagttttgctattgctttatatggttttgtgttaatacttcattatatccatgttcc

SEQ ID NO: 468 - DNA, 514 bp, Zea mays
  Probeset Number=SeqID_14871
ggaacatggatataatgaagtattaacacaaaaccatataaagcaatagcaaaactacccaaataattcaggggtaaacacagtaaaagataatcagactagggtgacctattcggtcccatcaaaattaaacctatgcattaataagtgataatagagaacattattgggtaaaaagtggtcaagggcataacttgcctgggacttaagattccaggtaccaacttgcttttcagatgactcgtgacctcgcgcggctgacaagcggtggagagggctgaccatagagacgtgcggcatgatggagtaggacgaagtcggcgagcaattgagacggcgctgatggagaatctacgcatcatggccctagaatcactccatgtggcttccgcgagtatctccggacaccctcgggttgaggattcacatcgcgggagggcagccacagcggcaatctcacaaccttctcacttttgaattttcctcgcggtggcgtcactggtggtggcgaact

SEQ ID NO: 469 - DNA, 1854 bp, Zea mays
  misc_feature (1854)..(1854): n is a, c, g, or t
  Peptide Sequence Number=SeqID_10603
  Probeset Number=SeqID_14872
atccgctcgtccttcagccgctcccaaccctagccacgcaggaactcacagccccgccgctcctcgcctccatcccaccctcttgttccccactttgcgttgtgccacgacgctccgggcatgcatggaggccgcaatagatccaggagatcgcttgggggcggcgggcaggcaaaggaggtcactcgctgggtttgctagcgtgggggacactagtgcgacagcttgtacaaggcgacgagactgcacggcgtgctcctggaggtggcgcatgtgcccttcctcaaggaccgctatgcactgtgcctgcagctcgagtgcatccagttcggcatcattcgctcctgctccgacctcgtcacgggcaaggcgctggcctgcaagtccatcgccaagcccaacatcgtcgcctcaaagccgtgtacgaggaccgcgattccgtgcacctcatcatggagctctgcgctggtggggagctcttccatcgcctgcaggagcgcgactgcttctccgagcgagagagagtcctcaatggagaggcaaaatacgacaggaaaattgtgaccatatctagcattgatggaaaagataataagttatgctaggccagagcaccaactagaaaaggcagtgatgcatctcctacatcaaggaacctgttgacacatcctattttgacccatgttcacgaggaggcaagtggctgaccctgtacagtttagtttgtgaataaaaaactggcactactggcatattctacacattattcatgaagggccagtagactgtaattgttctgtaaacaatcattggatgagaaatggtactaccccttttattttcctgttgtttttggtattatgggttctaactagatcaatttccaaacaagttggaatgtaacctaggctatactctttttaaaatgctactgccatttttgttattgtcaaccacactaccagtatcaatgtgacctctttttcaatctatagtcaaaattgtcatcacatggttccacattttttgcttatgcttctattgaataagacattccagttgtagacaaggttgttggtgatggatggggtaatcccagaggtagtctacaagcttcttaagattgtgaatacagtgaacatcatcgatgccgaaatcatagatccaatggagatcagatgttctggtgagaaatgtaggtatacataccctcctcacccatctctgtcctgtatgaagttgttaatcatcttgccaagaggcacggtgccgttggccatgatctccagcctagatgagtggacgtgctggaggagttctcgaacagaggtaggccgaacatcaagagctccggttggaacagtttgttgtgagggttgttggttgggtttttaatggtttaaaacaaaagctttcattttttttgtttgatcacaatgaataatccaatatatcttgccaacatagaccattctatagatctgctgattgtcagttttgattttttttggtttccaaattcagtctttttccttttccctaattgcagtgattatcaaaggatggatgagaatgatcagtatgagttagtagctttagatgaatcactcgaggatgagaggaatcttcataaaatcatggctggtcgaagggcggttgaagcagaggttgatgctaggtacgtgaggactggtgcagcagatgacataaagcttgacatgtagaactgagagacttcgccggagagcaagatatgaactatttacacttaggatcaaaattaacaccagccctgttgaaattcgttcagtagtatgtaactgtccgtgaaataggacaagtgaagctcgtatn

SEQ ID NO: 470 - DNA, 1293 bp, Zea mays
  misc_feature (1293)..(1293): n is a, c, g, or t
  Peptide Sequence Number=SeqID_10604
  Probeset Number=SeqID_14873
tataccaatccacctctttgtctgatgatggggcgagcacgcggcccagcccggcccgcttttttcgctttgctctagtcgtctgctccgctccctgggtgctcgacagtttaacaacctgcatttcttgagttagtatcgcccgccttgcgaagacgcgcagagaatcatgccggcgacggtggccatcacgttggacctgggatgctgccgctgcaaaaccaagatccacaagatcctctgctgcctccaacaacggtgcgggttcgtcttcgacaaggtggtgtacgacaaggacaaggtgctggtttcggggaccttcgacgccatggacctcgtctgcaagctccgctgcaaggccggacatttcgcaaccaaaatcgagattgtgcccccgcccccgccgccgccgcagcagaaaaaggatccaccaccagcacaaacggcgcctgcagctgccgtggggagcccccaacagcccgtagtaacgagcaacaggcccgatccgccaccaacgtgcacaaaagcgctcatcccgtacccatgcccgtacccgtatccgtacccgctcccgtgcccaagtccacagccgcgctcctgccactgccactcctgcaagccgccgccatgcccgacaccaccacaaccaccacggccgtgtccgacaccaccaccgccaccactgccatgtccgccacctgtgtccgtgtgcaagtgcccagcatggacaccgtgccagtgccgcggccacccgtggtgactatggtggcggcagcggtggatatggtggcaactacggcgacagggctggtggtggctatggtggtggtggtgattatggagttgcaggtggggctgaaggcagttttgctgctggaggtagcgacagctttggcagcagtaactttgctgacagtggttttggtgaaaaccctgctggtagctttggcgcaatgggtggttccagtggcgctgatgggttctctgccggcacacctggtgacggtaacaagaatgatgaaatcatggatgatctcttcaaggacgatgagcctgacagctacgccaacaagaggagctaatttgtgtccaccaccaccatgcgaggccgtgtggattctagcccatatgtattcggtagtgttttctgttaacatgataggtgtctgatgtctaaataatggaacgagtccttttgttgagtttgagttgtggaactttcaaagcgtgcgttgcatgctggcgcttgtgccggcaaacatggcatactttcatgttatattgttatttgcn

SEQ ID NO: 471 - DNA, 516 bp, Zea mays
  Peptide Sequence Number=SeqID_10605
  Probeset Number=SeqID_14874
ctctcatccacttggtaggtcgcaccgtcaagatcgactccggggaaacatgcaatcggggcagagtgaggtctgggtgtgggagattgacaccgccgcggtcgaatcaagcctatggtgacgagggtgtccacggaatcgggcctatatgcctcgccatgtcgtgcacgatacattcagagcatcgcttgggtggattcgtgcttggatggtgggggattgctcatcgatgttcaaaatttgtcgtcgaccgcccccactgtggccttatggttctgtgtcgccgcagtggaagtaaggtcaataacaggttccacaggatgaggcgcatggaggatgctgcgatgtgtttgtgagaggtctaggacgtcatctcccagtcaactttgggttgctagatcgttgtctccctacgatgtaattatttatttattttctacagaactcctattataaagtaaagttgtgacattcgtttctgtgccatgatttatcatatgtgtgagacttggtctc

SEQ ID NO: 472 - DNA, 506 bp, Zea mays
  Probeset Number=SeqID_14875
tgatcaaattcttcaaatctagtttgaactgtatcctgggggcttggactatctggagacaccacaatgactgtgttttcaatggtgctcagccttctatagctggattgcttatctcagccagtgatgagttcaatatgtggtgttttgcgggggccaaaggcttgacccgtctttcggacctagcttttgtattcaaccccggctaggtggcggttattcctcttgttgtttgtgtgtgtgtatgagtggtgtgttaggtcattgtaaataccatccttcttctaatgaaatgatacgcagctctcctgcgtgttcgagaaaaaagtttgaactgtatttgcattcgacaattggtaagtagtgaattagtggttgtgtgtgcagactgcagagcagtaagatgagcacttaagtagcggtttaagttagcttgaaattaatatttcctatcatataaaggaccaatggttcttaaaaaatgtccagataatcatttatgtact

SEQ ID NO: 473 - DNA, 981 bp, Zea mays
  misc_feature (981)..(981): n is a, c, g, or t
  Peptide Sequence Number=SeqID_10606
  Probeset Number=SeqID_14876
aaagggtagagagaagttatagcctttcctccccgattcacccccgcgtgttctcgacgaccgggcgactgccgccaccactctacgccaggtgttcgtcggcgatccgtaccaatcagatgtgtgcacccatatcctttacttctctacatcaattggcttctgcgggctcaagttcttgagctgtagttagttaagcttgaaattagtggtcttggtggcttttaggactgcaggagtcaggacaacaattatggataccgtgatctacaaacatgatgacatttcccaagaaggaaccctgccatttggagagacaatgaacatgggaggaagcaatgtagaaattctcacaagaatagagctcgatattgcatttgcctccgagaaattattaaatttggagatgctggtgatggaaattgctcgtcaggctactgactttgagccttctacacttgaagatgagtccatttcttctgagatcgcagagaatgctttggaattggacatcttgtatggtattcttgatgcagaagtcaaggagctacataacttgattagttctctccaagctgatgttaaaagtatagagcatgaggtttatgaagaagagtctggaggcaaggtaaaaactagaatggatgcagctaaattgtccttgaagcagatgcaagagctaattgctgatattcagaatgaatctgcaaagtttgagaaagtcgttgagttttcccaggataaggaagggaccattgaagctgttggatgtgataatgaccatctgtcatatcaaactggtgcgcagacagaagatcaacacagaaatgttttacatatgttagaacaatccatagcaagtgagatagatcttgaaaagaaactctctgattccatatctgtcatagaagacctcaggctgaagctccatcatcaggaagaggaaatctatttccttgaggaatcaactgaaacagtttn

SEQ ID NO: 474 - DNA, 733 bp, Zea mays
  Peptide Sequence Number=SeqID_10607
  Probeset Number=SeqID_14877
gtaatgaacctctgctgaatccaccgcgctatggaccacagctggcgcctcgaccggtcctcctggtgactataaaacctggcgccaaaccctaacccccatcccccttttcaccacgcacaaatccatcaccaccggtgagggcagagtcgggttgtgcgccgccaccatcgatccccggccctaactccattcaggaatcaaagttgtgtggtagagattcgacgttgctgctgtcggatgttcgtggcgggattgggcgacaccgaccattgggacgatcgcaacgagcatcggatccgcccatcgccgcgaccagcaccaaccaagcatccatttgcgacaagcaagccactaaggaccctggtgttcagtaggtggataattctgagcaggagctcgttgaaggatttatgcaccacagcaacacttctatatgaattgataaagaatggagtggcatttcaatggggagcagcgcaggcaacaagattttgatgctactcatgtcaaagctcacataaacaccgctgctacaacttcaagaatttaataagaccttcgagcttgagtgtgatgcgagaggcattacaatggagaactacacattcaaggaagtaaacctattgtattctttagtgaaaaactacatgatctagctttgaattttctatgtatggcaaagactttacaatttagtgttagcgttcttataccaattggattatgctct

SEQ ID NO: 475 - DNA, 999 bp, Zea mays
  misc_feature (999)..(999): n is a, c, g, or t
  Peptide Sequence Number=SeqID_10608
  Probeset Number=SeqID_14878
gcacgagaccattacctagaacatcctaatcgaaaaaatcaaacacagtgatgcgcgggcgctcatccataggcgtacagcgtactgatgcagcatccatggacgtcctgaccacgccatcaatcaagcaaaaatgaaaccagcaacggtagtcaggtgtagtgctgctgcggccacagtgctcggcgctcgctcgtgctgcctgctggtgctctgtgctcgagtgctcgacggccgctgcccgctgcgctgggagcttgcgacgagccaacgggtcaccggtcgacggccacccgcgcgccaccgcgccagactgggcgcgccctcctcgccgtgggtcctccactccgggatccggcggcggcggcggcctccctgcggccctgcctgcgccgtgcagtgccgcccctcgccggcggtcggctcaactccctgtccaccacagtgccgagccggcatccacctcctgcttccaccgccagtttgccacagtgccgcgccggcctcccgtccctggtcgaaggccgccaccgccacctactgaattgtgataatgtgagtgattctcctctccccaatggcccaattcctccccttttcgggaaaaatttctgtctcatgcaaacactttttttatagtctatcacatccaccacttccgaacaaaaaatagattaaaatttacagcttaactcttcgataatttatttttttctatttatatggaccactgtatatgataggctgtcaaagagattctttgcatcccatacaaagaaattttccccttttcgctatctatccattggattgttgaatgttgtattgttaattttaaagatcttagagagtttaagtgatcattaatttgtatagtggctcggggcgtcactttcaccttgcatcccatgcaaagaattttttccccttttcgctatctatccattggattgttgaatgttgtaatgttaattttaaagatcttagagagttaaagtn

SEQ ID NO: 476 - DNA, 719 bp, Zea mays
  misc_feature (1)..(105): n is a, c, g, or t
  misc_feature (706)..(719): n is a, c, g, or t
  Probeset Number=SeqID_14879
nnnnnnnnnnnnnnnnnnnnnnnnnnnnnnnnnnnnnnnnnnnnnnnnnnnnnnnnnnnnnnnnnnnnnnnnnnnnnnnnnnnnnnnnnnnnnnnnnnnnnnnnncggattcgagcgggcgaggtgtgcgcgatcctgggagggcattctccgatcaacaatcacgcgcgggggtggcaaattgagggcaagtccacgccgacgagcaagctactgtgggatctgaggttcaacaagtagagatagctgagcaggagctcattgaagatgtttaggatggattcatctggtaggagatctagaccacgaaggtcgaggggttccagtggtactcctaacatgtttgagggcaccacaacaagcaggagcaggcaagagcagttgcttgcctccctagagcagatgcggggtagcagcggaccctctaatatagaaggggctacttcgcgtgcagctgcttcagtggcacctactgtggaggcggctatggacgaggaggctgaggaagctgtcgcagaactggacgatggagaggagacttcgggagcagacgcttctacataggaggtgaaagggaaatgtgcccttaggccatttctataatgttttggtgattaagtgtccaacacatattaagtgagttgattatgtgccaaacaagcaagaagtgcaaatcatgtaacaaggtacgtttctagacttagtnnnnnnnnnnnnnn

SEQ ID NO: 477 - DNA, 719 bp, Zea mays
  misc_feature (1)..(14): n is a, c, g, or t
  misc_feature (615)..(719): n is a, c, g, or t
  Peptide Sequence Number=SeqID_10720
  Probeset Number=SeqID_14880
nnnnnnnnnnnnnnactaagtctagaaacgtaccttgttacatgatttgcacttcttgcttgtttggcacataatcaactcacttaatatgtgttggacacttaatcaccaaaacattatagaaatggcctaagggcacatttccctttcacctcctatgtagaagcgtctgctcccgaagtctcctctccatcgtccagttctgcgacagcttcctcagcctcctcgtccatagccgcctccacagtaggtgccactgaagcagctgcacgcgaagtagccccttctatattagagggtccgctgctaccccgcatctgctctagggaggcaagcaactgctcttgcctgctcctgcttgttgtggtgccctcaaacatgttaggagtaccactggaacccctcgaccttcgtggtctagatctcctaccagatgaatccatcctaaacatcttcaatgagctcctgctcagctatctctacttgttgaacctcagatcccacagtagcttgctcgtcggcgtggacttgccctcaatttgccacccccgcgcgtgattgttgatcggagaatgccctcccaggatcgcgcacacctcgcccgctcgaatccgnnnnnnnnnnnnnnnnnnnnnnnnnnnnnnnnnnnnnnnnnnnnnnnnnnnnnnnnnnnnnnnnnnnnnnnnnnnnnnnnnnnnnnnnnnnnnnnnnnnnnnnnn

SEQ ID NO: 478 - DNA, 649 bp, Zea mays
  misc_feature (1)..(48): n is a, c, g, or t
  misc_feature (649)..(649): n is a, c, g, or t
  Peptide Sequence Number=SeqID_10721
  Probeset Number=SeqID_14881
nnnnnnnnnnnnnnnnnnnnnnnnnnnnnnnnnnnnnnnnnnnnnnnngcgctcgctgaaacggtgatcgcgtggaagtgggagaaaggcccgggtcgttgccgcgagtgcgccattgacgaggagactcggtcgtgggcgcggaggagggctgctgggcggaaggaagaccgtcgccgagaaccgaggatccgcgcgtgggagaggtgccgcaacctacctactcgcgtactacatcaaccgtgcttcggcgagcgtcacaagggggttcaccggtgcacgctggtcgttccgtggagtgattggagcttggcgcgtcagcaatggctcgtcgcacctctgcgccaccacggatttatgcccttgccgcggacgcgtcagttcacgtcgcaaatcattgcgcgaggacatgtgttcgtgaaaagcaaattggtacctggaatctcaagtgccaggagaagaacaggtggttcaggaggagccacaaggcgaggagtatgatctgatctaggtggcgtttyttagttgacattggcgccgacgatccttagttcgttttacatttattcctttattttgtaataagtcttccgctatgtaataattactctgatgttttatgagatttatctctatacmctctgttatn

SEQ ID NO: 479 - DNA, 649 bp, Zea mays
  misc_feature (1)..(1): n is a, c, g, or t
  misc_feature (602)..(649): n is a, c, g, or t
  Probeset Number=SeqID_14882
nataacagagmgtatagagataaatctcataaaacatcagagtaattattacatagcggaagacttattacaaaataaaggaataaatgtaaaacgaactaaggatcgtcggcgccaatgtcaactaayaaacgccacctagatcagatcatactcctcgccttgtggctcctcctgaaccacctgttcttctcctggcacttgagattccaggtaccaatttgcttttcacgaacacatgtcctcgcgcaatgatttgcgacgtgaactgacgcgtccgcggcaagggcataaatccgtggtggcgcagaggtgcgacgagccattgctgacgcgccaagctccaatcactccacggaacgaccagcgtgcaccggtgaacccccttgtgacgctcgccgaagcacggttgatgtagtacgcgagtaggtaggttgcggcacctctcccacgcgcggatcctcggttctcggcgacggtcttccttccgcccagcagccctcctccgcgcccacgaccgagtctcctcgtcaatggcgcactcgcggcaacgacccgggcctttctcccacttccacgcgatcaccgtttcagcgagcgcnnnnnnnnnnnnnnnnnnnnnnnnnnnnnnnnnnnnnnnnnnnnnnnn

SEQ ID NO: 480 - DNA, 1129 bp, Zea mays
  misc_feature (1129)..(1129): n is a, c, g, or t
  Peptide Sequence Number=SeqID_10722
  Probeset Number=SeqID_14883
aacaaccaactccctcctcccctaatctcttcccactccaaaatgacggactgccaggtggtggccatgaaaaaggcgtacgccaggatcatgctcaacatggcgcaggagtcggcggcgcgggtgctgacggcggagcgtcgagccgtggccctcgcggccagtctcgaggccgccaaggaggacggcgtcgccgcgctcctgcggctcaaggccatcatggaagtcaggataaaagagaaagaactggaatctttggtgcatgttaagatgatcaaggaactagaagagcaattgaatggttcacaaaatgccatggcctctcttaaggttgagctgcagagggcaaatactgaattagagctgacaaggaaaactttagctgatgaaagaatgaatagccttcccacatccaataatgtttattattctaataaaaacgtcagcccttgttctaagatacatccacaaggaggaaatatattgttaaagaataaaaaaaacgctgacaacagtgatgacacttgccttgttctgataaccgaggagaatgaagcagtggacaaattggaggacaaggatcgtcgcagtcctgatctaccatcattcatgaaaagaaataagaaaccaaagttctgtcataatgggtgtacacagcgtatccatgcacttaaacagcagactcaaagtacagatgcattcctgaagcaaaatcagaagcaggccactgcattcaatagccactcaaaggccagaaagaaaaatgctgccaaaaactcatgccacacaaggtccgtcacggagcagatacttcaaacgaaatttcttggtaagttcaagcgcaagagaggtagaagaaacaggcctagctataagcatgataattccagtgagcacggggaagcagaatacaagttatctgatagatctgaatctgacggaaatggctgcttgctgctacttcaggcacttgaacaggatctttcacctccaaagttgtccactgaacatgatggggaggccttaactgacctgaaggaagatttcgaaatgagcgggggggatgctgagttaagtcggtgtactgctttctcggaactggttaatgtacttgcagtcaacagtgtgn

SEQ ID NO: 481 - DNA, 546 bp, Zea mays
  Peptide Sequence Number=SeqID_10723
  Probeset Number=SeqID_14884
gggtgtccaatgatttcaaatccgccgctccggggcgtatcaattccccccaggccccaggcccccaccccacacatgccacgcgtcgctctcgcgcggctgtgtgcggccgtcgacccatccgtctgtctcacggcggactcccagctgcgcgtagcaggtgcaatgcaaggcccgacgtcggatcggagtcggccatgcatgatgcgtcccaggaaaaacaagcgaacctggcaaaaagcgtcgttcgttttggtggtggttggtggtgcggatgatggcgcggtttgaacggtggcgcgtgtctgcctgcagtgtgtcccgcgtgcgtggctgtgcctgtttcgctggcccccgtcttaatctgccacttaatattgtgtgggctgccgttggtggacctgtctgtgcttatgggctttctgtgggctgtcgcccrgtatgcgctgggcctgtttacatatatgtgtgctgggccttcagtagcggtatgcatgggcttcacttaatattgtatgtatggcacttattatgtgcttcttcttc

SEQ ID NO: 482 - DNA, 677 bp, Zea mays
  misc_feature (677)..(677): n is a, c, g, or t
  Probeset Number=SeqID_14885
cttcctcggtctctccgccgcccaccacctccatccccctcctctctttatacgccaccgcggcggggcttcccccatccctctgtccgttcgctgcattgctcccctaaccgttcggccaggagacagcggagagggcagagatggcggccgcgtccttcaccgccgccaagttcctggcgccggtggccgcgagatccggcggagagagggcgcccccgctccccgccggcgcctcgtcctcctccttcgccaggaccctgcgccgcggcgcggtgcaccacccgcgcctgcgcaccgcgctcgccgtctcctccgacctgctcgctgggaacaaggccgcgcaggccgccgccgcgcatccggtatggaataccttttctacgttgctctctcctgttacttcagagagaaaaaaagcgatcttgggtgccgacgcagtgtaaaaacccgatcttgggcgctctttacagtttaactgtgctgcgcgtttggatctcacgagtctgaaattccgatgagtgatatggtttctagtttaacgacgatttggctggttgcatcccacagtagtactttgtagtcgcaattcgggatgcataagcgtaaatctcacaaaactttacctcccagctttggaatgaaaggtgaaaggatatcgtggcctcctgaatttn

SEQ ID NO: 483 - DNA, 265 bp, Zea mays
  Peptide Sequence Number=SeqID_10724
  Probeset Number=SeqID_14886
gataaaattcttttatttttattattatatattttttaagacagggtctcactctgttgcccaggctggagtgcagtggcacagtcacagcccactgcagccccgaactcctgggctcaagcaatcctcctgcctcggcccccccaggtagctggaaccacaggtatgcaccaccacaccatgcaccacctccagccaatttttgtatttttttgccgagatggggggtctttccgtgttgcccaggctggtctcgaactcccga

SEQ ID NO: 484 - DNA, 718 bp, Zea mays
  Peptide Sequence Number=SeqID_10725
  Probeset Number=SeqID_14887
gttcaactttacagaccacagttagggacaacattgttcatatacaaaactgagatattgaagtctgagaaacaattagtgaaaacattattcacatagaaatttgaggtgttgaaggaaactgagaagaaattaggaattccaaagaaaactaaaaagaaagtaaagaattcctgatgaagatttgcattaaagaacacatataatttctacggaagctttccactgaagaaaaaaggtttttgctgctgaaataaaaggagggcgtagacgaccaatgttgaacaagttcatgatgttatcacaattaatatatatctattacctattgtctaccttagtttcagtcccctaccttatgtaacgtaagttgactaacgatattgacactcattttatgttacaacggcgttggtggtcgaaactggagatggatgggacgccggctcgttgcgatcacgtcgcgatggatgaacggaagaatcaatggggatggatggaaccaatctgctcggcacgcctaaatttataagggtagaagtagaaccaactaaccagcctgtccgtccgacgcggagtctgcattttccagcccaacaaaatcctggttcgatggctagtgacgtgtcaaatgtactccctatgcataaacacatctctcctacgttgctgttgtgctagataaatctacacgcaatggctaaactagcatttagcc

SEQ ID NO: 485 - DNA, 1278 bp, Zea mays
  misc_feature (1278)..(1278): n is a, c, g, or t
  Probeset Number=SeqID_14888
accaaagcgaatgccatctttcctccgaagagcaaccgagagcaaaccactcgcccgtccgttcccgcgccccgatccagctccagctcgcgcacgacgtcgtcggcaagtccgttcccgtgcctctatatccatctcgccgcacgacgccgccaagcatgtgcaaggtggcgatcacgatcccgtccctcgtgtggctgtgccgcgccgtgcggcggtggcggtcccgcggccgcgccgcggacgcctcccgctccaccaccaccacctccttctcctccccccgcccctgcacgtcggtgccggcggggcacgtggctgtgtgcgtggaggccgccgccgcggccgggtccggctccaccaggcggttcgtggtgcgggtggcgcacctcagccacccgtcgttccgggagctgctgcgacaggcggaggaagagtacggcttcccggcggcgcccgggcccatcgcgctcccctgcgacgaggaccacttccgcgacgtcctccaccgcgtgtccacgtcggccgcctcctcctcctcctgctcctgctgcggcctcgccacgcggcggtgcgcgcgcggcgagtcggggccgctgctgcagggacgaataatggccgtggatcagaagctgggctggtgattgattcattcgcccgttggcatccgcgcccgctgcctgaacggatcgagcctgcgtgcatatgagtgacaymcccgatcggtgagggcgacgggtttctacaagacttgcaagttgcaggtacgagctcgcgtgcaagtgctcagctgcggccattgcacagcgcrakccgcgagcggaagggacaaaagcatcttgcccggctggcgcggcmrakaagaccgttcacgcaggcacaggccaggaggaagagtagcaaagcaagcgccacactykccgcgmgcatcccgtgcagcgtgcgcaggagaagcacagcagcacgaccccgggcattgacgcattgttaacggcagatagctacatggatttagttaagaaagcctataaattttagtgcgagttgaaaggcggttcctcgtgattttggccccatgattttcgatacgcattactagtatttctcatgtatacattaagtagctcgatcaactgtgcacatgcgcatttacagctttgctaggatagataaagaattagtccctgtaatgcagcaaaaaaaaatatcgtggcttgccatgcatgtgttcatgacaatcgaccatgtcagatgagattagtaaaaataatgaatttn

SEQ ID NO: 486 - DNA, 715 bp, Zea mays
  misc_feature (1)..(114): n is a, c, g, or t
  misc_feature (715)..(715): n is a, c, g, or t
  Peptide Sequence Number=SeqID_10726
  Probeset Number=SeqID_14889
nnnnnnnnnnnnnnnnnnnnnnnnnnnnnnnnnnnnnnnnnnnnnnnnnnnnnnnnnnnnnnnnnnnnnnnnnnnnnnnnnnnnnnnnnnnnnnnnnnnnnnnnnnnnnnnnnntcccaaaaccacctctctcctctggctatgcccatgtcgcctctccctcaccaaaaccgctcgcccagccgcccatgacgctccagatcagcaccttgctgctcgccctcgtcttcctgtagctgctcgtcgtgccgccagatcgacgtctgctcgctgctgccgtgtagactatgatccattccgagcttcgaggaatcgacgatcaagcttcggcgaccaagagatcaaactcttcaagttctacaaggctgaagaccctgagcatatgtttggtgaaggttgcccttggtgcaatctatgctcaggtaaagaagaaggtgtcgaggtggatctccaggagttccaggacttcgacgagttcgaggattaggcttgcaacctcccccagtcagctgcctgtggtgggttgtttacgatggctacgtttcgattctgtgtactttgatttatattatgtaaatggctctagtttgtaatattattacttactctttattgtaattcgaagcattgtgttatgatgagtcatttatgtaatcgttgtgtacatgaatttctgatcatggcacgtacatggttcacattcggtttaccttcn

SEQ ID NO: 487 - DNA, 1044 bp, Zea mays
  misc_feature (1044)..(1044): n is a, c, g, or t
  Probeset Number=SeqID_14890
gcctaactttcgtttacttcgatccgccagtttgtgctttccacccctcggcattcggctgtttcttgctttgccgcaagtcagatcaatctgtggccgggagttgttgtgttttgtcctgttcttgcccggagacggagacgggagacatggccgcggcgaacggagctgccgctgccgctgccgctgcggggctgttcagcgaggaggagctgcgggaggtgagcggggtgcgctggggggaggacttcgtcgaggtgacgtgcggatgcaccagccaccgctacggcgacgccgtaggccggcttcgcgtctgcgcgtctggcgacctggagatcaactgcgagtgtacgcccggctgccgcgaagacaagctgacaccggctgcctttgagaagcactccggaaaggagacagctgggaagtggaggaacgccgtctgggtgatggttgagggagaaaaggtacccttgtccaagacggctctgctcaaatactactacctggcgcgcaaatccggcagcggcggcggcggcggcggctgcggtcgtcgtaatggacggccgtctcactctcaccgcgacgagttcgtctgctgcacgagatgtggcaagggtaggaggtttcggctccggtccaaagaagagtgccgtgcttaccatgacgcccttgccaaagctcactggacatgcacggatttgacaactgatagggtcagctgtgccgacgaaraggagcgcgcaagccgcaaggtcctgcggggctgctcccgcgcaccgtcgtgcaccggctgcatgaagtgcgtytgcttcgggtgcgagacctgccgcttcgtggactgcgactgccagacctgcgtcgacttctaccgcaactcatcaaaggaatagtaggataggattaggaggagggtctataaaacaccmccggttccattatattggccaagacggcaagaaggtcgtcaatgcaattgcaccatcaggctgctattctattttaaacattttccattagcctagtattttccgtgtctgagtgctn

SEQ ID NO: 488 - DNA, 1413 bp, Zea mays
  misc_feature (1)..(1): n is a, c, g, or t
  Peptide Sequence Number=SeqID_10727
  Probeset Number=SeqID_14891
ngaagaaaatatcttatctgatgaaaagtgggagactctggtgagtctgttctctttgagtctgctaaagaaaatatgttgtcttatattatatttatgtttgtgtacttcaattctcagcttcggcgacacattgaaaaggattgctgcgtgcgcatgatgaaggataaatctgatgctttcttcctcagccagctgcggtcgtatcgatatcttcaggaagccattattttcatcgactgttcgggtgccagcatgtgtgaggtgcagaaagtggaagcagcttatagacatgcagccgaggttcatcctaaccatccaagtattgaacttatcagaacaaacaccgacggaatggcctcctcctcatccgaccatcccaacacagaggttcgtcctagctgcttggaattttcttttttcagtaattaatggaaaccttagctttgacggtataacttaccaccaacgcttatttttcgttcccaaactccagcccaggaattgatgactcggtttgttagatccttccaacccagcagcaggtacgtgtgcatgtcgatgatctacactcttaaattaattttattactctatccagttatcacgttccaatgccatgtgtaagttttagtacctgcttatttttcgcttgcaattgttgcatcttcaactcttgcttctaacctccattatttgtttgtccacttcaccaagagacagacaatcatagctctaacctccatgaagcctaaacctccaaactccttgggtctgtttagggcctcccaccttgtcatgtgatacttccttttcttgctagttccacaaaaagagatctgactgagtctagcatctagaaattctcctcatacaagtgatagtcccccactgtgttcataggaatgcttgacaggctggattcaattacagtagatttctttccagaagatagatgtccacactgccaagtacccaacctcttctgagtcttgtcacttacttatttcatctgtgctttagtcactcataggaatcttcaaatatttgataggaaaaatttccaccttgcaatgaagaagtttagatatcctctctttctcctgatcctcagccccaacaacagaaacttaacacttctcaaagttgattttcatccttgattttcacctctctcaccactcaaatcaatagctacagtgtcccactgaactgcttgtctggtccaacctcgacgagcgccttgaggagcgggttgttgagggccgaagcatccatgggccgatgtcgatctgctgctctgccctggcggcgtgtgcttcctggaggtggacgacacgaggctttctatctgtttttttttccctttttggaatgttttcgattaggatgttctaggtaatggtctcgtgc

SEQ ID NO: 489 - DNA, 663 bp, Zea mays
  Peptide Sequence Number=SeqID_10728
  Probeset Number=SeqID_14892
cgagagaaatcattaattcaagtaaatttcacaattgtccatgtaatttggtgcaaggtaagtagcgcctaataacctacctacccatgaaggcgtctgaaaacacaagaatgactgtctttaacagtgcacaatcaagcatcctggtagtactgcaagaagtagctaatgagagggaccttcaacgcttggctggggctgtagcactccaggatttgcttctaagggcgcttaagtgtgggcgggtccatgctgctccccttcggcggctgctgcgccgacatcgaaggggacgacgactgtagaacctgattggattcgcttgttcagattcaaacatgaggatgttgcatgtagaaggcattttgctggacgccgatgatgccctccgtgagccggcgctccttagcatgggggcgacgcgacgccctaactaacacgaggcgcaagcgcggtgcgggtccaggcaagcttgaccgccggccctgggcggagaggtgggtcggcggcggcataaacggacagcggaggaagaggaggcagaggtgcggcacaagggaggtggcggacaagagacggctgagggggagaggtaggctagacagcacgtgagagaccgagagggagaggaacagggacggctactaggctcgtagctgattt

SEQ ID NO: 490 - DNA, 859 bp, Zea mays
  misc_feature (849)..(859): n is a, c, g, or t
  Probeset Number=SeqID_14893
aacgacaccatagccctcctagtcccggcaccacactcccgctcccgcactcctcgtacgtagcgtcacggccgtacgtagaggcgctagcacgtcagagagcgccactggttctgttctgaccgatcggcatggccgggagcgcgaggtcggcggccgcgaagcacgcgtaccggatgttcgcgccgccgtccatgggcgccagcgccggcgccggcgcgggcgttggcggcgcggaggagctcgacgaggcggacgtctggggctcgttcggcgcggcctgccactccagcgccgtgtcgtccgacgacctggccggcgccgccggctgggcgcgcccggtccacggcccccgcgcggggcggaagaagcccgtggacggcggcggcgcggtggggtcgctgccgatgaacataccggactggcagaagatcctcggggtcgagtaccgcgaccaccaccacgcgggcgagtgggaggccgacgcgaacgacggcggcggcggcggcagctacggcggggcggagatggtgccsccgcacgagctggcgtggcgcagccgcgcggcgtcgctgtccgtgcacgagggggtcgggcggacgctcaaggggcgcgacctcagccgggtaagggacsccgtytggaagaggaccggcttcgaggactgagcccatgctgtcatgctgatcccccgccgcgccgcccgccggctcgctcgccggtttgccgccggtatgtgtagtgtaggttagaaaatgagcagcgctgctgattgcttatctattgagttccttttatttttttttaaaaaaaagtcgggscagggtattagtaagctctctctttttnnnnnnnnnnn

SEQ ID NO: 491 - DNA, 663 bp, Zea mays
  misc_feature (1)..(1): n is a, c, g, or t
  Peptide Sequence Number=SeqID_10729
  Probeset Number=SeqID_14894
ngtaatccgtcactttatagatcctgagcctcatagacaattttatcttccttcacatgtaatcctaatactcagattctctacacagccagattctctcccagctagattctcgaaaaagctgatcagaaaaaagctaaaccaaacaggccgtgtcgagctcagaggcactgcacgccagcgacacgttagccatgtgagtgaccaacggcctctcccggggacgggcaggttgggaggacgagcaaacgacgtgaggcgtcgggcgtcgtgggtgcagcggtgcgaacggaccgcggactggactcggtccaaagtccaaacacacgtacgtacacggtacacggtcccgtctggaggccggagcttcacatcgctggccggcctcccgcgaccgagaagattcgcgccgagatgtcgcggccgtgcttcacatcactggcccgcccgctcgttccccggtatcggaactttgtccacctctgcgctgctggcctcctgctgctcctctccctcctgcagcgttgccgtccacaggaacaggacgggacgggttgagaaaatttcagcgaaaccatcggcggattacataagacgacagccaccggtcgttgcgtcttgctcatcagaacgctagctaggactaggagaagcttaacctct

SEQ ID NO: 492 - DNA, 664 bp, Zea mays
  Probeset Number=SeqID_14895
aaagcaagccaagttactaagaaagagaagatcgtagaagtgtgcttacattatagataatgtcacacccgaatttaaaatataaagtcgggtgtgtttcatatgtgcgctaaaaaagaataacacatataatgaccaagtgtatagagataaatgtcataatcattattacatagcggaagagtcttacaaaaataaatgataacaataaagcaaactaaataattattccttggcgctatcaagctgactgggagacgccacctagattagctcgtactcctcgttgtaggcctcctcctggaccacctgttcttttccttccacgagctcctgctcagcgatctccacctgctgaacacctgggtcctcagtggcttgctcgtcgattggaatggcgacgacgaggaatgaatccacagcgacgctggctctccggcgagcaattcgtcacgcaccggcgcgccctacagcctgcggagacgccccgcacgattctggggacgcggtggagatctcaggcacccttccccggtgattgccgacgatggtacgcgcggtcacgacggtggcggatgtctccctcgcacacggtcaaatgcggcactagctacggcataggcgcgatttttcgattaggatgttctaggtaatggtctcgtgc

SEQ ID NO: 493 - DNA, 1039 bp, Zea mays
  misc_feature (1039)..(1039): n is a, c, g, or t
  Peptide Sequence Number=SeqID_10730
  Probeset Number=SeqID_14896
aactggcgtgctgcgtgtgcaggatctcgcgagggagatccgggagttcaggaggccgacggacggcgagacgaggatgttctacgagatcgtggtggcgcctgggtacacggcggagggcctggaagtgctgaaagggaagtcgaagacgctgaggatactggaggcgaagcggaggaggagcgggaagggcacgctgctgtcgctgcggcaggtcggcggcggctggctggcccaggagcccgacgacgtgaccccggaggacgtggccttcacgaacgtgtccgagagggctcccgacgcccgtgagctctcggacgccaagttcgcgtgcctctgcgtcaagcacgtgaagagcaacgccattgtgatcgccaagaacagttgcatgctgggcatgggcagtggccagccgaaccggctggagagcctgaggatcgctttcaggaaggcaggggaggaggccaagggagctgctttggccagcgacgccttcttcccgttcgcttggaacgacgcggtggaakgaggcgtgccarcgcggcgtggcggtgatcgcaragcccggcggcagcatccgggaccaggacgccgtggagtgctgcaacaagtacggggtggccctcgtcttcaccggcgtccggcacttcaggcactgatcgacggcgagggtggcaccggagaccgtcacggacgatgggggagggagggacctatagttgcttcgacctgggccggtggctggaaggaaggtctgccgtttcatcccagcgctgatgcccgctggcgtttgttggctagggagactctgatgatgctgaagcaaccaaatgtcgcctcctctagtctggagaggatgggtcggtgggtcccggtttgtatatataacgtcgtcagcctggcaagaggttgattgagcttagtgactcttgcggtggatgggaatcggaaacggtcgctgacccggcgggaccgcacagtctgttgcttggctacatgccgtgttattattattaataatatttattgctgtcacgtn

SEQ ID NO: 494 - DNA, 597 bp, Zea mays
  Peptide Sequence Number=SeqID_10864
  Probeset Number=SeqID_14897
gattaggtgctctaatcgggtcgaatgtgctaatggagcacccacccacctywctctcacctgtctcgtcgtcatttcctcctaaaatccccaagcctccaatccactgaactaaaccctagacatggcgggtagagactactgccggttgccggtgcgcccgcgcgacttctgaggccccgcccccgtcccggcgtcgccggaactggctccactgtcccccccatcactgggactgggagagtgggagttcagagccgcagacgctggggcgccgggtcaccggaaggccgggaaggaaggtgtggccgcaagacgcaggcaggaggcatcgactcgactcaccatgtctcagtcaccgggaggacgggaaggcatgtttagcacgacgttgatcgttgccgttgccagtgtttcttcgatttttcttcttctcttttctagatcgtagagctttgacaaatgcagaagcgtagatcacgattggctcgaggtctccggtctcgggaacacccaatactagwyktaccctggctccgacagatgcgcgcgaccgataatccgtttctcgtctctgtttcgtctagaagctgttgc

SEQ ID NO: 495 - DNA, 914 bp, Zea mays
  misc_feature (914)..(914): n is a, c, g, or t
  Probeset Number=SeqID_14898
ctcacatccttcgtctcctcccctccccctccgaatcctccgtcgccaccacggcttccgtccgtgtgccgctgccccactgttgtcgcgtcctcccccccactagcttccttatctggatctgaggagacgtatttcctgtttggatcctctatcgattccccgtcgctgcctccgccgccaccgctgaggagggtcacggtggccgggtcctggacttgttgggcctcagagaggcgatgctccccgccacgtacaaggtcgaagtgagatcagttagacgccaaagcaggagctgagtatcctccgccggttcctcgtcgctacctccgccgccaccgctctgaggaggggcatgatggccggatatccgtggggcctctgtgaggcgatcctcgccgccacgcataagggcgaagcgagatcagttaggcgtcgaagcaggaggagccgcagccacacgccatcagggaccaactgcatttcgtctcctgctgcctcaccaacccgccccatggcgtacgcccttccttccctgtctcctctgcctactgttctcatcgccgccgcctacatccgtcgcttcttggatctttgttgtgggctcgtgactcacgacgcctgctaccggcacggtcagtgctggcgcaacgtctacgacaccatatcctaggcccagaggctctacctcaacggatggtccgtgttccacaccatccacctggtgcgtgatggccaccaggacatggcactcggcgacctgctcaggaggaagtcgcaggacggcgtgcaggtgttgttgctcgtggggacgatcccacgtcctggagcactttagcatcaagatggtaccaggcatatggttcaccgggtggctccaaatggttggctcacaaggattttgtttcatttcn

SEQ ID NO: 496 - DNA, 667 bp, Zea mays
  Peptide Sequence Number=SeqID_10865
  Probeset Number=SeqID_14899
aacagaacttccaaatttcattgatttcaacttccagcttaatctgcctctattgctcatcaaatttgtcgctgtaatgcagctcagcaaaacgatcagaatgcttgtttaccccaagcatttgcagctccagaaaaaaaaaaaacatatgaacacccagaaccagtgtccctccacatggttagaacaggttgtttagcatgaatggtgccatggacaaattcaagaatgaccataagatccatcaccatattcacaaagctaagcgcagacgcagccttcacagttgagttccatcactccgtttctcttcttttctgaaaggtgttccctccctgaacattctgttggatgaggtgttcatttgcattcgaatttcagaaaagacatggtatgttcctaattgatggcgatgtgccaatgtggttcatccttgcctccagcgggcagcggaacgccaagccgccaatgccagtcgaggctgcccgctgcaccgcacagcgcgcgctacgtgctgccacgcgcgcgggagcggctgtacgcctgcggcaccaccccatttgtttgcaccgcttgttgtccctagatttagccgaactggcgctaggatttcatggcgggaatgtggaggcaagaagcagccgagggaagaggaatgacgacacgc

SEQ ID NO: 497 - DNA, 671 bp, Zea mays
  misc_feature (671)..(671): n is a, c, g, or t
  Probeset Number=SeqID_14900
aataagctcgtctgctccaatctagatatcagtattttgaggcccaacccatctaaacaaaaacctaacctagcgcctagtggcttgctggcgcgtcctctcctctcctgctcacacgccgccgccatccctagctccctgcaaggctgcaaacgccgctctctccagtccacacgctggcacgctgcaaattgctcaaagcttgcgtattctctaaacgcgactgagaagagcgatgttaacagcttcggtgtcgtactgctagttgcttacaggacgtagcccaactgatcaacagtttggcggtgaaaaggacatgtctcctgggtttcaatccatttggcagagaaagaccctgcttctgttcttgacccaaaagtaagcaatgatgcatcagatcacatgatgaaggcgttgcatattgctattctttgtaccactcagcttccatctgaacggccgacgatgagagagatcgtgaaaatactcaccgacattgatcggttgatcctagctccaaagctatgagggcaaagaacaagactgataagtaacagcgacaggctttgtcttagtaagatataccaataataatcataatgtcttagtaagacttatgtgctacattaaactatgtgtgttctggatttgcatggcttttatctatgttn

SEQ ID NO: 498 - DNA, 938 bp, Zea mays
  misc_feature (937)..(938): n is a, c, g, or t
  Peptide Sequence Number=SeqID_10866
  Probeset Number=SeqID_14901
aatcatcaagtcccctatcacaggggttttcggtgacctcgtccgctccgggccggactcctcgttacaggaaggaccgcccctagcgtggatgtctaccaagggcaactcgtatttcatcctcggcgatgccgaggagcaggagatctgggccgagttcagggcgctgggccatgatctcatgacgaggtcgatgtccaagtccatcttcctccaccgcgaacggggtgtctgggaagcgctgcagcgccaccggaccatgctgcttcggtcgaacgagcatttagcatggaggagcactgaagtggctgacctaacgtcctggtgtgaggggctgaaggaggagggcacgacagactatgaggaggtccatcgacgtagggctaaggtcctcggtctgaaggcggaggcggactgccacaagggggtgctgcggcatgcgcaggagggcctccaggcggtgatgatggagcgtgactccctcaccaaatccctagaggatgaacagtccgagtgctgggctctaaacacccggataggatatcttgagaaggatctggaggccacaccccggaccgtggagcaacaagggaccgagctgagggaggtgtccgaggcggtggcagacctcttctaggacctcgacgtggtgggcgtgcctcggggtggacccctcggcctcgtatgcaagccctgagtgacttcgtacggggtgagctccgcgaggccgtccacctcggggtgaagcgggccctggccatggtcgcctcacactacgagatcgacctcgagtggatgtgctgttagaaaatattgtcatgtgatcaaccctctcccctgacagttttctcccaagggacacaccctttgggagacactgtatccacatgtatataaatcagaatctctgcaataaagatatacaactgtcatttgnn

SEQ ID NO: 499 - DNA, 637 bp, Zea mays
  misc_feature (1)..(1): n is a, c, g, or t
  Peptide Sequence Number=SeqID_10867
  Probeset Number=SeqID_14902
ngaaagttattttgtaatttattattgattttttataatccttttatattatagaacagatagataaatttggcctatccgttgaaaaaaatccggcacctccatcaaatcagatctcacgcccctgcagccaaaacaaaatcagcatccggatctccacattccccaccaaaaatcatcctccggacgaaatcagcggcggcggayatgggagcggagtgccggtatgaggtggcgcaggcggcgtacatcaagctggcgctgcacgcactgaagcacccggcgaccgccgtcaacggcctcctcgtcggtcgcctcgtcgagccttcgtcctcaccggccgtcgtctcggtcattgacgccgtgccgctttctcaccacccgcaccatctgccgctgctccccacgctcgagctcgcgctcaccctcgtcgaggaccacttcgcaacccagggcgaaggcctcgccgtcgtcgggtactatcacgccaacccgcgctgcgacgacaccgagctcccgccagtcgccaagcgcgtcggagaccacatcttccgatacttcccccgctccgcggtgttgttggtgagctacgtttctttcgttattttgatctccagtctgcgcggatgcagatctc

SEQ ID NO: 500 - DNA, 636 bp, Zea mays
  Peptide Sequence Number=SeqID_10868
  Probeset Number=SeqID_14903
actcccgtgagagccagtgtcactaccgctactgtggtttccggtgaggtctctcctctcttccttccggatctcctctttcttcattctccatttccctcaaggtgcagaacgaggccctgccggaaccaccgcgggcttgtacctcttcgccttctccatggatgcatcagctccggtgggcgccgcgggggcagaggcaggggcaaggtcgctggacacctaaatcgtgccaccgccgttggcttggaggagggggcagtgacgaccgggtagtacgccgcggtggcaggtaccgcgggtcccgccgcggcccgcgtcggctggagcttgcgccggcgcttgggggctaattcctgctgctcgtcactggcgtcctcggatgccggctcggcggggaggcggaggatgccgtcggtgcccgtgatggcgatcgcggggaccgtgccagtgcccgtggcagcgatgatggatggctctgactcctgcagctgtctgccttgttgattgagcaagaggaagacatgtgtaggcatgaagaaaagtagcaggattcctgtacagttgtttcaatgaaactccagtgagcgctacatgtccaaacacttgtttcaatgaaactcccaggattcctgt

SEQ ID NO: 501 - DNA, 636 bp, Zea mays
  Peptide Sequence Number=SeqID_10869
  Probeset Number=SeqID_14904
acaggaatcctgggagtttcattgaaacaagtgtttggacatgtagcgctcactggagtttcattgaaacaactgtacaggaatcctgctacttttcttcatgcctacacatgtcttcctcttgctcaatcaacaaggcagacagctgcaggagtcagagccatccatcatcgctgccacgggcactggcacggtccccgcgatcgccatcacgggcaccgacggcatcctccgcctccccgccgagccggcatccgaggacgccagtgacgagcagcaggaattagcccccaagcgccggcgcaagctccagccgacgcgggccgcggcgggacccgcggtacctgccaccgcggcgtactacccggtcgtcactgccccctcctccaagccaacggcggtggcacgatttaggtgtccagcgaccttgcccctgcctctgcccccgcggcgcccaccggagctgatgcatccatggagaaggcgaagaggtacaagcccgcggtggttccggcagggcctcgttctgcaccttgagggaaatggagaatgaagaaagaggagatccggaaggaagagaggagagacctcaccggaaaccacagtagcggtagtgacactggctctcacgggagt

SEQ ID NO: 502 - DNA, 669 bp, Zea mays
  Peptide Sequence Number=SeqID_10870
  Probeset Number=SeqID_14905
acacatagacgctgagcccgccgcctcactcacgtccgctggcctccgccgccgtggacgccgacaccaccatccacttctgggcacacccctccctcctccagcgccacttgaacctgctgcgcgacgtcctcggttgctggaagtggtgctgctgagccgacgtggcagtgggctgtgcaggcggacctgctgtagcgccacttcaacctcctccgcgacgtcctaggttcgtcgccgccgacgccatcagagaggaggccaacgagctggtgcgcatcggcagcgtaaagcgcgcgctgcgctccaagtccggccgcgcgcccgcacagttctcgcgctcgcacttgacgggccactcgctcgcagcgtccgccaccaccggtaccggcggcggcgccagcacggagaggttcacgctgcgtctgcccgaacacatgcaccttcagtcttggcttagatttggtacctccatgatttcaaatttagatagtgcaattttgttctcagcatagtgcaatctactgggaatttgcaacaccagttaataatggcatgattatggcaacactgcccttagcttttcaggttagtaaaatttcttgattcagtagcacatgttgatagtacaacaacatgattcagaatttattactgttgccactggcc

SEQ ID NO: 503 - DNA, 567 bp, Zea mays
  Peptide Sequence Number=SeqID_10871
  Probeset Number=SeqID_14906
cattccgggtagtcggccacgctccactgctgtcgctggcatggaagcggtgacgtagattctcgacgcgatggcgcatatggagctccacttgatcggtgcgctggcgggcggtggtggcgagcaaggccctgcatcctcctctgccaccatcacttcctctgccaccgcgccacggtacgagtacgacgatgaggtcttcggctcttcggcggccccagcatacgacgacgacctgcttggtgccggccccttcctcaaccccgtgacccccccagacgcatgctaaggtggacaagccatcccgcgacgagatcgacaaggtgtaccagcttggggacaagccggttttcaaggccgggggaatgtcagcaacatgctagggaagagacggtgatgtccagcaaggagcagcagcagaccaggaaaggtgaaagcacgcaccaaggctgaggcgtgggctgtgtaaacgagtggccgtgtgttggcttcaccgtgaagggtatttgagtcttgagtctgtacgaactgggtatcgaaaaatcagaatacaaaccaattatcgtc

SEQ ID NO: 504 - DNA, 770 bp, Zea mays
  misc_feature (770)..(770): n is a, c, g, or t
  Probeset Number=SeqID_14907
accaacccgataggatttcgcgaagcgtccatcaccaactggataggttccattgccagcgcgctctggctgctgccgtaaagctctactctagaactgcaactcgagctggagaagcatggagaggcagcgggagcaggcacagagggtatatcaccggtgactccgagcgtgtgccgccaccgcggggcgtggagggcgcagcaccggtggctctacgtgttgccactgtcgcccatggcgttcgtcgcttcgccaccactcgtcgttcgtacacccctgtcggtggtaacactctatctcccggtgctcccgccctccgtccgtagcgccgcgcagcatcgataggtgcggcaacggcaggtcaaggcgaaggcggaggcctggacgtgagccacgaaggagtgtgccacgttcgcgctttgcgaccttgccaaaggaccacaccgactcactttgccccggcgtcgatgccgccgagtctgccgcaggggaacatattggctgcggtgttgggcattgctgcagcatgagaacgtgacaaaggagaacatccaggcggtgagccgtatcctagagattattgccatggaggtttttgctagatatggatggaaatataataatagacttcgtccctcgtaatgtactttgttcctgagagatcagccaatagatgaaacaatgtaataatacgctgtatgcggctccgcagaggcaggaatcagtttcctttatctaaaaaagtagagaagtgacaagcataactn

SEQ ID NO: 505 - DNA, 728 bp, Zea mays
  Peptide Sequence Number=SeqID_10872
  Probeset Number=SeqID_14908
aaaacatatgtatcctagtattgtattagcaagttcaaacaaaacaaaatgggaggaagggaattgagacgagatccacacatacctagaggttggagttgccactacctccgatgtcagtaggaatcgatgtcatcgtcgtggtgcactcaaacccgaacaaagggaagtgcatgagaagaaggggatggagaggatataggtggcagaccacatacctatctcaagtcataaagcgcaagagggggcgactgactttgcctcggcgacctcaacctcctctacaaccagtgcggtgatagagagcgggtgctgtcgcatgatctaccccacaacaccgtccactcaactgaaggccatgacgtccaactcggtccccattcttcgaccaatgacaacccctcctcgctcgcgtcacgacagctcacgcgcggagcaactgccaccctagctagttatggcgcacgtgccacccgtggcgtcggcaccggcctgagcaatcccctgccagtggctgggcctaggtaggtttgtgggagaacggcgatgcaaccatagacggtctagggtttgggggcaggaatgtatgagaatggcataacagggaatcatagaacatggaatttcagcctactccttgcagccttaataagtactatggatggatttgccttggtgcataaaagtcatgtcttgggtctgtttgaggatgtttgaggggattcgag

SEQ ID NO: 506 - DNA, 583 bp, Zea mays
  Probeset Number=SeqID_14909
ctaaaacaattaggacaaatgagagccgtgtagaacaaaagaggccacgtattgagctagatatgaatgatatagttgcagatcctggtcttagaaaaccaattgatgagttcccccatgaaatcagagatgatgctaaaagagcttatttacaaatgggcccatgtcaaccatttggtcatacatttccacggacaccggaaattgaagatgaaaagattttgaagcattttcaaggcttaagaactcggaagataaatttacctcgcagcatcaactcatgaacggtttcgaattggttcataaacgcgagggttcgtctgtggaagccgttgatcgaggagatgtaccaggaccttaagaggagctcgggtgcaggaggaggagggcacggtccggcgatggagccgcagcagcacttgagcaaacgttgaatttgcgagctggaagatggtggccagtgaaccatccagctccatagttgcctgctgtcgatttaccattggcccttgtagtttccgtgtgctatgtttttgtacatatcattgccaactccagcatttaacatctgcacatcttttag

SEQ ID NO: 507 - DNA, 865 bp, Zea mays
  misc_feature (829)..(865): n is a, c, g, or t
  Peptide Sequence Number=SeqID_10873
  Probeset Number=SeqID_14910
atcgcagcccctcggtcactcgcaagcacgcggcagccgccgcaaccagtcagccactgtgtcgtcgctcgccgtccgagacgtgcaaatccatcgatggtgcgccacactcctcctcgaccttgagtcctcgacacacggtagctcgggccatcggcgcaggtgaccgcacaggtcgcatcgccgcaggctgtcggcccgaccgggaccaacgacatccagggctccagctccaggtgtcgctgtgctagacgcccagagtctcggaccgatggttgtgctgctcatgcaagtagcaagcctgactaggactggcagttgtcctcgtccaagcaccagtcctctacaatctgtacagcacgggagtggcagtcagagaaggtgctcatgaaaggatacaaacctgtagaatatgatcctctttggtttctgtccagttgccctccagaaagatatgagaagctccctgcacaaccaacaaaagttatgcatctagaggaatccaaataaccaagtcagtttgttgcttttgcaaatctattgccmcgacaagacaaatgttaatatgaagaaaaaatgggatgttcaacactccaacttaggcatttggatatggagtgcatggtggccagaacatttcagagcaaattttttacatagtggacatttttaccactatcttgtaagagtactgtcaagaaacaacactaagttgcagattaatttytacaacagccatcaggttatttgatttgaaatgcaccatagaggatggaaggatcgaggaaaggctatttgatttttatggcctgaatgtttcatcttatannnnnnnnnnnnnnnnnnnnnnnnnnnnnnnnnnnnn

SEQ ID NO: 508 - DNA, 812 bp, Zea mays
  misc_feature (812)..(812): n is a, c, g, or t
  Probeset Number=SeqID_14911
aaccgtcatactctccagcctgctaaacaagctagctagccgccatcaccaatccacaagctagcagtgatgggttgtgcggaggagatcaatctggccgaaccgtggcgggatccttcggcgtgcgtgaacaaaaatttggagagccaccgggactagtagactggcgggcatcgcatcgaccgccggggttggccaccaccgtgaggcacccgattgctgcaacctgttccgtctcgtcgtccattgaagcgtgaggtcacgagtcacctgaatatcatcctggtacctggaatctcaagtcccaggagaagaacaagtggttcaagaggagccacatcgaggagttcgattcgatctaggtggcgtctcccagttgactttcttgcgccaaggacgatccttagttggttttatatttatcctttattttgtttatgcatccgggggttctagctggattatcgacagcagatgcacaaaccacatgatgggggagaagaagatgttcacctcctacatcaagaacaaggattcccaggatacgatcatctttggagatgggaaccaaggcaaggtcaaaggcttgggcaagatagccatcactaacgagcactcaatattgaatgtatttctagtagagtcgcttgggtacaaccttctgtctgtaagtcaattgtgtcacatgggttacaattgtctatttacaaatgttgatgtatctatctttagaaggagtgatggttcattagcttttaagggtgtattatacgacaaactctacttagttgattttttgaaagagaatgccn

SEQ ID NO: 509 - DNA, 837 bp, Zea mays
  misc_feature (837)..(837): n is a, c, g, or t
  Peptide Sequence Number=SeqID_10874
  Probeset Number=SeqID_14912
atagctggtcccgacctcactcctcagcatgttcgtgaacaaggacaagggcgtcgccatcgcccgatgctgtcgtcgctcttgttcctgggcacctggccggtcgtgctcacgctgctggagcgccgaggccggctgccgcagcacatgtacctggactactccttcaccaacctcctcggcaccgtgctcgtcgcgctcatcttcgcccagcttggaggcaccaagcacagcatgcctaacttcttcacgcagttcagccagcaggacaactggccttctgtgttgttcgcgatggcaggcagtgtcgtgcacagcgacgtctgttgagatggttgcttgcataggtatagaggcaatctcgaggttgttattcttcaatgtttcaaatagtatgacttctgaagctacacaggctctatggagacacacatctataagtgaatggtgtttcatcaatgagggttcaatcaattgaagtagcagaggtgacggctagcggtggcatctttgtgcaatytgatggagagcatttcggcgttytgcgagccaaattttcagttctccctggtgtagttgatttcttctgctagatcaccacgctccccttcctattcgactggatgaaagatggacacttctggttgaaatgatatggcaatcgggtagctgcaattcatctcttgctgtacatgagacaattagacaagttytaccgtgctytagtactccaccatcaatgcaatgcatctactaatagaattgcagcacatgtacattaatctctaacagttagtagrctagctgtaaactggcagcaatgtaaagttcagagtn

SEQ ID NO: 510 - DNA, 954 bp, Zea mays
  Peptide Sequence Number=SeqID_10875
  Probeset Number=SeqID_14913
cctaaccgccatatgcatagccgccgccaggggctaatccggccgccgccatggagctggtgctcctctgccgccgccatgcgtcggcctttgccgcgcccagccccttgtcgcgccaagcgccaggaccacctcgtggtcaagcgccgagcaccgcgcccagaccaccacgtggccgagccgccgccggtcttccgtgtgcggccgacggagattcgagggcggtcgagccgccgcccgccactaccgggagcgttgcagccgtggagccgcgcctgaggaggaccgacgtggtccgtcggggctcgctgaggccggccagccgagcacgcaccgcgccgggtggccagcagagttcgcgctggctcctacgccgaggagtcctcgccggagccaggccggctgcgctcgagccgtggtcggcctcgttcgcccgtggccgccaagggtcaggttcgcctgtggcgaccaggggtcgggttcccccgcccaagccggagtcggggctcgcctgtggccaagcgcgcccgtgctggggccagaccgcgcccgcgccgggacgcacggctgccggggtcggaccgcgattgcgcccgctcgccgggggtagccgccggtcctccgtgcgcgcccttgggccgccggtccgtgcccgcgttggggccggtccgtgcctgcgtcggtgaccagccgcgctcacgtcgaccaacgcgcctggagtaggcgcccacgccgggaggtgccctgcccacgctttgcagccaggggccagggcagcgcgcctgcgcgacgaggctggtcgccccacgccgtgcagcgggcgtaggagtgatagattttgttcattaattatgaactttaacttgataagtttgctgtccgtaccttgtaaaatcagacttctctgattacatgaaggtgcgctgcttgtgcacgccgcaaccggacatgttc

SEQ ID NO: 511 - DNA, 864 bp, Zea mays
  misc_feature (864)..(864): n is a, c, g, or t
  Peptide Sequence Number=SeqID_11012
  Probeset Number=SeqID_14914
attatattggggctgatggttttctccagcaacaagattattatatggatggatggatggatggtgttcaagcgccttgcctgtcctgtcttgccctttgtcccttcgtcgcctcgggcctcggcgtgctcgcattttccattacttcgtttcgattttgagccgggtatcatcttcacctgttgttttgttccgctgctttgcgcctccgtgctcccgcagatccctttgggccgtttcgcctccgcgcgacgctgggagcgagctgagtatggtttggctgggttgttcagtttgcggtgtattcttcctgcaattctagttttcgtgttgattcggtatcatcctcgacttctcagcgtgtgggttgcaggattgggtccgatcggtgttgtgagagttcgtcatgatggcgtgtggcgaggagatacaggcaggttcactattattgttgatttcgggtttaaggatattctgaaaacaatggttcataatctctactaatccttaagggtggacggagggcgtccaccaacgaatcacgcccgcgcgcgaatcgcgctccacagatgtcgtcgggtccaagaagcagagcctccgcgctccacggaggtcgccttccgsgtggacaacagcgcgacgagatgctacaactacactcatgacagcttcaatagcatatctgcattttttcctcatcctcagaatcttctctcttggtctgttcttccccctttcgtttatggcttacgaagtgctgaatttttagatccggatctctctctctctctgatgttgatttttgagtgagaaagatcgatactatttggttagaatttctattaagtggtaatcatgaaattn

SEQ ID NO: 512 - DNA, 938 bp, Zea mays
  Probeset Number=SeqID_14915
cccgtccactcaagtttgaacaatggcgtcagcagccaccttccttctgatcatcgctgcagccgcatggacatcgctaaccgacgccgcaccctcaccgcctccattcgtcccaccgccgccgtgcgcaccgccgcaatcggcggtggcgtttctccgcgcgcgctgtgcaaccacgctgtacgccgtggcctgctacgagtccctcctcccgtacgcgtgcatattccagaccagccacgtcaagctcgcccgcgccgccggcgacgtcaacgcggcctggctccgctcgatctccaagcgcgtcaaggagctcgtcgcccgcggcgctgctggtggtggcggcacggccggcggggccaagtcggctgcgctccgcgactgtgccagcacggtctcgtcggccgccggcctggccaagtagtcggcggccgagctggccaagctcgacgtcgcaggaaccaccgccgggagaagccaggtccggtgggcgatttccaacgcccagacgtggctcagcgcgtccatgacgaatgaggcgacgtgcgctgacgggctcgcggatactggcgccgcagcgtcgtcgccggttgcgagggaggtgatggtcgcagtcgttggaaccaaggagctcaccagcaacactctcgcacttgttcgtgggataccggttcctccatgattcaccggtgtaacgacaaacggctcatgatttctttagacgctcgaagatagattttttttattacctgcacttaaataggaacacttcgtaacgacgagatgaaggcaggatttaggtttcatttggcatagcttattcagcagcctcttgagctagttcaagttattttgtgcatctcaaatggttttacgtgtgaagttttttaaaatatatatgctcttacaaggggtagacgtgagatgagtgatgacgc

SEQ ID NO: 513 - DNA, 1110 bp, Zea mays
  Peptide Sequence Number=SeqID_11013
  Probeset Number=SeqID_14916
atcatcgcagctccgcttcgtctcttctgctcaccacccgactccgtacgtgcgtcttggatccatcaccaccgtaccatggcgataccggtagcacgcgtccacctcgccgtggcacacgcagcactcccggcgctcgtcccgaccccgcccaagtgcgagatgctgccgctgctcccgacgccgtgcgtcgccgttgtcctcccgaagccgctcgccaagcccagccgcgccgactccgacgagaggtgggacgcgcgcaagaccatgaccggcttggccgccagcacagatcagtcctcaacatcgtcaagccctcgttccaccgccggcagcgtctggagcagcgcccgacgacgcggatctgcctcccgcaagatcgcgacaacgccgcctaagcccggccgcgccgactccgacgagaggtgggacgtgcgcaagacaatgaccggcttggccgccagcacagatcagtcctcagcatcgtcaacgtcaagccckbbttccaccgccgacagcgtctggagcagcgcccaacgacgcggatcctcctgcaaaagcgcgacagcgctgccccccaagcccggccgagctgactccgctgtgcgatgggacgcgcacaagaagacggcaatcccagcttcgtcgtcgtcgtcgtcgtcttcaggcacgtcttcccacgtaagcagcggcaagtggacgatgagccgcgcgtcgtcgtctgcagagcgctgggacgtgcacaagaaatatcgcccgccgcaggccgccgtggcgctggacgacggcgagagcagtactgcttccagcaacgacattgacacggataaggaggagattgtatggaagccacgggccatctacgctgaaccgtgcttcatctycgccgcgccagcacccagcatgcttcccatgccgacagcgttcttgcttcgcgttgcatagcgctgcactgctgcacctagtccatggatcggctcagaactcaaggtcgctggtttcttttagctaccgaagcaagtgcgattttgtacacgtaggggctactgcgactacttgtttattggatcatgcacaagtacgtgacgcggcttatggttaaatgttttc

SEQ ID NO: 514 - DNA, 796 bp, Zea mays
  misc_feature (1)..(1): n is a, c, g, or t
  misc_feature (777)..(796): n is a, c, g, or t
  Peptide Sequence Number=SeqID_11014
  Probeset Number=SeqID_14917
nacaaacaaacggcggaccgttgccgcgcgtcgattcgaacccgccggggaaagcgccgacgcagtctcaccccgcggaggcgaaaccctagcgatggcggcgtccgtggacgctgcggcggccctggcggtgacgccccccgctgtggaggaggcgggcggcgctgttgagcaggccaggacgctcatcggcgcgctcaacctgctctcccgcaacctgccgctgccccccgacgtcctgcgcgcggtctcgtccatctaccacgatgggggtgcgggtgacgatgaggaggaggaggggggagagcgggaagcggagaaggaagggaatatggagatgacggccgcggaggagggttaccccgttgacggtgcgaccaaggggagctccttgattgaagagcttgaagatgcaatatataagaataaaaaaacaccaatatcctactcagagttagcagctctgaaagaagggcgattcaatgcatccattcagcatcggctagctgaacttgaaggattaccttctactaggggtgaagacttgcaaatgaagtgtttgcttgaaatgtatgggcttaagctgttagatttgcagaagaaagtgcgatctgatacagtgcagaatattggctacagaagaaatgtgcatatccggagaggcaactttttgattgggggctgatgcggatacggtatcctttatccatgtatggaataggagatatcctttcaatggatgctgatgatgttcaccgcaaaaagagatttacagannnnnnnnnnnnnnnnnnnn

SEQ ID NO: 515 - DNA, 679 bp, Zea mays
  misc_feature (679)..(679): n is a, c, g, or t
  Peptide Sequence Number=SeqID_11015
  Probeset Number=SeqID_14918
aagggcgagcaaaactggaagcctacgaaaatggtggagctcacctccttatccccagggccaccacgtccttctcggctgactcctcgccgccggccgccgccgccgacacctcatgttcatacctcctcgcgtcgtcgcgggaggatcctcggcgccgcgaccgccacgcctggcgccgacgactaccactccaccatccgctccctcaactcccgcggccgccacgtcccccgaaaatccctcgggcaggtcatcccgctgaccccagaatccgcgccacccacaggcgggctcaccattcaccacgtaccgacgcgtctctcgtctccccgcagaactacacgctcaactccaaggtgaacgaggagctggtggcggcggcgggggtggaggagggtgacgtcgtgctcgagatcggcccaggcaccggctcgctcacttccgcgctgctccaggccggcgctaccgtctttgccgtcgagaaggtctgtaacgttgctttgctcggtgttccgtagctggactgctgaaagtgagagcgagccgctagggggaaaaattcgaaagatcttcctgagacgaaattgaaattgtgtgtaaaatggttactatcatctgtgtcactgtgtgtgattgtctcaaatctcaattgttgatgcctcaaaatgtagctctn

SEQ ID NO: 516 - DNA, 622 bp, Zea mays
  Peptide Sequence Number=SeqID_11016
  Probeset Number=SeqID_14919
ctcgtcctccacacaatcaatcatgtagtggagtgacaacggtggcaacaccacgctcacactgccagagctagaggcccaatgggtctctcgccgctctcccaccaagtgctcttcgccgtcgtccgatccgccgatgcgaccgtcgttcgatctgccgacgggattttcgtccgtgcactcctaaccgacgccgaggtgtcgggcacctccatggtcgtgctcgccgccacgcagatagacgtcgtggagaccgtgttgtacattgtcgcggaggctagctgcaagcaggtcgtgagcctcctcccgctctacaaccttgaggccgccactgttcgctcacgcctcaaccttgatgccttccatgttgtcgccaagcagggccacaacggtgagctccccttcggacccctgcgttggtgttgtgggagcggatcaaagtcccaattatagtgaactgggaattatatgcagttaacccgcttcatttggggcttgccttttatggacgggattgtcagactgggtagaactctttgatgtctttaggtgacgggcttggattttggcaccattaaactagtttatgttggaatttgtttggcattttggagctttgaag

SEQ ID NO: 517 - DNA, 711 bp, Zea mays
  misc_feature (711)..(711): n is a, c, g, or t
  Peptide Sequence Number=SeqID_11017
  Probeset Number=SeqID_14920
aaatcaactcccctcactgtgtgtttatcggcgatctctcggtgacaactgcgggcactcacgtgggcgacgccgcgccggccaagggtcgtgacacggcggcgccagcgtgcaattcaaagcctaaagccatgtcctggcggccgcgaagaacctgcgcagtgcgcacggaggccgcctcgggagcgcagagcgattaatcgggctgatcgtcgactaatcgtaattagtcggctgatcgcccctctggcgatcagaggctaatcgccgatctgaaaactttgctctgctggtgctgcaacggattcggaacctgctgctgcgatggatccgggacctggttgctgtaacgcattcagttcctgctgctcttaatggtttggctactgacgagggcgaggaggatcatgatttggatgtctcgttggtgaaaaatcggagctgtctcgaggcttggcaacaaatgcgcatcgcggtcttcctcctgtttatagtcgtcgtcgagtttcctttgatcttgtgatgcccgttttagagagttggagttgctcgtctcttgtgttgagctcggcaacgatgactcagcatgagtattgtgtgtggggttgctgttatttgggttgcactctgtgtaggttttagaactggttttccttaaaactggatcaatttctttattcttaattgagagattgccattacgttttttcn

SEQ ID NO: 518 - DNA, 696 bp, Zea mays
  misc_feature (696)..(696): n is a, c, g, or t
  Probeset Number=SeqID_14921
atatatgggcgtgggcgctgtcgactgtccccctcggggtccttgccgccagaaaccctgccgccgtgtgcgttttcttgccccggtcgtcgacgtcacgattggccgacgtttggccctctacgcccaccgcgggtgactcaccagttcgccgggtgggggatcgtggcctctctgggggagatttgggacctggtggcctagattgctcctcggtgcgtggccgccgctgcggggccgctccccactgtgaacctgtgcctgcagcgccgattggagccgtcgagggagacaaagagcatcgcctcgaagcgtgggaactactactgccaccaattcgacgggggatgcggtgtggctgaggcaacccatcgctggagcaccattttcgccgtggatccgccttgcttgtgggcgaacctcccctccgccgcaacacaaccgcgtggtcacgagtcacgtgaggagcaagttggtacctggaatctcaagtcccaggagaagaacaggtggtcgaagaggagccgcctaacactaaggctttcgacttgatctaggtggcgtctcccagtcagctttgtggcaccagggaataatatatagttcgctttattttatcatttatttttgtaagacttccgctatgtaataactacatttatgatatttatgacatttatctctatgcactctgtn

SEQ ID NO: 519 - DNA, 696 bp, Zea mays
  misc_feature (1)..(1): n is a, c, g, or t
  Peptide Sequence Number=SeqID_11018
  Probeset Number=SeqID_14922
nacagagtgcatagagataaatgtcataaatatcataaatgtagttattacatagcggaagtcttacaaaaataaatgataaaataaagcgaactatatattattccctggtgccacaaagctgactgggagacgccacctagatcaagtcgaaagccttagtgttaggcggctcctcttcgaccacctgttcttctcctgggacttgagattccaggtaccaacttgctcctcacgtgactcgtgaccacgcggttgtgttgcggcggaggggaggttcgcccacaagcaaggcggatccacggcgaaaatggtgctccagcgatgggttgcctcagccacaccgcatcccccgtcgaattggtggcagtagtagttcccacgcttcgaggcgatgctctttgtctccctcgacggctccaatcggcgctgcaggcacaggttcacagtggggagcggccccgcagcggcggccacgcaccgaggagcaatctaggccaccaggtcccaaatctcccccagagaggccacgatcccccacccggcgaactggtgagtcacccgcggtgggcgtagagggccaaacgtcggccaatcgtgacgtcgacgaccggggcaagaaaacgcacacggcggcagggtttctggcggcaaggaccccgagggggacagtcgacagcgcccacgcccatatat

SEQ ID NO: 520 - DNA, 839 bp, Zea mays
  Probeset Number=SeqID_14923
aaactgttgggatgtcttttctgaacatcctcaaactaataaacctcaatctttgttttagaatagtgactttcatcatagtgttctctgtagactaaaaaaagcagatagtagcttaggtatcctcagaatatatataatagataacaaggagatgatgaaagaattaagcgacatacatacgctctctaacagaaagggacaacaacaccttcaataagttttgtagttcatatatatataaagatctggacttccaataactagagaaacccacgtcagacactaagctacgcggtccaacctaatcaggttccggtgtctataaaatgagttctagacctctagggtttattttttgatgccaccatcctgacgcacgagcaacggcagcggttccccgaggaacgagtggcgacggtgatccaggaggcgtgcgcggcgtaggcggcccaggaggcacgagcaagccatccgcgccccctcactcgtcgatggcgacgaccccgaaatcgcgcgcaacggcaatggtggcctcggaggagcgagcgccggtcgcggcccggggaggagcaagcgggcagaggctcgtgtggcggctccccatgtgcgcacgacagtgttgcaccctccagtggtcgcgcgaggcgtggccgtcttcggcggcagtggtcacgccaggcgcaggtggctccgacggcgacagcgtcgcgcgaggcgcaggttgtgagggtcgacgatctgtacgacggttcgggcgtccttcactgatcaactcctccgatctggtggtcttggtggcatccttcagcgatgacctcctccaatcctttgtttat

SEQ ID NO: 521 - DNA, 669 bp, Zea mays
  Peptide Sequence Number=SeqID_11019
  Probeset Number=SeqID_14924
cggaaataaaagaatttggatcacatgcatgctagggtcacgttatctttattattcgacaaaattatagggattgtattaaaacgtgaccacttaaacactcgcgccatgcaagcaaaatatcataaagtaaaataaattaaattaaaagctacgctatgtaggcaaatcagctttatgcatgcagcatgtatcgggaggcccataggacaaaaacgatctagccacatgcatgggctgctttttccttttttttctctcacgtctctaaccaactggccccatgcatcaactgcttgttccttcttttttctctctcacgtctctaaccgcctgggcgtcagagccgccgccgcccacgagggccgccgctactccactcgggagtgccccagtcgccgtatggaggatctgcacgctggggcttgagggcggccgagccaccgcaggatctactcgctggggctcgtgggcggctgagccaccgccggatctgtgccggtcggccacgtctcaagtccgcgcgctggggaccggtcgcgtccgagcacacccgtgccggggcgctcggctgtcggggcttgcccgcccgcgccggggctcgcctgcacacgtggctgcgacttgcccgcccgtgtggtggtacctgagagcacctagagggggggt

SEQ ID NO: 522 - DNA, 702 bp, Zea mays
  misc_feature (702)..(702): n is a, c, g, or t
  Probeset Number=SeqID_14925
aacccatattcctctctcctccgcgacgtgaagcccctgcgcccagcgtctcgtctcctccctcatccctggtgcgcagccatggaggttgctggcctcggcatccgatccccagtcttggagtggtcagcaaacgcgacccaccaacgcagtcttcctccggcgagccgccatcgtgctcggccgttcccaggcgccgacgaagaagaaaccgcgagcgcgtcgtccgccggtgctgcgcagcccacacgctcgccgccgtcgccacgcctcgacctcgccgcgcaaccgccatcgtcgtaccttcaacctctgctcgcctgccccctcgcctccccaccgacgccattgagccctcctccgattgcgatctgttcctgagcttcgaggaatcgacgatcaagcatggcaaccaagtgatcgaactcttcgagttctacgagatcgaagaccctgagcatctgtttggtgaaggttgcctttgttgcaatctatgctcaggtaaagaagaaggagaacggtgtcgaggcggttctccaggagttccaggacttcgacgagttcaaggattaggctagcgacctcccccagtcagctgcctgtggtgggttgtttacgttggctacgtttcgattctgtgtactttgatttatattatgtaaatgactcttgtctttaatattatwacttacyctttattgn

SEQ ID NO: 523 - DNA, 702 bp, Zea mays
  misc_feature (1)..(1): n is a, c, g, or t
  Peptide Sequence Number=SeqID_11020
  Probeset Number=SeqID_14926
ncaataaagygtaagtwataatattaaagacaagagtcatttacataatataaatcaaagtacacagaatcgaaacgtagccaacgtaaacaacccaccacaggcagctgactgggggaggtcgctagcctaatccttgaactcgtcgaagtcctggaactcctggagaaccgcctcgacaccgttctccttcttctttacctgagcatagattgcaacaaaggcaaccttcaccaaacagatgctcagggtcttcgatctcgtagaactcgaagagttcgatcacttggttgccatgcttgatcgtcgattcctcgaagctcaggaacagatcgcaatcggaggagggctcaatggcgtcggtggggaggcgagggggcaggcgagcagaggttgaaggtacgacgatggcggttgcgcggcgaggtcgaggcgtggcgacggcggcgagcgtgtgggctgcgcagcaccggcggacgacgcgctcgcggtttcttcttcgtcggcgcctgggaacggccgagcacgatggcggctcgccggaggaagactgcgttggtgggtcgcgtttgctgaccactccaagactggggatcggatgccgaggccagcaacctccatggctgcgcaccagggatgagggaggagacgagacgctgggcgcaggggcttcacgtcgcggaggagagaggaatatgggtt

SEQ ID NO: 524 - DNA, 641 bp, Zea mays
  misc_feature (641)..(641): n is a, c, g, or t
  Probeset Number=SeqID_14927
agccaccgctactccgctagggctgtagggcagggcaagtgtgtgttgtccgccggcctgaccgcctctccgcctctggtgctcacccagtcggccagtcgcccgcctcgtcggccgccacctcaccgcgcgcagcgcgctgccaggaaataggccgccaggcgcccgcagtgcctgtccggcgtggcgacgtccgcctcaggctgtcagacagtcgctcggcgctcgctacgcacgccgccagcccgctagtctcgatgtcgtctagacgcgttttggttggcctgccgacctaaagacaacccttggatctctcctttctgatggatcccttccggaagacgagattcaagtttctgtggagaagaagaccatacgccatcgcggaccgtctgggcccaagtgcggatcgtctagaagcacacagggaatagtggcgaatctggtcaaaaatatcgccggagtcatcaggggaaggagccgcttytgcagcgaggtcgcggatcgttcggcccagagccacgtgcagaccgtccgtgctctcgtagagagccgtcagctggttcatctagtgtttagtatcagatcaacgccaacagtattgaaccactaataaagagccaggatggccgttctacctn

SEQ ID NO: 525 - DNA, 737 bp, Zea mays
  Peptide Sequence Number=SeqID_11021
  Probeset Number=SeqID_14928
aaaaaggttcgcagctgcttccttttgcgatcctcgtgtgagaaaggccagctacaaaatactagctacaaacacagcgtcacgcgtctccccccctgctgcctaccttcgtgcggcggtcccggcggcgttcaggctcgtggcggagttccgcggcgtggccgtggccacctgggattcgaccgccgagagattcagcgtcgtgagtcctctctctcacaagtcctgcacggatcgtcgtcgtcgccatcaccctatgtggacaaatttctcgtcgtcatcgaattgttcgccttcatgtgaaggaaactaccgatgtcgacatcaatccacgaggtttaagcaagagggaactccaggacttgctgcatgatggcgcgaagctcctgttgaaggctgctaatgcaaagatcaatccgcagacgccgagcgaggatggtgggcactgaggtgttgtcatgttggatgatctttgaatcttttgaggggctgctgatgtctagtgtttcctattgctgaaataagtgagatgtgactgagaacttagcttttatgtgtgtgtttctggtttgtttcagtttaaaaacattgagttgtttggtggtgtgayytgaatcaggtcagtttctggtgttttatcccttctagatcttagcccttgggtgctttgctagacgtggataagaacaattgtatttctgttatgcaagtaatagaaatggagtgatctccgttct

SEQ ID NO: 526 - DNA, 765 bp, Zea mays
  Probeset Number=SeqID_14929
aacaaattagtgactaacgagtacaaagtacgaacacacacacacacacacaccagcaggcagccgcgcgcgggctcgatcgcaatggcgtccaaatcctccactgcggccctcttcctctacgcggctctcctgctggtcctggtgctggtggcggcatccacgctggcccaggcgcagccgacgccgccgccgccgcccagctcctcgtgccccttcaatggctccgtgccgctatccaacatcacagaggtccttggactgctcgcggagcctggacctgaacaccgccgcccagtgcctctgcaccgccgtggaaggggtcacttccctcgtccgcctcctcctcagctccatcgggctcatgctgcccttcgacttcgtgtgcaccagcacctaggcgcatgtgcatgcgcgtgtaataatctgcttaattatactatgttattactactagtaatacgtgtgtatcacgagcaacacacacatgcagtatatgcatgtgtgctgtgcttagcttaaataattgcttgctctgacttactggttgctgtatggatcggactatacatgtccaatgggccgtgccgggccggcccggcccgggcacggcttggcccggcacgagaggcactagtccaagcccggcacggttcggtgtcgtgccgtgccgggccggcccgcgggctggctaacgcggcccaagcccggcacggttattcttacacgggccgtgccgggccggaggcacggtgggcctgtcgt

SEQ ID NO: 527 - DNA, 996 bp, Zea mays
  Peptide Sequence Number=SeqID_11022
  Probeset Number=SeqID_14930
atgtactaaaaatcaatttctctaagtaattgtctatttttatcacccccagaactgggcgcattaataactaaaagaccaggggctctcccacaaaagttcctaagactcataatcaccccgcgcaggatggcaggtttattattaaaatgtccagggtctcttatgcaaagttgccaagccgaaagggtatccacgaatatcgatcgccagatctgaaccaacgaccaggattaggttcccgtttaaatcgaaccgatatgctgtgtgaggcatcagatcagacttcaacggctcggatttaaagctgctcacaatgattccctcgctstagatcatgatcggacgaaccacattaccctggctgaaccaacattagcacgtctaatcacagctgtacgcgtcacgatcgacggctgatacgtttcttctacccaccgcagtccgagcggcaccagcgcggtccgcagcagcgtttcaccggcgagtagagggttgggcgaccaggcgacccaatccgagcgtgcatatgtgctagagaatcctctaatcacgtaccattagcggaagtgagttcataccagagatcgggttccgatatcgcgggtcgatggcatagtgcggctagcagcagtctctgacgccggcaagtaaatcccacggaccatagcgtcttcgcagccatggcttggcaacgatgaaggcgaagctgaaccatccaaggcacagagtggcgtggttgaaattccaaactccgacgaggttcaagttaccgctcgatcgatctttgcatgtggctggaagacgagtacacagcgcattcgggcggttcccacaggctggacaccatgagaggagtcgtggcgtaggcaagatggagatgtggcggtgcacggctctatctttcgatccttcaaagtccagctacggtggctgcctattcttgtcgcggtttacagcggcgcgtagttcttcgatgcctgctttgtgatagat

SEQ ID NO: 528 - DNA, 1850 bp, Zea mays
  misc_feature (1)..(2): n is a, c, g, or t
  Peptide Sequence Number=SeqID_11130
  Probeset Number=SeqID_14931
nnaggcagaaacaacaaaattttctttacggtcgacccacctcaactcttatgttacaaaaccaggcagtacctagacgacactagacaaagggcactaggcgttggggatactaaggaaattaaggatattaaccatgagtccacgaccagggggggtgtgtaactttgcacacatgcagagacacagggaggaagtaaacatcagcgatgttatccgaaatcctgctgcttcatcatacattcatgtgactatgcaaacaaaaagtctagttacaactgctcatcagctttaaactgaacgtcaccacatttgtcttcttggcttcaagttccaacccttcatctatctccctgaaccagtaaaggcatcaaaaaggccgcagaaattccaccatattgcccgctgccctggagcaatcactgccactgcaggtccccgctccacctctgtaatatgcacaccagcagcctcctgagagcgcgaaacctcagcagagtccttggccaccacattgccactattcttctcttgttccttcaacacaacggtagcatcaacgcctttcacctctggttcctgtacctcaggcactacaggtgtttcgtcgaccaccaccacttcatcacgcccttcatcaaccctcggctcagattcaagcaccgaatgcactgggccaacccggtgtcgtggacgctctacgggctcctgacctctcagttcggcgacctggaccagcccctgcttatggccgacggcgtcacctccaccaccgtggtggctttcctggaggagcacttcgggttccgccacgacttcctkggcgccgtcgcggcaatggtggccggcttctgcgtcctcttcgccgtcgtcttcgccctggccatcaagtacctcaacttccagcggcgatgagagagcaatgcaagtggttcagctagctagtatagtagccaccgccgacagacccaccaaacggatcgcagcctactgtacatgcatacaccgatcgatcagtgcaggagggcagcagcgcaatgaattatgaatgcgatgtaccagcgcgtcgtattggcacagttaatttgcccattaccccagaacatttcgccgggggtaaataatcttccggtcggtcacgggagcgagagtgagaaaaaaaagcaaaaaaaaaaaaaaaaaacggcacgagaagcttttttttttttttttttcagaaaagaaagcagtctattatttcagaaaacaaacactggcattgaccacaagctaacattcagtttagttcactaaacaaaactaaaattaaagcaggaaagactgaagaacgacacaaaactgaatagttgttgcacactgactgaaactaaaactagcttgaaaccaacactgactgaaacatcgcctttgccatgaccatcagtgtacaccttgagtgatatagctgaaaactagcaactcagactgaaccattgcttttgagtgacacactgaaccagtcgttgggacaaccatggatggacagagcttgtcgttgcttcccagcaattatgccgcaagtgcatcggactccactacggcacgtgctgacgcacgggatgctcctccacctcgcaagtccactccgccgtcgagataattgtctgcatccccgtccatctaccattggaggaaactcccgccgtcgggcaccatctcctgtgacctctggttgtcgcggcaagccgatgcaggtccccttggtggattcatcacggtgagaggacgatgaatctctggctgacctctaacaacgacggcggcggatctgtcgtcttgcctcccgctgtgcctgtacgaacaaaactagt

SEQ ID NO: 529 - DNA, 569 bp, Zea mays
  Peptide Sequence Number=SeqID_11131
  Probeset Number=SeqID_14932
ataaaattggagccccgagaccatcctgttcgcccacgcacgaaagcccgagccatcgccgtcactcggaagtcgccagccgcgcaaacccctcgcgtcgagagagagaaaggttgtcgccattgccgacattcaccagtgtgggcgctcgagttctagagaccagccctagttccgtgggggaccgtatggatcgtgtgccgctcctccctaggagcgatcgacaatcgggggagctggaatttctcaccggaggaggatctgcgccgcctcaacgtcgcgcgtgtggccggggacctcgccaccgtcgatattcgacgagcaagccgcagaggatccaggggttcagcaggtggagactgctgagtaggagctcgttgaaggagaagaacatgtggttcaagaggagtcgcttaacgaggagttcaacttgacctaggtggcgtctccgagttagctttgtggcgccagggaaataatatttagttcattttattctatcatttattttgtaagacttccactatgtaatagtacatttacgatatttacgatatttatctctatgc

SEQ ID NO: 530 - DNA, 511 bp, Zea mays
  Probeset Number=SeqID_14933
acattcaaccctccacctaagccacgcctgcatcgatagcgaaagccgccgccgcggtacgccggggggaaatccgtcactgtcgggagcttgtgcgccgccaccaaaactcacaccccatcgccacttcccctgtttagtgcatgggtggtcgattcgtggatttcgtggtgcgcggtgtcttcggtggggcggcaatctgtcaccgtcgcaccaactccacggcggacccgcacgatgctgtggacgagctcctgtggctcattccctcgacgagcaagccactgtggatcgtgaggttcagcaggtagaagttgctgagcaggagctcattgaaggagaagaacaggtggttcaagtggagccacgtatcgaggagttcgattcgatctaggtggcgtttcccccagtcggcttttgcgccaaggatgatccttagttcgtgttatatttatcttttaatttgtaagacttccactatgtaataaatactctgattattgtgacattt

SEQ ID NO: 531 - DNA, 854 bp, Zea mays
  misc_feature (854)..(854): n is a, c, g, or t
  Peptide Sequence Number=SeqID_11132
  Probeset Number=SeqID_14934
acggttttccgtcggcaccctcagccgccgctgtcgacctctccctctcgtgtctccactcgccctcgagctctccctctccgtctccagtcgccgtgagctagggtttggagctaggacgtcgtcggccgggccaggggcgccgccaggaccgcgctcgcggagtccctgcaggtcgccgagcacgccagcaagacctccttctccgccgggaggatgtcggtcaaggacagcaagccgaggcccctgtcgcgtagcctcgaggccgccgcgccaggacaggtcggtttcggttcgccgctgcaactcttcgtctgtctgtcttgttgctcctgggaatcttttttgtgtttgctcatgcggttcctgtgttcttgtttcacttgcaatattcccccatttttgttttagattcagttctcgccgtgagaataattttggcgctcataattttttcactctctctctctcttgtttgctcaaccttggaatttctttcttctggctgctgcaaatgaacctgtcgttccccaaggccatgagtggtgggaraaggggctgcagatgaactyttcgttcagctaccaagcagtattagttccattccatggatggataagcatgatcttaaattagatggtttctatttgctattctatttgctttttgccagtttcagaaaagacactcctatyttttacaagttttcagctgtttacaagttaratggtcctatctttttgcctgtctgtcattagataaggagccttcagctgtttgtttttcatggcctctacaaatatttttgtctgtatatattctatcttgttaatccaatcaagtctttatagttn

SEQ ID NO: 532 - DNA, 595 bp, Zea mays
  Probeset Number=SeqID_14935
agaaaactcgctctattcctctttcccccttaccactatcttggttcctctaaaccctctgtcttggttactctaactcgctttgtttgtcaactccagattgtggacaagttgctaaaaacatgtttgtttgtcatcgactttccattttactagatctgcttgcacctgattcgaagctccatatttttgaaagcgattaaggcgaagaacaatacgtcaaaggaaactggaaaatttaagtcctcattaattcattgatctttcggtttcaagtccggtgcagcaaagttggaaaatacttctaattcttatagatttaataaaggaggttctgtttatttctaccctttttgttcaagcacatggaacaatacgtttgatccttccacaatttgctaacgaggatgaagcacaaccaagttgacaaagcctgctagattccagaaatccatgaaaataaagcttgttacatcctcatgaaatgcatgaagggatttgcttttgcatatttatcgaggagggcttcatcacttttaatgaaaaatgcatctatgtatatataaaccacctgttgaagcctgtcacttccatg

SEQ ID NO: 533 - DNA, 756 bp, Zea mays
  Peptide Sequence Number=SeqID_11133
  Probeset Number=SeqID_14936
agttgtgattactatctacctaaatcctcctttatcgtggcatgcattcctgcttatccgtagtttgattgcttccttagccgagttaatgccgagtgtttagccctccaggtgtgcgcaacctcttcgtgtgagatatcggtgtttcggtctacgcataacccggacgtccgatcattgcctagcacatgttgggatgaagaaccttcataagccttttagggtcgagcatattttgggactaatgaatgtttgttttgagaaagacagatcttgtgcagtttgccaagtagggaagcaagttggaggagggcatcacccaaataatgtgatgaccatatcaagagcactggagctaccacacatggatctccttggcctcgttgcttttcttagcataggggaaagtaagtatggtcttgttatagttgatgattattcttgatttacttgtgtattctttctgcatgataaaagacacccaagagacgttacaacggttcttaaaaccatcgtcccctccccctcactcatgccgccgctgtcggctcctcccccataaaaaccatcgtcccctccccctcccttgtgtcgtagctagtccctccctctctctaggaccatagtgttagcatatgcaataagctagtggaggagttaatcgctcatcatgatgtataggtgggctagttttgccacttgagtaggttaatggaggagttaatcgatggattgatagaggtgtaatggacagat

SEQ ID NO: 534 - DNA, 602 bp, Zea mays
  misc_feature (602)..(602): n is a, c, g, or t
  Peptide Sequence Number=SeqID_11134
  Probeset Number=SeqID_14937
aaactgcaaagcgagacttcccatccattccactccgcagtggcggcggcggcgaggtctctacgactttcagatctctccgaagagggcggaggggagggagatgtcgtaatgctgccggagggctgctgacgaagatgcggaagctggtgaagggcctcgccaggcccgagcccaggtggctcagggccatggaagacaccagtgacatttcctcgcatagatgggaagattaagggggtgtttgtttgggattataatctgtccagattatatagtccaacaacttgaacaccccctaagaagatcgagtttctgatgatgtgtatgttaggaagctaaacaaaaagaacatccggattcgctatgccatgatgcaatcaagtaagatccttctcttttcttatgtgattttccctatagaaatgtcgttctgcaaagctgtacatagttaaaataatattgaagtcgagggcaggatggtttttcttttacagttctaccgttttgctgttctccacttttctgtttttactccatttctattgtatatatgggatttgcttgatcgttcgktgaagcctgattgtatcmctcmaccn

SEQ ID NO: 535 - DNA, 1130 bp, Zea mays
  misc_feature (1130)..(1130): n is a, c, g, or t
  Probeset Number=SeqID_14938
tgtacagtgttctccatatgaacaagggtctcataaaggtttacactggcatcaagataagagtcttttttcgtcaaggtcactgagtggccatctggggttctcacttcatatataccttagtatatagataatgtcgtaacacatgagcacttagctattattaataatttgtgagtcgttgcaatgcacgggtacctatctattatgatggcgaggacaactccattgccactgagagtcaaatcaagtttgagacatgacttcaagttcttgaaggtagagaacttgggaaatcaattggttcaacaaaaaggaaagcccaagatagaagtgtatgaaaaggagaggaagaagggtgctggggctttaacaactcatgctagggttcagtaatgttcttccaatactactagcatatgttcaaagtcaccaagctcctgacaagccagttctgtggattacccataatgcaaaaagttttgatgtccctttccttaaccaagagtttgacataagttcagcccaggttcctgaagatcaataggctatttgtcaatagtctttgttcagtgaaaaagtcgaagaaaacaaaaggaggatgttgttgatgtgatgacttcctttatggctgcatgcttggtgtcaattaaaaggacccaaggacttgccccctgatcaacatcaaaaagcgcttaggaagacgttttcagccgaaaagaggaaaagtaaaatccggaaggcatgggatggaactaaagtcatttataatgttgcttcatggggcgccactgctgttggggtctacaataatcgagcattacttacggtcacaactacaacgtttcagacttcctgccgtgtgatatccaagttcctttgaatattgtgtcaactactagggcatgttagaattgcttgcgtgtgtgcttttccattgttcaggcagcataaagcttgagaccatttgtttagtctatgctgatgagttcgactgctaattagcggcgcctcccagtcaaaagcagcatgtgtattgtataactataaatattgccttgatttgaacaaacttgttttttgtgctagaactttatttcacgaacttcatatgatagaccctactgtan

SEQ ID NO: 536 - DNA, 817 bp, Zea mays
  misc_feature (817)..(817): n is a, c, g, or t
  Peptide Sequence Number=SeqID_11135
  Probeset Number=SeqID_14939
agcagttcacacccatctcattggccccgttcttctctctctcgcagccatggcatctcgccggccctccctgttgcgcgcacaaccatggccgacgtcgcgcctctcctcggcgccttggccaaatccgcgcagcgcatgaatcccctgcatcctacccacagccatggcgctgccctcctacaggaacccagtgccgcctccctgctctgtccaagggctccatggccggttcggccctgctcttctccccaccttgctatttttccccattgaagggaggttgaagaaggctagaaagaggacatcatcgcagcccccgcctcgtcgctgcaacctcgcttctgctcacatcatgtggccggtgtgcagcctcgcaccatgactgccccgtgtcaccatttggtttgctcaccgcgtcgagttcgccatcgcactgttgttggcgccatcaacttctcaccattgagcagggagccacgccgcgttcgtctcgccgtccggccgtcggccgtcgtcgcagaagtgcgatccatctccaagcttcaaggagtcgacggtcaagcttcgacgaccaagtgatcaagctctctgagttctatgaggttgaagaccctgagcatctgtttggtgaaggcaagtgtcctctgacacattatgtcccatttactttataatacactgtcccgcatactatgaacaatctaaggatttactagctttctatttaccttgtccttgatttaccttttgggttactatggttagctacatgctagcgctttactttaatcaatgaacatgatgagatacaatn

SEQ ID NO: 537 - DNA, 638 bp, Zea mays
  misc_feature (1)..(1): n is a, c, g, or t
  Probeset Number=SeqID_14940
nttggcaagctaaaaatagtaccacattgatcactaaactgtgcacctgtttataaggtctagtgcgcacacaatatgtgtagtcttggttgggcgtgagctttgatccacgcaactagcttttttggtaacagatgagaaatgccacaaccaaaaatgacagcctactccttaccgtatatagaattttaccatattcggttatttgcctatgttcgtacccaccgccatcactacgcatgccggtccgttaagcttcctccccagcttaccgcgtgctgaaaccctagccgccgaggagccgacgatgtcggacccttacaacccgtactaccgtggagccttcccaggcggcgacggtgcgccgccgccgctgccgccttactcggactttgatgtcgacctcgtcgcgacccgttacaccggcaccccacggtctcatccatcctctgccgacgtcggcgccttcgaatcgcatctcggcgcgagacgattcgcggaaggtgagagcggtcctttctgttttggttggtatggtcgtggttgccatagtgtatgaacgtttggccgattgtttgtctgaaactagtagtatgaagatcaattggctgtgggactcggagcttatgatgggtgtt

SEQ ID NO: 538 - DNA, 755 bp, Zea mays
  Peptide Sequence Number=SeqID_11136
  Probeset Number=SeqID_14941
caacaggaattaccacttccacttgaaagacaagaagtaccagggacagaaccgcagacagacacggactgcagccaaacacctaacaactcccaacacagacaacgcagattacagacataaagctctccccacacaaacagaatggaggacagccgacacaaaagcacaggacgcccaggccaaaacaaccaagaccacgccacttcaaatggaacagctacagacagaactaaaacactccactgagggaaccaggagcagcagatcacatgcattataagaataaaaactgccatcgcgaagagatctcaggcatcccccacagccctgatggttggggaagcaatgggagtcaccttgcgtcccctcctcatatgccctgtcttctctaccccttggttgaccaattccatgattgcctccatctgctctttggttagcggccttgagaaaaggcgagcaatcttgggcgatgcagatgcctgggacaggagcgaagccatgctgttatcgcggccgttgtcgtcaatcggactggagttcccctcagcagccacaggagtcttgttgccaggaaggtgccgtgttttcgtcaccctcgtccaatccaatccaatccatcaaccccaaactctttgcatatcacttatatttagctaagcgacatagtcctgcatccgtacataaaaggaaaaaaaaacaagtctaggtgataattttcgatagaaagctggtttggattaagtttgtat

SEQ ID NO: 539 - DNA, 1053 bp, Zea mays
  misc_feature (1053)..(1053): n is a, c, g, or t
  Probeset Number=SeqID_14942
atacgtctccatccctaagccatgtccctcctgtccctcacgtcagcttcaatcccagtgttaatccttcctcgtgtcggctgctagcaagtgtcgctcgttcctgccctcgatggagctctcctgttgcacatcgtctccctgcctcccgccgagctcctaaccctggagcgcgtgtccagtttgacaccgtgctcaggctctgctcgccgtcgcctatggctgactcctctgcctccgatccgtggcgccatcgtgggctcgccccagccctatagctgtcggttgtcctcgccctgccccattgcacgctggtaccctctcctgcagctcaccacatcagccgcggccgttgctcctccaccaagcctcgccggggtgctcttcttggcgcgcctctgctcctctgctcgccgtgaagctctatcttcgccagctcgctccagactcgacctcatcatcgttcctcagcttcacaccgacttccagctcgtcggtcgagctcctccctcgcgctcagatccagtcgttgacgcccagccacgtgttcttcctcccagctcgtgggtgccgtcgttccgtgtgcttggccatcaaagttcgccggccatcacgacatccccagtctgtcgtcgatccacggttgtctttgtttctctgtcgaccgtccgcttccttcggacagcgcgcttgtcccccacgcagcgtcgtcttcaaccttcagctcttcttcctcaaacggtgttccagcagctcgctcccatggcgcttatgtcaactcctgcgcgcccatgtcctttactcggctagccatggtcaccgcgtcggctatccctatcaaagctcgcccagcttgccgatcgttgtgctcctggcctccgatcttcctcgcgcctgccccaacgctctccttggtcgcgtcctgctctggcatccgtgcttgcctagtgccctcgcgctctgaggctcatcacggacctcgccgtcgacccacgttgtgtccacgaaatgcttgtcgacctcgatgatccgttttcctattgcgcgctactn

SEQ ID NO: 540 - DNA, 780 bp, Zea mays
  misc_feature (780)..(780): n is a, c, g, or t
  Peptide Sequence Number=SeqID_11137
  Probeset Number=SeqID_14943
cgaagtggagcaggcaacaatctggatgttcctctggtggtctggcaccttttcctttcatgtaaaaatctgaaacactgacattatcctttggtcagcaaatgcaatactttgcctgatattttgatccatgcaataccttctgcaggtaaagtttaggcaagggcgagctagatttatgaggaagtttgagggttgctggacgatagaaccccttttgttgacaaggaattatgccttcctctgaacccacattcattggaggaatatgaatcttgtactagtggcaaggggagagttggatctgccattaccttagaccagcttatcgagcctgctcttttacctccaccacccatttcgtggtacttgagaggaattactacaaggacaactgagatgctggtgaacgatctgatagcggaaactgctcgattgcgcaccatctcaaacaacgctagtgccaagcaaggtactgaagaaacctgtgatgctaacataggtgatccagctagagagtgtggtgacattaaggaaaggtggcgatagagaagaaaaagtggacgtcacggatcatcccttagattaacaagtctattcttgtaagataagctatgaagcagtgctcattttaggacccgatttacctgtatcttacttagtttgtaaggttttggttgtaggtaatattgtgtaagatggctgtttgtgaacatgtagaggctggttgttcaatacttatatatgttttatttatatgaataaaggtttacttgattn

SEQ ID NO: 541 - DNA, 872 bp, Zea mays
  misc_feature (585)..(585): n is a, c, g, or t
  misc_feature (872)..(872): n is a, c, g, or t
  Peptide Sequence Number=SeqID_11138
  Probeset Number=SeqID_14944
cggtcgatccaggatagcagccagctcaaacaccacccacacgtcaggtgcttcttcatctcccagttccagccgttcctctgtagtcctcgccgtgtgctgctgttcttcgccgccacgccctgcccgaccaagagccaaagccccgtccaagccgccccagccggacctgacgccgccgagcgcgtctccgcctggagccgaccgagcccgtgctcgagcccctgcaccaaccgcccatggagcccgcgcccagctgccgagtcgaccgcgcgagcccaagtccgagcgcccggtcacgactcgccgagcccctgcgcgcagtcgaagcagccagcagccgtgacaagacaacccgaacggccccgcccaaccgaccgtgtcgtccgtcttcaagaaacttcgatgcatccgtttctctgtgcgtaaatggaactttaatgctgtatcaatggccgccatraagcmccggtcgccgtttctctcccctctccctctataaaacgcccggactctctccctctcttcctccsgagttctctbtctcacgctctcctctctctccctgrccgcgccgtactcagncttgccgtcggagctcgtcgccgtggtcctgtccgcagtccgtggagcctcgccagagcakccgtgcccgtvgccgtcgaatgccctcgctggagccccacacgacatcaagaatcccttcccgccattgtcgcgtammtatgvtgcttgccaccgtgstgcgcaacccctcrccgaacaccttccctgcacgcgattaacccaaggttgaagacaactcactcatttattttttttaaatcatattttgtatcttgtgaattggggttgtaatattgatgcgattn

SEQ ID NO: 542 - DNA, 715 bp, Zea mays
  Probeset Number=SeqID_14945
aaatattcaattttgtgtttaaatcgataaatacaaaaaagaaaagatgaaatacatcttcgttatcgctttggcctttggcttggcttatgccgcccctcaagttcaagaggaaatcgaagtcggttccttaatcgatgatctcttggatttcatcaaacttttgcctattgacaaaatggatgttattgccaaggatcatttgaaaaacgacaaggaattcggagatgtgattagatatctgcaaggcaaggaatggaaggatctgattgctaaattgagggcaaaacccacctggcaagatttcaaaaaatacttgaccgctgccggtattccagttgatctcatcattgatgttattaccaaatacatcgattccctgaaaccaggtaccagtgatctcaccagcgtccgctctttcttggatgaaattgaaaagattgtaccatggaaagatcttaaagctcttttggacgacaaaatgaagaacagcaaagacttcaaagaactgtacggtaaaatctctagcgacaaagccaaaaaattggtagaagaagtccgagctatgccagaagttaaagaaatcgtcaccaaattgaagggtatgggtgtgaaagttgatgaagtcattgccgccatctacgcttggttgggttggggaaagccatctctgtaaatttttcacattaccgtttaatattaataaaacctaatt

SEQ ID NO: 543 - DNA, 603 bp, Zea mays
  misc_feature (603)..(603): n is a, c, g, or t
  Peptide Sequence Number=SeqID_11139
  Probeset Number=SeqID_14946
aaaactgaagacacactcagcagcgagcgactcgatgccgcgcggtgctacggtggccctcttcgccggtccatcgaggaggcctgccgtggtgctctcggcggtctttgattccacgcaggaagagccccgggcggtgcgcgcggcgcggatttggcggcggcctcatggcattaacgattgctttccacaagtgtcgccttcgccatgatagtgacgagaacctcatctgcaggggatcaggcgaatccgaacatcatagaagaaagaagcgacacataacaaccggacagggccacaaggaggtgaagaggtgggctgtcctgacggagacataataagtggagacagatataagaccacacaaccaccttcacaatggccggcagagaataaatgaagacagataagtaggttaactttggatggatgacttttcttgacatggactgcgtcgcattagttgcttagtcaggtttttgtttctctctctcttgtgtggttgacacagtgtgcacacagtacttgcagcatgttcactgtgctgtgtagcactatacatatacagttctgttcatgaaggaaagaatatatagatacttn

SEQ ID NO: 544 - DNA, 162 bp, Zea mays
  Probeset Number=SeqID_14947
gaggcagggtctcactattgcccaggatggagtgcagtggcattgattatggctcactacagccttgacctcctgggctagtgatccgtctactcagtatcctaaggagctgggactacaaatgcataccactatgcccaactaatttttgtattttttgtt

SEQ ID NO: 545 - DNA, 523 bp, Zea mays
  Peptide Sequence Number=SeqID_11252
  Probeset Number=SeqID_14948
gaaccctttctctgtgaaaacctccctctgctcctccatcccgccgccacgttgtcgcccctccctctgctcctccatccggtcgccgccgtgaggagtaccatcgtcagctcagattttgaggagagaaaaacaagatttttgcagcaagactttggcagaaggtcatggacaaggaggtaagcagtgcaaaagttggtggtggactatgttaatggacaccaactcaatccacatttgtgctcacctttcttagcaacattgttttgtcatggtgtaaactaaaatttgtcatggttaacttctagtttgtgggtcatgattagaattatggctatatgaactatgatttgtcatggtgttatgaactcatgtatcatggtggttggatgaaatatggttacactagtgatgaactatgtatcttttatttggacatgtatcttttatttgtatggttgaactatagttatgtattgttggggacttgttctcaaatactgagttaagamcaaggcaacgc

SEQ ID NO: 546 - DNA, 1128 bp, Zea mays
  Probeset Number=SeqID_14949
atgataactgggatggtattcccaaatcaacacaatatccagaactttggtccttttctgcttgcaaagacamtactgtgctacaagcaagaattgttgactcccaagaattgttccatgcaccattgtccattgaagcctttgttcaactttaagagttgaatgattgcttggataatcttccacataataatcacaaagacaaatggagctgctctacttcttctagcttatttttctcgcaaaagatttatgctcatctgatgggtaaccagtggacacatcccattttctcttggttgtggaaatccaaatgtcaacccaagcacaaggtgttcttttggctactactgaaagacagactaaataccagagcttttctaaggcagcggtccatgtttctggactcttattcctgtgacaactgtattcttcaagttgaagagacggccattcacctctttttcagatgcaattttgctaagagatgttggtccttgattggaatctctccttcacattctgcggatttactcaacaccattttaagaatcagaagacgttggcaagtcccttggaaacttgaagctataatcctattgacccggggcatctggaaatgcagaaataattgggtgttcaatgagattccgcccacggtggaatgttgtcgtgctatgttcaaatctgaaatgaaccttcttagtcatcgagttaagctaataataggagataaaattagaacctggcttctttattctgttctgtaattctattttttctgtactcaccctcctgtatcttcacccccactctggtttccttaagcaataaaacactgtaggcctccctacagtaatttttacttaaaaaaaataactccttcgggatacaacataagtagcaagtgaagacacacgagtggctgaaaatagcaccgaagagaaacacatccgtcatgtgagcaggagaaagtgcacaatcgctgtccgtggaataaatggcaacatagtcaatttttgaatgcagcccaatgccacagtcctctcaaagctacatgttatttgtgacggaggatcattatttctcatatttggagatgagtaagcgaggtaacattgcatctgt

SEQ ID NO: 547 - DNA, 639 bp, Zea mays
  misc_feature (639)..(639): n is a, c, g, or t
  Peptide Sequence Number=SeqID_11253
  Probeset Number=SeqID_14950
actcttctctcctccccttgctcttctcaggccgccgccacttgccaggacttcctgcagctgagcgcccctgcagctccctgcacctgcatcctgcgcgctccctgagcagctcgacgagcgatggccgacgaggcgtggagcagcggtgcgggcgtgcggcggctacctgcagccgcgctcgcctggccgcctccgcggaccgcagctccgcctggccgaccggcgcccgaccgccacgccacgcgcaacgcgcccacacgcctggctgctggcgctggccggctggcggcagacacgcaggaccgaccagccacgcacgacgcacttggttgggtggatctcggtctgacaatgatccagcaagataccatgatggatatagcagattaatagcatgggcgtatagttctcttgatcaatataagctcagtcatttttccatacatttcgggaagctcataaggtgatgcattcaagggatcttcagaagctggaaggcatcctctctacttcacacttggaggttatttagctctgtactacattgtgccattatgttgtgaatggacccatgttttatataactgataatacttttttagcattatagaactgtgcatttaacttctgcatgcn

SEQ ID NO: 548 - DNA, 684 bp, Zea mays
  Peptide Sequence Number=SeqID_11254
  Probeset Number=SeqID_14951
gtcgatttggtgtttattgatgcacctctcttccgacaccatcaagctgacatgtatgggggaaagtagacaggaaattttgaatcccatggttttgttctgcaaggttgctgttgagaacacctataagaagtgacgtttgaaggagttcacttcagtgtatgttgatccagtggtggagtttcatctaactgcttaccagagtagaagggctttgagatcttctcctgcaataaggaaagattctgatgtctttggcttaattagttactttatgtggaggtcttgaagcttagattacttatgtgtatctcttatggaaaggctttaccttgccaaatattgtagttaagttatgcacttcgagtacaatcagggcttgtaataaatacatctctttctaccatgtaaaacttgagttctggaatgtaaagtgtactttgtaaaagtcttccactctatctccaatgtgtgtgtatcaaatgtgattactggttaatatacctgttatgtgggagatccttgggatgatgagtttcagttggtgaactagatagccttgttaagttatccggtacacgtgcacagccatctgaggccattaaggcaaagattggtgcatgtgggcctgataacttgggagggctgtcacaataagtgtctcaacaataaatgagttcttgc

SEQ ID NO: 549 - DNA, 725 bp, Zea mays
  misc_feature (1)..(96): n is a, c, g, or t
  misc_feature (697)..(725): n is a, c, g, or t
  Probeset Number=SeqID_14952
nnnnnnnnnnnnnnnnnnnnnnnnnnnnnnnnnnnnnnnnnnnnnnnnnnnnnnnnnnnnnnnnnnnnnnnnnnnnnnnnnnnnnnnnnnnnnnnntatatagatggtcgaccacctgcgctttcacttgaccctgggctaaattcgtcgtgcctcgcagccatgccactcctgccgcgggcactgccgtgggtagccgcacccggatctcaccatgactgggcctctgctctcgtggggtggccatgggaggtacggttcgccggtcattcgacgccttcgcgatacttcggagcactatgggacggagtgcgtctctgaagaatcagggggatgcaaggaagcttccccaaccaccaattcggcaaacggacggtcggagctccaccgatttctcgccgtgttcatcctcggcagcggatccgccttgtgccgcgtatggtgctcctctgcgcgtcatctgtgcggtgaggacacgtgtcatctgaaaggcaagttggtacctggaatctcaagtgctaggagaagaacaggtggtcgaagaggagccgcctaacactgaggcatccgacttgatctaggtggcgtctcccagtcagctttctggcgccaaggatagattttagatcctgcgatatttatctcttattttgtaagacttccgctatgtaataaagtactctgattatattgtgannnnnnnnnnnnnnnnnnnnnnnnnnnnn

SEQ ID NO: 550 - DNA, 803 bp, Zea mays
  Peptide Sequence Number=SeqID_11255
  Probeset Number=SeqID_14953
catcagagcactgtctgtggtcattcgggtattcctgtcatgtatcgcaggctgaagcaacttttcgcatggcaaggcatgaagaatgatgtgcaagtatttgtgttgtttgtcaacaagctaagccgaacaggtctaagctgcctagcctcttacaggcccttctggttctgacgatggcatggcaagtcatttccttggattttgtgactggtttacccttgtcaggaggattcgaccgcattttagtggtggtggattcttttactaagtatgcacatttcctgggcttgaagcatcctacccatcttatctctgaccgcgaccgtgtttttactagtcagctctggcgtgatttgttcaagttggctgatgtgcagtcatgcatgagtactacgacgtaccacccccaatccgatggttagacggaaagggttgatgagtgcatggaaactttcttgagatgctttgtgcatacatgccccatccaaatggaattcatggctagcgctggctgaatactggtacaacaacagtccacattcatctatcgtcccccctttgaagctctttatggctatgttcctcgtcactttggcatttcagtggatattgttgtacgtgttggcagtttgtcaccatcaactcatgaccgatgccatcaagcttcatcttcctcatgccaagcatcgcatgaagagacgagctgacaagggccgctttgagcgacaggggtgtttttgaagcttcaaccatatgtgcattcgtcacttgttgcccgtgctaatcagaagttagccttt

SEQ ID NO: 551 - DNA, 1142 bp, Zea mays
  Peptide Sequence Number=SeqID_11256
  Probeset Number=SeqID_14954
ctcacacattcaagccttcagttttttcacccacttgagctctctaaaacctctcgtatttcacatttttcctcttggaactcatctcctcggaggtacttgtcaagatggtgtgtcgtcgcaatccctccgtggtcgagttcagtagtgcctccgatgaaattcaggaggaagctcccattccttctcctccgcctcgtcgctctctctccaagagaggacgaggttttggtcggctggaaggggagggaccctcgatgccctcataacccgcgcgcggggggcatcgaaaggttggtgcctcccgcccccgccgaagcacctcctccataggatatgctccttgccaggaggaggatggaggtttcgacgacgaggtcgatcctccatcgtccgacgctctcctcatcaccggtctccacatgcatccggcgaccgtgtcctggggacctcgtgaacctccggtcgacttctcttcgaagggagtggactcccttcaatgcttaaggttcacgaatcccaccctcacaccaagacatcctggtgtctaggaccctcggttctagaaccttttccatgctgatttttataattctgtcatcttgtccaagaagcacccagtcattcgacatcgtttcattgactgggaggggtgtgagagtatgggggatgctgatgttgggggacttcgtcttccgaaggtcctcaaaaacacaactaacatgttttccaagtataaaatactgttacaggaaccttcggctttgagatgaaggtgcacacggtatgaaaggcgcggtctgaaagaaggatgaatgagttctgaatctttggatggagaaacttcggcttagcgcaaagacggtgatggagaatgaaaccgacctaactgcttagtcctcgacagattactccttagtcaatagtaaatatcaaggacatgaatgtaattggttgcgtcttgtgcctataaatagatgaacagtaacatcgtactgttcacgttgacttgtaatcactcgcacgtcactcttggattcttaccttctgtcaagtcgaaggtataaaatgtaattaaatattattaatatttgttcatgatcatataatgagaagatagataatctagtgatttaatattg

SEQ ID NO: 552 - DNA, 890 bp, Zea mays
  misc_feature (890)..(890): n is a, c, g, or t
  Peptide Sequence Number=SeqID_11257
  Probeset Number=SeqID_14955
aaaaaaaacaacgtttttcttcttccgacaggggcacctacctgagctgcgcattggattggatctcaggtgaaagggaactgcaggagggcaagacgagtactactcccgcgcgatcctcgccgaccccgatgacggcgagctcttgtcagagtacgccaagctggtctgggaggtgcaccgcgacgaggagcgcgcctccagctacttcgagcgggcggccaagtgaagaagcccgcctggtcggccgcggccgagcagcgcaggagaccagcgcggtagccagagtgggcggctgggcgcgggcggaggaggcggcgggggcactgctggccttcgcgtgcgcgttcggcgagatccgcgcgcgccgccgaggggactcgccagagctccgaccaccgacaacatgatcccagagctccggtcgcgacgagcccaccatggaggagcggagacggagaggtcgagagcgcagagccggagcgaagacgcagatcgccatagcagcggagaggagcagccgagtggtgcgcggcgcgttatgattacggccgctgggttagggttatgagctgggccgttggggcgcgctccggcttgggccgctgggtgctgtggccgctggggaagtggacgggccggtttctaagcccaccaaatatcgggccgtgctcgggccagcccaacgggccgagatggctgtcgagcccggcacgctcgccgggccgagctgagcccgggcccggattaactcgtgccgtgccgtgctcgtgtcgtgctaaaaactcgtgcttcgtgccgtgctaacgggccacgtgctttctggacatctatacatatatatataatggttgtggcacattatatttatattatttaataattaattn

SEQ ID NO: 553 - DNA, 804 bp, Zea mays
  Peptide Sequence Number=SeqID_11258
  Probeset Number=SeqID_14956
gcacgagaccattacctagaacatcctaatcgaaaaatctatgcaatcagtcgaggagagcaacagcgaacatagccatgagcagctcctccggccagtactgctctccatggcgcgccgcgacgacgacgacgacagcgctcctgctgtcactagccgccgccagcgctagcctcctgctaccggcactggcacgagcgtcctcgggcgaggacgaccggattctgggcctgccagggcagcccaacggcgtggcgttcgacatgttcgggggctacgtgacggtcgacgagcaggccggccgcgcgctctactactggctgcaggaggccgacaggacggcggtcgaggacccggacgccgcgccgctcctcctctggctcaacggcgggcctggctgctcctccgtcgggtccggcgcgctggaggagctcggcgcattccgtgtccacaacgacggcgagaggctgctgctgaacgagtacgcatggaacagaggtaacgtatgaattgaactgggtcacaactcacaagcagacgacgaccaagctgctagccgaatagccgatcgacatgtgaagcagtacgtgaaaggttagctaggtgacatgtatatatatgtctcgtacatgcatgcagcggcgaacgtgctgttcttggagtcgccggccggcgtggggttctcgtacagcaacaccagctccgacctaatcgtgggcgacaacaggacaggttaattggccggtgatgtatagttgtatactgatgagttcttcagtctgatgataatctggtttgtctctc

SEQ ID NO: 554 - DNA, 1646 bp, Zea mays
  Peptide Sequence Number=SeqID_11259
  Probeset Number=SeqID_14957
gcacgagaccattacctagaacatcctaatcgaaaagttctaattggaatttaaaagaatccagtcgattatttttcctaatttaataaaatttcgtccgcaaaatgagtgatatcaaagtgttgaacgcctccctggccgactccgatccggagctgtacgatttaatcaaaaaagagaaaaaacgtcagctgtccggcttagagatgatcgcctcggagaatttcaccaccatgccagtattacagtgcctgagtacgtgcctgcacaataaatactccgaaggtctgccggggcagcgctactacggcggcaatgagttcattgatgagatcgaggtgctggcacagaagagggcgctgcagacgtacaaattggacgccgacaagtggggcgtgaatgttcagccgtattccggatcgcctgggaattttgctgtttacactggtattgtcgagccacatggtcgtattatgggtcttgacctacccgatggtggtcatttgacgcacggtttcttcacgccaacgaaaaaaatctcagctacgtcgattttcttcgaatctatgccttacaaggttaatcctgacactggcttaattgattatgaccaactagccaaatccgctcgacttttccgcccaaaagtcatcatcgccggcgtgagctgttattcgcgcccattggactacaaacgcttccgcgaaatctgcgacgaagtcggcgcttacttagtcagcgacatggcgcacatttccggtcttgtagccgctggcgtcacgcccagccccttcgagtactccgacgtcgtcaccacaacaacgcacaaaagcctacggggtccgcgcgcaggcgtcattttcttccgcaaaggcgtgcgcagcgtcaacgccaaaggcgacaaaatcatgtacgacctcgagagtcgcatcaaccaagccgtgtttccgggcctgcaaggcggcccgcacaacaacaccatcgccgctattgccaccgccatgaaacaagccgccacgccgcagtttgtcgagtacgctaagcaaattgtggcgaatgcgcagcggctttcggaccgcctccaggaagcggggtacaaagtcgttactggcggcacggaagtgcacatgcttttagtggacttgcgctccaaaggcttgaccggcgcgaaaggggaattcattctagaggagattaacattgcgtgcaataaaaacacagttccaggagataaaagcgcgttaaatccgtctggaattcggttgggaacgccagcgctgaccactcgaggcttgaaagaagccgatattgatcaagttgttaagttaatggatgatgccttgaaattgggcaaagaaatcagcgataagtccggaccgaagttggtggactttaaaaaattgtgccatgaagatgccactttctcgaagaaaattcgggagctgaaagagcgcgtggcgcagttcagtactaaattcccgcttccgggatatgatgaatgttaatttattttcgaattattttatttaagccatggaaattgtgaaaacaatttttttttttcttaagttttgaatttttgtctcttttcgaataaaaatttgttttattttttataataaaaataaaattctatattattttct

SEQ ID NO: 555 - DNA, 590 bp, Zea mays
  Peptide Sequence Number=SeqID_11260
  Probeset Number=SeqID_14958
atgcacatagactctgccaatgcaagtggacagctgagaagcacatactacatgcttatgaagtttctctcttcactcgatcaaaatcaggtccatctgaatggtcgccaaatggtggacaggattacacaagaaagagtcacgcgagtaattaagcataagctattacatgaagcttcgtctccaggatgcaagccccttcctcatgatgaacgcacacgagacaaagacagatctaaagatgataagaataaacaccgaagctatcgccagatagacagcttcggctcataacggagacgaagtataatgatgatgctgatcgaaagagaaaaagactgcttagtccttaatgacttgtattacggtcataccaggatatttggggcataaatgcacttttactcgggctacgtcccgtgcttataaatagataaacagtaacatcgtactattcacgctgaattataatcactctctcgtgtctttaccttcgagcaaagtcgaaggtatcactgtaatatgaattatgttgatatttgtaaatgttttatgaaatgcgaatatgaataaattagcgagatatagtt

SEQ ID NO: 556 - DNA, 1483 bp, Zea mays
  misc_feature (1483)..(1483): n is a, c, g, or t
  Probeset Number=SeqID_14959
atgttggccgccaatcgcagtatcggcaccgttcttccccgcttctccagtccagctcaccagccgccccccctccgctgctgacactgcgaagtgcgaatcaaagccaccaccgcgcagaaaccatggcaccggtggaagcggagcagcaccggcggagggcgctggcgctcgcggcgcacgacgcctccggcgccgtctcccccatccgcatctcgcgaagggacactggagatgacgatgttgccatacagatactgtactgcgggatatgccactctgacctgcacaccatcaagaacgagtggaagaacgccaactatcctgttgtccctgggcacgagatcgccgggctgatcaccgaggttggcaagaatgtgaagaggttcaacgtcggagacaaggttggcgtcgggtgcatggtcaacacatgccagtcctgcgagagctgcgagggagggcacgagaactactgctccaagatcatcttcacctacaactcccacgacagggacggcaccgtcacctacggtggctactctgacatggttgtcgtcgacgagcgcttcgtcatccggttccctgatggcatgcccctcgacagaggcgcgccgctgctctgcgctgggataaccgtgtacaaccccatgaagcaccacgggctgaacgaggcaggcaagcacatcggcgtggttggacttggggggcttgggcatgtcgccgtgaagttcgcgaaggcgttcgggatgagggtgaccgtgatcagcacgtccccggggaagagggaggaagctatggagacgcttggtgcggacgcctttgttgtcagcagtgatgctaaccagatgaaggcggcgaagggcacaatggatggcattatgaacacggcctccgcaagcatgtccatgtacgcttaccttgctctcctcaagccccagggcaagatgatcctgcttggcctgcctgagaagcctctgcagatctccgccttctctttggttactgggggcaagactctggccgggagctgcatggggagcatcagggacacgcaggagatgatggacttcgcagccaagcacgggttgacagcggacatcgaactgatcggcaccgaagaagttaatgaggccatggaacgcctcgccaagggcgaggtcaggtaccgcttcgtcatcgacatcggcaacaccatcagcgcggcatcactagggagctcgccggtcccagctctgtagctgcgacacttgttcctgcttggatatatcgtgcgataagcaagtatatttggaataaaaaggaactcaatttaaacgcaagtaatactgtttgtctttggtcctatttgggctttggtttattgggtactgcatagttttgccctcctcttgtagtctagtagtaacggatcaaacgttttttactgagagagacaaaaccagtccgtgctgctgaattaaggacacaaatttaaaaatccctn

SEQ ID NO: 557 - DNA, 1167 bp, Zea mays
  misc_feature (1167)..(1167): n is a, c, g, or t
  Peptide Sequence Number=SeqID_11261
  Probeset Number=SeqID_14960
atcccgcgcgcgcgtttggccgctgggcctttatcttctccagccggatctctctgttcgctcgtacccagctcttctccatggccggcttctcctgctcggccttgctccttcccttggtgcccggcgaccttcccatggccggctgccagaccttgctctagctcggctcccatctccctgctcgttcctccttcaagctcccatagccgctgagctctgcccatggccgccgtcgcctgtctgcgctccacctcgccccaagctgcaaccgaccgccatctcccatggacgctgtgaccagccaaactcccttgcacggcgctctgctcgtcgtggagcactgctatcgccgccgcgtcgtagctcccttcccccagttccctcggcgtcccgtccatggctgctcccatggcgctctccccagccgcgcccctatccatctgctcggccgcgccctccctgctcgagcctgctgcgctctccctgatgtccagtgtcgcggcctccattcccctgccgtagagctcctgcgcgtgtccctctgctcagctccagccgcgagcagctccctggtgcttggacccagctcagcgcgttccctgctccctgtcgagcgactctagctcccgcgcccctggtctctgcgtcctcccagcatcgcgaagccagctcccttgctcctccaactcggtcgactgttcttgctcgcttctgtgtcgctcgcagctttccctgtccggttatggcgccctgccgcgcgccctggttctttcccctgcgcgcaactgtaccctctgctcggattcctgttggccgcgccccctgttcctccgggccggtcaagttctttccggccgcgagctctctcgtgtgcgcgttcagccgaggccctatctgtcagggaatacagttgggccatcgtgggccttagcctggtcgaatagtacccggacatcttctacaagaggcagaagcaacagcgacagggagggcagaacagatatactatcgtcttcctccttcctagctgttgttttctatctctagcttcttctagggttagtcctctacctctccctgcttagcgtgctcctgatctcctagcccgatatcgtgtacctctgcttttccttcctgttatcagtaaaaccagtggtgctctgn

SEQ ID NO: 558 - DNA, 509 bp, Zea mays
  Probeset Number=SeqID_14961
gaggagacaacgatgtggatgttcaaaagttacaagtaagtttcacggtacacgaagtcgagtcaagtcaagtgagctgtggggagatgctatgtacagggactgcatcgcatcggtcagcgagtctaaatctgagacacggagcagttcgccttttagccttgctccttgtagggagtccagatgagcttgctaacgtcgacgaccaggtcgctaggttctgacttctgcaactgatttctctcgctgaacccatcatcacgagtgccaccttcaaactgtgaacgaagtggtgaatctggaatcgggtcgcaggagagggtgcgcgtctggccggtgatgaaggcaaggcgatccgatcccctttccaccagccgccgccgccgcgtgcccgcgcccttctccatcgccaccccctcctccgcgacggcacgcacaggccactacttcctcgtccggtcgtcccccaccaccacctggccacctctccttttcctcttcgactcctt

SEQ ID NO: 559 - DNA, 510 bp, Zea mays
  Peptide Sequence Number=SeqID_11262
  Probeset Number=SeqID_14962
gaaaacaattatcattttgatagaatttttgtttgatcaaatgcatgacttgttcgtttcactattaaaaaaacaacgccatgcaccatctagcgtccaggcacggcgcgacaaaaagaaaaaaaacagcgacatgcaagtcttcaggcgcggaaaaaaaaagaccaacgcattctgttccggagggcaaaagagggcaatccattcaaattccttatttttgaagctggagctgttattcctaccaaacacatttctcagcatcaaattgagagtccagctccatgcgtggagctgctctgtggtggagcagcagctccagagttgatttggtagagctggagccctgccaaacacgccctaaatgttgcgaattatttaatataatatttatatatttggtcatagttgaaaccgttaccttttggaaattgagaacaacacttattttattttgagacggagaaagtacgaggagctgttaaatccattgaaaatgtgcatttcaat

SEQ ID NO: 560 - DNA, 1688 bp, Zea mays
  misc_feature (1688)..(1688): n is a, c, g, or t
  Probeset Number=SeqID_14963
actgtgctatatatggacacctattacttgtgctagatgatatcgagttttatgaaaagcaggttccttttactttagagcagcagcggaagattgcatcagcacttaatacatttgtatacaattctttcattcaaaatagtggaagctacagcaatcctcttgtggatgtagctgtcagatgtcttaatctactctatgaaagggacagtaggcataagttttgtcctatttccttgtggttggcacctgctagaaatggccgaattccaattgctgctgctgccaggtctcatgaggcagcatttggtatttttccagggattcctcatcggagctctgtacttaccacattaccacatgtatatccatttgaagagagagtgcaaatgtttagagaatttattgagtcagacaaagcatcgagaagggttactggtgaagtttctgggccaggcccgggatcgattgagatagttattcgtcgaggccatataattgatgatggatacaggcagttgaactgcctaagatcaaagttgaaatcttgcattcacgtgtcatttgtgagtgaatgcggtcttcctgaagctggtttggactatggtggtctgtcaaaagagttcctaacagatctctcaaagtccgcttttagtccagagtatggactattttcacaaacatcagcatctgatactagcttaattcccagcaattctgctaagcttctggataacggaattgatatgattgaatttcttggtcgagttgtcggcaaagcactctatgaggggattctgttggactattctttctcaccagtatttgtgcagaaacttcttggacggtataattttctggatgaactatcaactcttgatcccgagctttatagaaatcttatgcaactaaagcactatgatggagatgttgaggatctatttttggattttactgtaactgaagagttgggtggtaaaagaatcgtccatgagcttagacctggtggtaaaaatatatcagtgacgaacgaaaacaagttacactatgttcatgcaatggcagatttcaaacttaaccgacagatacttccatttgcaaacgcattttatagaggactcagcgatctcatttcaccatattggctgagcctgtttaatgcaaatgaatttaatcagttactttcaggcggactacaggattttgacgttgatgatttgcggaacaacaccaagtatactggtggttatactgagtcaagtcgaactgttaaactcttctgggaggtcatcaaagcatttaagccaacagagcgttgtttgctcttaaagtttgtgacaagctgttcacgagctccactgcttggattcaagtacttgcaaccttctttcacaattcataaggttccatgttatgtaacactttgggcatcaattggaggccaagatgtagatcgtcttccatctgcttccacatgctacaatacgctcaagcttcctacatacaagcggtcaagcacgctaaggagcaagctgctttacgccataagctcaaatactggatttgaactctcgtagaggtatattcagtggttttgtaaccctgctttggttttgctgtgaatagaggtatagcaaaattcgatcggatgtacaattgcatcttgattaatcggagtaacagcttcn

SEQ ID NO: 561 - DNA, 520 bp, Zea mays
  Peptide Sequence Number=SeqID_11263
  Probeset Number=SeqID_14964
acatcatacaacagtggttagtggtttgatgctttctagtcttccctccatccttgcgcagtctgatgaggagagaagaaaatgggagcttgctgggccaggggtctctccttcttggcagcccctcttcttgaggcctgacccccccctcacccccatggagttttagtgggtagtgtgagtgtttattcatggatgttttcatttatgcgtgctgtcggcctccataggaaggaactgcaaatcagaaggggcaccttaagagaaaatctgctgcacagtagtatgcaaatatcctggtagttctaattagaatgacggttttctaggagagaagcttcctgcatgacgacttctctaggagagaatgtgtatcagcatttgacgggagcttcctgcatgacgacacatcaggcctatgatactagcgtatcaacttttagttgcatgaccttttaattgtagattgtacatatacttgtacatgacttttagttgcaacgacaacgatcatctattc

SEQ ID NO: 562 - DNA, 1466 bp, Zea mays
  Peptide Sequence Number=SeqID_11376
  Probeset Number=SeqID_14965
attggcttggcttgctcccccaataggagaaaagcgaggattcagaatcctcctcttcctcctccccttccacgccatctctctcttcagctagatagcttctcgattcaccttctttccttgcactcgtctctagcagccgtggtgcagctaggtgattgagatatatacgagatgcagcgcacgaccgatggggagctgtagctagagatcgatcgagacatgatacgtaccaccacacggtcgcggccagcagcagcaggaggaggaggaagaagaggaggaggctgtcgccgccatggtcccaacaactaggaacctgttgttgcaccatgacgtcgacggcaagagcagccgcggcaggccgtgctacccctaccacccggctggccagtactacgtcggcatcgccgcccaactggaggcctcggcggcatccgcagcgtggcagcaggaccaccagagcaagccgtcgagatcccctcggttgctgggcatggcagacgacgacgacgacgacgacgacgagcagccggacgcggcggccgggcccggcacgagctcggccgcatccccgggaggcgtcggcgcaggaaacggacgaggaggagactggctccagcttggcctagccgcagccgcggcgtcggcgtcgttctccggcgacaacagcagcatggatccggatcccccgggtcccacggagctggagcttttcggctacgacaagcggaacgcctgcaggatgaggcggccgccgttgttcccgctgccgcttaggagctaccacccgccctacggctacggacggtatcgaccggcggcggcggcagctgcagctagccggtccatgccgtcggcgccgttcatgcctccatccaggtgctccagcagcgatgccataataagagtcatcagcccgccgcggcggcggacgacggaggcgcccgggatgtggctgacgcttcaggcagctcccaaccaaagtagagagcctgttttgcctcagatagcaaagagctacctaagaatcaaggacagcaacatgaaggtggaggtggtgatgaagtacttggccgagaagctaggggtcgcgcggtctcgttctcgttctcatcagcaggtggagctgacatgcagagggcaggtccttcctcccttgctgctggtgagggacgcgtgggagacaatctggtgctccacggcggcggcggcggcgcaaagggagggagtagaagaagagacaccagccgaccacctgactgcgcggcggcgctcgtcagctgctactgaccatgtcatgacactgtgttacagcacaagtaggaacagcaatgcaagctagttagatctgtaattaactccacttgttggccgacatgttctttggggtttttttaccaactccgatcacttatggctggctaaccgatgatgcgatgcttggacgttggaccaaccaaccg

SEQ ID NO: 563 - DNA, 1444 bp, Zea mays
  misc_feature (1444)..(1444): n is a, c, g, or t
  Peptide Sequence Number=SeqID_11377
  Probeset Number=SeqID_14966
gcacgagaccattacctagaacattctaatcgaaaaacgaaacccatgtcttagcgcggccttggtgccgtcgactcgacgcgctccaccatggcgccgccgcgaagcctcgccggcgccgccatagctgccacagccgcagccatcatcctctcatgcttgttctacaggcgcaaatgcgctcgtctggccgcgcgggtccgcgagttggaggcgtcactggcggtcactgcagagaaggccgccgccgagcgccgcggcagagtgcgggcccagcagtcactgagggctctgagtcagctggagcctggttccgacgaagcgaggccgaccaaggccgccgcctcagcatcttacccgctggtgccgattggtactgtcgagtcctgcttctccactaggaacggtacaccaaggcagcctttggtagttacattagccagggcaactttggtgcttgatccagcccgagtcccagcagcagcgctggaggggctagctagttactcacattgctggatcctttatgtttttcatctgaacactgatcttgataaactgtggaaagatcctgctaggtctaagctaaaagcaaaggtaagggtaccgagattgaaagggggcaagatgggggttttggcaactagatcgccacatcggcccaatccaatcggactcagcgtagcaaaggtggaggcggtgaatggacatactcttttgctttctggagtagatttggttgatggcacgccagtccttgatattaaaccatacctgccatattctgacagtgttaaaggtgcagctgttcccagttggttagaggttgacggtgcgttagcggtggagtcagtccatttttccgaacacttcatttctgcgctctccacctgctggatgcatgtacagatgtcgctgtatgcttcagcagacgagttccaggatctgatcaagcaggccctttcctgggacatcaggtcgatatcacagcggaaccgtccccatcaagtgagcgtggaagctgatgccaacggccactgtggcgaagacactgatgatgaccaccaccacagggacacaggtcgctacggtgtggtttaccacttacatcttgaaggcatcgatgtgtcgtataggatcgatcagggctccaacattttcgtcgaggacgccacccttcttccagacgccgtccagaaacggcatggttatttggcgtggagggacaaacttggcagcagcgttttgtagcatggccatggcgcagcgttttgttatcgttttcaggagtgctgcagtgtggtgtaggatgtcagtagtgatgccaatgaatttgaatgtggtggcgtctagtatctgaattggatttggaacgtataccccctgttttgcgttgagtctctgatttcttgatgttacacacaagcagaggatctggcagatn

SEQ ID NO: 564 - DNA, 612 bp, Zea mays
  misc_feature (1)..(1): n is a, c, g, or t
  Peptide Sequence Number=SeqID_11378
  Probeset Number=SeqID_14967
naccacayccactagaaaaccatcttctrgtttgttcatgataccggtgaaactataactctttctatataagatcgcataaatttttcatgtcgaaacagattcttgcttatatttggccacaatttggcttccgagcccatcgacaagacgacgactagacgagtataggggtagccctttcttctgtctggtttacgtcgaaacaactggctcagaggcccttgcccttgcgtggattctcttcatgactgcattagctcagtgcccgcacgttgcaacgggattatataatagctcgataacttatatatacaaatgtgtgttatactgttatgaaatggaggacgacatccacgagccgtccgggatgacgttgaagagaaactcgggcctgtcacgcacgagcactcaccatatcagaagccgaagactccgccgccgcggcagaggatgacgccggaacttggaccatccgatccgacgccgcccctgctgctccacacggacggccacccggacgccgagcgccgagccgcccacaccgctcctgcgctctacgcccgacgtccacggccaccggacgccaggcaatactcggtatcaaggttt

SEQ ID NO: 565 - DNA, 828 bp, Zea mays
  misc_feature (828)..(828): n is a, c, g, or t
  Probeset Number=SeqID_14968
gcacgagaccattacctagaacatcctaatcaaaaaaataacccattgttccatcaggcaaggccaccttgcgaggcacccatgacctctgccaaagaaaatgttccggtggcgccccaaacgctgcctcgacaaaacaggatggccaacggcgccactgagccgccggtaagcggcgtcctcaagtgcacgtgtttccgcctgcccagccgcaccaagaagcctctgccgccgtctccggcgccgaatcttagcagcaggagcgcagtggctccggacctgtcagcaacgacgacggcgtcccagtcccatcgggtcaccttccgggcgtcggcgcccctctccacgtggtggccgtcgtcaccgtcagccgtctctgctggtgccggcgccaccgccactccagctcctggtggcagcggcgggatcgccgtcgcgccgaggagggcgtcgtcggcgtccgtggcaccgactatgaaagccggtgccgggagcatgtcgtcctcgtccttctcgcactggcgctgccggtcgctgtcgtcgtcccgggtcatgccgcacggcggccgcgcgtccttctctttccccgtgtcgccggcgtccgcgtcgtccagttgcatgagcacgccaaagataccgcaagggtggcagcacaagtagctggcgttcgttcgttcgatcggcgcctcagcagcaccatgctccgtgtgtttttgtgcgtacgctgtatttaacactgggtaattcggtcgtcgtcttaaaaaaaccgagatgatgtgcgtcgtgagttttccttccatacagataatatatatatgtaccgctgtn

SEQ ID NO: 566 - DNA, 500 bp, Zea mays
  Peptide Sequence Number=SeqID_11379
  Probeset Number=SeqID_14969
gaagactcataagcgacagtttaaaaagatagcacactaatacaatcacacggcctagtcgactgcaaccagggcttgtgagggctaaaaaaactcatacaggtgctgatttaaatatacatagccggtacatgggctccgggacctcgtcggcgccgcgagcagcaccggcagccgccatagtacccgcggttgcagcacccccacctgcagtaaccgccgcggccgccgccagggtagccgcccccgcccgggtagccacggccggggtagccacccccaccgcgccagccgccgccgccgccacggtagtcctgcacgtcggctttgttctcgccgccgtcgtccttcctcggttgggcttggtcgtcgttagctgctgctgagacggcaaggaaaacggcggcgagcaggagagctactagcacgaggagtcgcttggacgccatgttcttgtgtcttctagctttctgcaaactgcgatcgagtgtgatgagaat

SEQ ID NO: 567 - DNA, 770 bp, Zea mays
  misc_feature (770)..(770): n is a, c, g, or t
  Probeset Number=SeqID_14970
atcttctactcctcaccctggcactaaactagctatactacccaagaaaacgccccgtcttcttgccgctctccaccctgtcccaatggagctgagcgccgtcgtcgccgcatgtactcctaccgctactactactccagatgcaacggcctggccagcaccgcctggggatccaagggagcagccggagcgaacaagcctcatagacaggcgaggccggccgccggtgagccgcagctcgcgttagttgagctctcgcaccgccgtgctgctgcatatgcagatatgcttctcgctgcgagctagctgtgcgcgcgcggagcatgcatgggtgcagatcgaggtacggtgcgaggtgtgtgcgcgcgtggccggggaattgaggcgtcatggtccgagatatatacatgtctagctcgatctcttgctaggtatcttatgagatttattgttcttagtttcagtattagcactccgatccctggaatgaacatgccttctatttcctttttcctctcttgtcttaattctgtgtcaaagttgctggccattttcgctgggattaagaagctgtaagtgacgcattcctggcgtgtagctcgttaattccttgtgatgttaggcatcgttcccaacagtctcgtcttcgatcttgagcagcattgttagtatatatgtaagcagttgagaaagaccaaaagtcttaagcctggaatgcatcagttacactttgtcatgtgtttcaatgtaatctctctgtttttaacctn

SEQ ID NO: 568 - DNA, 1162 bp, Zea mays
  misc_feature (1)..(2): n is a, c, g, or t
  misc_feature (1161)..(1162): n is a, c, g, or t
  Peptide Sequence Number=SeqID_11380
  Probeset Number=SeqID_14971
nngccgatctcatcctcctctcttggtgtctccctcacgcgagcagttccttgcagcagcactggccgccctccactcctagccacgccgttctctgcctcactggtgctcgcccctccccatggtcgtccctccctgccatcggcctctcctgctggccggccgccctcctccttcctctggtcgcccatggtcgtgctctcggctccctccgttccagcccccataagccgctcagcaccgctccagctctccagtgcgtgccatctccctgactctagtccctcccatggacgccgccccctccctcagctcatccttccagccgccatggagctcgcccttgctcggcttctccagcgcgcctggccgccgcgtcgttcctgctcatcaacgccagcgagcttggtccctgcgccctcccatctccctcacgttctctgtccagctgccatgggtgcgctcgcctcggcgctatccatcagcgccaccagccgtgcccttgtatcccgcgtcctcgactcgtccacaacgctaccccaagctagggccttgtcgagctccctcagctcgcccccgaccacagccgcacgccaacctcacccttggtcatggagcagcaacaaccatggaacccctccgtgtcgcgccctcgatgtgctcgatgaaataccgcagcgagctccacctcgatctgtgcagccctagttgtgacctcgccgaacctcgcgagacaagccgcgcgatgattgtctggtgttcagtgttatgcttaaactggaaatcatcgtctactcggtacgttaattgatcacgtgctatggaagacgagtggaattgatctccaagtgatgctgatggacgaagctaaaatggatgaatcaaccaagtgccaggatagaagatgctcaccaagtggtcgtcgattaacaacactaacttagtgttatcccagatcctactaaagcgtctccgggccctcacccgaaaggagacgacgaaattaaaaagatggctgaagctatcatggatgaagttgttaatcggctcctgaacgaagctacggaagttgtacttagagaagattaagtgctattgtaaaaacttctgaaatgtaatatgtgtaacatcttgtaaccctgaatataatatacttgtttnn

SEQ ID NO: 569 - DNA, 914 bp, Zea mays
  misc_feature (1)..(1): n is a, c, g, or t
  Probeset Number=SeqID_14972
naataacgctgagtgaccactattgttattattatcattatcattattgtaagtaaacaaatacgagaagaaatgaacggacattgccaagccgtaaatcactcaccatgcaccgcgtcgtgtgtgccatagggactagggaaggggtgggcctgtatatgcttcctgctggggaccccagaaaaagatgcccccgttgtcaaacttgccttccccgtgatcttcttgcgccagccttgctaattgccatgctgcgctgccgccgcccgccttcccttctttcatcagaataatgccacctccgtccatcaatccaatagtataatcacctgtaggtacacccagtgcagattctggagtggacgaatgagcacttcttctctggggtgcaaaaaaaaaaaaggaagtgcgcactagcggttacagtcaaaaggtaggtaggtaggttggtacttcacctgacagtccttttttccctggctcaactgcatgtcctggtagaggaacttaagtggcctgacttgctccatggaacctttgccgagacgaccacagccatgcagaaccagagccagacgctctatgatgacgtgatcaaggcagagagccaattcagcatggaagggatatgtgcttcttggttccagaatcagcagccacagcaacagcttcaggcaacaccagacatgtatgacaaggacttgcaaagaatgcaactgtcttttgagaatatatagatacattaagttgatacagaaatcatcctccacagctgctcctcagttgaagacctctatatggcatcagcatgatgataaacatatgaaagcatactgggaaagccttgtaaccaacatagcactcaattttggacctggcattggcaagcaaccgcttcctcaagccgagtcggc

SEQ ID NO: 570 - DNA, 660 bp, Zea mays
  misc_feature (660)..(660): n is a, c, g, or t
  Peptide Sequence Number=SeqID_11381
  Probeset Number=SeqID_14973
ctggcgctcggtcgcttctctctggtctccacgcgcaccgcgtccagctccctcctccagctgtgtctgctgctcgccccagcctggagcttcgctcggcttccaactccggcgcccggccgagctccctgattcttctgtacaacttcgatggtggtacaatttgttcagtggttattttgaaagaatggcttggcatccatcgcgtcgctgctgctgaaatatctaaaggtctcccaatttttggcattggtgttgggcatagcacatatgacaaagcttcggtaattactctgatgcttgctatttgtttggtaggctatagctacagccaaaatcataaaagtgcctggtttgaagctatcagcactaagccaaataaaggattccggctctcatcaagtgactccccctcatgttgactttgcggatgtctcaattctagtggtggagctacgaacaacaatccgatgtcctgatcgagagcgatggagttaatgtttgaacttgtgtgtttgaacttgtgaactaaaaatgtgaactatggatgtgaacttaacttgtgtgtttgaacttgtgaactaaaaatgtgaactatggatgtgaacttgtgtgaatttgtgaacttatgtatttggacttatgtgaatttgtgaactn

SEQ ID NO: 571 - DNA, 860 bp, Zea mays
  Probeset Number=SeqID_14974
atgagaatgaaataacagaaaggtatcataaccacataccttgctttcctggaaacttaccaggttctagcgccaggaagcttgcttgcttccaccggatctgttgctactcacaagaacgtggagaaggtgcagcagcaggtgatcgtgtgatcggatttggcggcaactgtggctgaacaagcagccactgatcgggtggttttgcgtcaaaaaattggaggagacagatcgcgtggtggctcaaatgcgcctggaacaaatgggcaaggagttgggagaatcatttggtgcatcacaggagtcgggtggacaacaacaacagattcctcaaattttcaaagccgctcaggagaagggtgatccaatgcatggtggtaagggagggatgcatggtttacaacgtgaacctcgacccacatggggatcatcatcatcaggtgcacaaatgggtgagcgggaatgatatttgggattttgttgtgttggagtttcctaaggagcaacatgaggataattagagtacagatattcagagtattttgatgtggagttccaggatattttcactactccaactcaattacctccagccagggtatatgaccattacattcctttgtcagctggggatactcctattaatttgaagccttacatatattcttcttttcataaaaatgaagttgagagacaggtgaatgggttgctcaaggctaggtttatcactaatagtgttagcccttttgcttcccctgtgttgttagtaaaaaagaatgatgattcttggaggttttgtgttgactataggaagttgaatgatctgacagtaaataatagatttccgatgcctatagttg

SEQ ID NO: 572 - DNA, 602 bp, Zea mays
  Peptide Sequence Number=SeqID_11382
  Probeset Number=SeqID_14975
aggatccaccctgctccaggtgaactcggtcaaaggcgaacttatcctggttcaacgtcaaccttttccttggctcgtttcagtccagagggatcaggagtcagcatgaggatcatccgcgccctgttcagtgccgcaaaggctgctgaaaccgccgagattacatcatgggatagattccttttcaaggcaaatggatacaacaagttaggtctttactcagatgatctgctatcagagcttgatgatactgtggttgaagctttgaaacgaatcccagaggagacaatcaaccaaaggatcttccgagctaaccgagctgccttgctaactatgaacaaaacaatcctccctgaagaccaatggacgaagattgaggatgataagccgtacctcttcccacatgttcttcagattcaaaaggaaattgaagaaaagaagacctgggatgaaaagaacccattgtagatctacctgcaccctagaaaatttgaatataaagttattaccacactttgtggacaagttaatgattgtaaatattactgtaaattatttaatggcaatgtttaaattaaagccatcaaataaacatctgcacc

SEQ ID NO: 573 - DNA, 723 bp, Zea mays
  misc_feature (723)..(723): n is a, c, g, or t
  Peptide Sequence Number=SeqID_11383
  Probeset Number=SeqID_14976
tgccaaatcagctgctagggctgcattcatccacctcgtgcttatcgtctactccaacgccgactcctgctcgtcggtcatcgcctcgtccagctctctccgctcctccggcctagcctagcccctcctgctcaccacgtcgtctctagaatctagcctacgaccattggcggctggtgcccccaccagcaatcggtggtcatggtccgtccctactcaccccgttcggatccgctatgcgcgaggcgcaactgcatctatcgtattcctggctgctccctccctctccgcgggcgacgcgcatctytaggttcgatcggggtctgtccgaccggccttgagcgcgccttcgcaggccccttctctgccttcgatgagtgcatttgggtgacgtctatggtggtgtgctgtgagcaacgcccacacaatgtgatcgggctgcacgccaatgttcaacatgtgccccaaccagaacatggctgaaggtgcttcgtataactaaatctaccatggctttctaggaaaagatggaatggaactcaattttggtggccacacaagtgtggaaacttgaattcatatatacttacactcaacattagcgcaaacagttgatgaccaagttttcaattagtattttagtttggatttagtgtacaataatgtatgagttatttaacaatgcttatttatgatatattgaatgatacttatatttatcan

SEQ ID NO: 574 - DNA, 972 bp, Zea mays
  Probeset Number=SeqID_14977
aacccaagcgcgcgggcaacgaagcgtcagcgtcacagctcgaactcgcaactcacccgcgagccgcggcggtcatataaagccacaaggaaaccgccgcgaaactccaacatcgacaacgcgagtacgcgaccacaaaccggcgggctgcgccaatggaaatgccggcggcgacgcagggactgctggcgaccacggtggtggactggaagcttgacgagctatgcgcctgcctcgacgacgcgctgtcgtccaggaagcggagcctctacacggaggagcggctccgcgcggagatcgacgcgaagaccgacttcctccggtcgctcctgtcctccgtggcggagtgcaacggcggggcgctcccggagcacctggccgaggccgaggcacgctttgctatcctcgcggccacgtccgatcgttgggcgcggcgcacagtcgctgcacctgaaccgttgccaggagacggcggaggaggacgccaagcgcgacgctgtggaagcccgcgccaacaaggagggggcgttggatggcatcgccgaggagtcgaggacaacgacgccgagtgcgagaccgcggagatacgcaggagggaggcggcggatacggttaccaagaagcgggaggccgcgggaacaagcaaggaggtgacgctggacgctattgctaagaagcgcgacatcgatcaagaggccgcggttgaggctggaaggggggccgtgcagtgtcgctggtggaggaagtgcggctacggtgcttcctggtgccgtgcagcgggcgtggtggtcgcggtcttgttggctttggaattggccgccgtgcagtcctgaggtgcttttgatctcttgttttgctgtaaaacttgcttcgacggtcaagctgttggctacttacattctgagaaccatgtttggttgtgaggtttacttgcagtaaaccagttctggacgaaatgaaagtagtactttc

SEQ ID NO: 575 - DNA, 558 bp, Zea mays
  Peptide Sequence Number=SeqID_11384
  Probeset Number=SeqID_14978
cagttccagacctgaagaaactccgaccggccggtgggcggtggcggcacggcaggatctgtgccgcgatggcgacgtcgaacacggcgcggatggaggacggcggcggcgacctgcggagcaccatcaagaagtggaatatcatctaccctgtctacctcaactccaagaagacggtcgccgagggccgccgcatcgccgctgccaaggcctgcccggactccacctgcatcgagatcgctgactgctgttgaggtagacagggtgacgacggacaggggcgggagctggttctccaacaacctgaaccgtggccacgtggactacttctactggctgctcgccgcgctcagcgccgtcgagctcctcgcctatgtcttcttcgcggtgacatacaagtacaagaacagaggagccgtacatgcaactgttgatggttagcgggaggagtaagtacatagtataggttatggtgcatcgtacttgtaaatctcttttttttttctcaactaggatttgtgatccaaactttaccttcgataatgattcccgtttttt

SEQ ID NO: 576 - DNA, 522 bp, Zea mays
  Peptide Sequence Number=SeqID_11385
  Probeset Number=SeqID_14979
gccgccgaagaaagtaactgagctgctagggtttatagcttccgcctagatcacactcctaggtgctagggttttgcagagtctggtgatgcgaggaggaggtgggatgcgaagacgatacggcggcatatacgggaccggcggcggtacctgtactccaagagcctcgaggcctcccattgggtgctgttggagtaggagcgccgtatccgggcgtcgctagaggagggaaagcccattcctaccgagctccgcaacgaggagcacgacctgcggaagcagatcgacctaggagcgtggagtgttggaggttgcagcgatgtctttctcgctaacctgcaaagattcttttcatcgaagcactcggatcaattcatggctcsgactgagaatcggcactatcatttgtatttgatatgttttgcatttccttctgttttcttgtcttcctgctagtttgacttggaacatgtacaaaataaactataattttgagtatatatagkgtttttttagtgtttt

SEQ ID NO: 577 - DNA, 924 bp, Zea mays
  Peptide Sequence Number=SeqID_11386
  Probeset Number=SeqID_14980
aggttagttttggtgcacgttcaggtatactccgtacttcctccggccgccactacacctactcatctaccgtctacaccagttgcagatcgtcgccagccaccgagccgccggccgcgtgcctctcgcggtctcgcctcgcgccgtctcgcgccggaggccggagcatcgccgctgcgccgcgagcactccctcctggcctcctgggcctccttcgcctaaccgtcgcggcacccggagaccggagcagccgagcagccgagcaggggctggcgcggacggggatcgccggatcggagcattgagcaggcgagcacctcgtgctcatggtcgtgggcgccccgcgtcactgccaggggcagatctccgaagcccgaagcctgaaggtgaagctgttagctgtgaagcagactgcctacaagcaaactagatccaccactggacgaaagaacggagcaaatttcttatcgattatttaagacaagcaagcagacgggcctggcctggcaagcttggagccgatgtcgggcgtgacaagcgtccaggacaccagcgagttaaaaaacggcaaggaggagctaagtgaactcgacgcgctggacagaggctacgacgcttgagacaaggagcaggtgaggcgaggaattgatttgcggtgctgagagttgtatacggcgagagagaaacttcagaaatttgagctcttgggagggatgacgtacatgggaatgcagttcgtgaaggagataaacttcatgcgctggcttgagttggattagagagagatgtggatgggataagaacgacggaaatgactagaaggatatcttacggatcaggtagaaaggagaggccagtggagataaaaaaattaaactttttttttctacccaaaaactgaaccaagcttcagcctcttgagac

SEQ ID NO: 578 - DNA, 561 bp, Zea mays
  Probeset Number=SeqID_14981
gttacatctcgaggaaccgacgccatgcaaatcaatcgaccggagagaaagagagaggggagccaccgcgagtaatcaccactaccaccctcgctcgggggtgagcgcgcggtcggggggggtcacctgagcaaccagatcgcgtcgggggcggtggcagggaagaaagacgggcttggtgaccacaattcctcgtcgtcgccgtgacttcgtcgtgcatcgcgggcaaccccatctccgcctctgtcgtcgacgagcaaatagccgaggaaccaggagctcagcaggttgaaaaggtggagcaggagctcattgaaggcaagttgtgtcattgaccactcttctttatccaataatgttctctataattacaagtacaattttgaaaatgatgaagtggataagaaagagaactcgttgtattaaagtttctatggtcttactcgtattcttgtgtttcctcgtgttcactagttttttattttaaaaagcaaacttaaccatgtttacagtttgccttttttcaaaagaaaaattaatcggcgaggattaattcatcgg

SEQ ID NO: 579 - DNA, 573 bp, Zea mays
  Peptide Sequence Number=SeqID_11500
  Probeset Number=SeqID_14982
attttgcctcaactaggccgcatctagcgaggttagttcaccggcttcgtccacgatggtcgatgggcacttgccctgcctccataagtttggcacgaccctcgtcctcgctcgcgccagccctgtccgccagaaaccctgccgccgtgcgcaatttcttgcatcggtcgtcaatgtcccgattagccgatgttcggccctctgcgtccaccgcgggtgactcaccagctcaccaggaggagctcgcgaccttctctgggggatatttggaacctggtgtcctggaattcctcaccggggctgtgccagccgccgctggatgcgcttcaccgtggccagaccaccacgctactgtcctccgatcaatcttggaacacttatgaagcctggagtttgtaaacaacatggtaagccttctcatggttcatcatctatggaactatcatctatacatatatgtgttcataattagataatttatatgttgggagtataagacaaaatacccaaaatatttaccagacaatattgcttctcgatcaagtaaatggacgaacatcctcgattcttgtc

SEQ ID NO: 580 - DNA, 665 bp, Zea mays
  misc_feature (665)..(665): n is a, c, g, or t
  Probeset Number=SeqID_14983
gaaacttttcgaaaatccgccacaaaatcatagttcccgggagcccagcaagtcgtcaaccgctgcctccgccaccatcgggcgactgctcctcctctgcgcgcggcgcgcggcatgggagcagaatatcccaccttcgcggacgtctccggggcccgcgccctccttttcctcgccgactccacgcccccgccggccccgccttcgcctcctcccgctcacggagtcacggcgatgagttctgctgctgctctggctcctcgtcctcctactccgccgcgtcgaccaggtcgtgcgtctccgactcggcgcagcgcggccgcccccgtcgaccccctctgcgtgctctccgttcatccgttgtcgcctccctccacctcatcgaacctaagctgtgcaagtgctctgctcgccgaggccacaagcgcgctgttccataccgaggcagagaaaagacggaagggcgtgtggatcgagatgaagcgaacaaagttctgaataaatgttcaggtcgcagactggtctgatgaagcgaacaaagttcagtttatagcaaacgagatatttactgtagggccggctattggagaggccaagttgtgtcttctgaagtgtatccagtaatttctacctgctgttgtcataatgacctggttttgccttcn

SEQ ID NO: 581 - DNA, 507 bp, Zea mays
  Peptide Sequence Number=SeqID_11501
  Probeset Number=SeqID_14984
gtacaccacaatataaatgtgtcattactgacccgataataataaatgaagggatgaaaggaaacacgctgaccaagaggtcaatttaatgattattatgtgttcattgaactcaaggagcatgcggactatttgaagacagaaatggaagataaacagaaacgcttggaagcagtgaagaaatcacttatatccgtagaagccaaagatggagacatcaacaagaggatagatcgggccttcagtaaggcgcggtcgaggagcccgagcagcgcgccttaccgaaggcctcgagagtctccccgccgccaccgttgccgcggcatttcagaagcgctgctgctacagcgaccgcggcagctggtggtggctccacctccatggttgtctgccactttgcctttgcgatcttgggcggggctccctcttcccctgtggccctgcactgcttttctttctagtctgaactatttttcgattaggatgttctaggtaatggtctcgtgc

SEQ ID NO: 582 - DNA, 817 bp, Zea mays
  misc_feature (817)..(817): n is a, c, g, or t
  Peptide Sequence Number=SeqID_11502
  Probeset Number=SeqID_14985
gcacgagaccattacctagaacatcctaatcaaaagactttgagccattggtcctcctcgtgatcatggaacccccgttaccgtgagtcgcgtggtcgttgaaacgaaagtgcctctgccgggaacaagagagagaaagcgggtagagctgtcatgaccccgacaccgcgcctcctttggtgcgcagccgaccctattgccgccgccgcgggactctactggcgggaggctcctcgtctctacctcacgccggcggacctcgtgcagtcggacccgaccaccgcccagccgcgcagtggacggatgcgaccatagagtgatggtgaagatgtcggagttcggcgctggccgtgacctgcgctccgctgtcgattggccctcctccatcggcggaagttttctcgggtgcgtgttggggcgaaggcgaagacgctacccttcgctcgatgccttcgccagtctcgctgcgccaacgaagacgacgatcgacagtcttcgctctttgtccggcacaccgaaggacgaagacctatggcgaggtcgccccatcccgcggtgtcgcccaacactggagcccacgtgcaatccggcccgtcataacgggccccgcgctatcactgcgcagtacgagcttaaattgtaaaggtttttatgttattacagtctgtaaccctgctttaatgagaatattccagggggaacctaggcacctgagggcacatgcgtccttaatccttgacgctgggcactcagacacctataaatacccccgcacagtgcccttgagaggctagattaacagagctattgccatctn

SEQ ID NO: 583 - DNA, 904 bp, Zea mays
  misc_feature (904)..(904): n is a, c, g, or t
  Probeset Number=SeqID_14986
actagctagctaggacgtcggcacgtcgctgcttgcttccacgcctccttacggtttatccaagcacagcgagagacctttgcgcgtgtgcgctctcgttcgagctagcagcggcggcatgctgacgaggcggcacggagggttccggctcggccggaagctgctcagcgtctggcgctgggcgctctgccgccgccggcgccgccgcgttcgcggccgcgggtacctccgcctgcagccgtgccaacgaggaggaggcaccaccaaatccccgtccccgtcccccatggcggcgcatgcagtggtaagcatcaagatgatgcagcagcagcagcagaagcacgacgactctgctggctcgccgcggatgctcacgtgggggcggtcgctggcgcggcgggtgaggctcctgcgccggcgcgggggaggaggagggaaggaccggctgctggaggacgccgccgcggatgccaccacgcccaaggggcaggtggccgtgtacgtgggcggcgggggcgagtcgatgcgctacgtggtccccgtggtgtacttcaaccacccgctcttcggggagctgctgcgcgaggccgaggaggagttcggcttccagcaccccggcgggatcaccatcccgtgcgcggcctcgcggttcgagcgcgcacgccgccgtggccgccgcaggcggcggcgccgggaagaaggtgccttctgtctggtggtagcagcacgtggccacacggtggtcggtgtacatacatacacacgtgcatgcccatcaggatcaggccgcagccggtcagccctcctcaggaggatcccgatcgattcccatgggccatggggactgacgatccttctatattttttttctctctccttctcgttagtttgacttttccttttn

SEQ ID NO: 584 - DNA, 929 bp, Zea mays
  Peptide Sequence Number=SeqID_11503
  Probeset Number=SeqID_14987
gcccaccaattctcccggtatttatatttcaggcattcgtagtagaatggcaagaaaaatacatgtcaccaattctttcgtcataactgtctctagcaaatcgtgcatatggtcatgaaaaacattgttttccacaatagaatacactatttatagagtgaattttaaaataggagacgtgatagaagatatgatatgtaagttgctagagacggtctaataataaggttgggttcagtgctcatcaatactatctgatgatgtggtctcgcgcgcgatcggtatcaaccgcatcagtcgcatcaacaaatgttgtgttcgaacggtcaatgggtgtgtcgaccgattggtgtggttagtaatgatcgtgttgggaccatgttgtttggtatcagccattgcattggagtacgtgttattattgattggcctagacggtactaatcttttgttgttgatgtagcatcttctgattggctaacactattttaatcgtttatattctaagttttttaagaaattccaaaaaaaggaaagtcataaatccatcctataaaatagagaaggtgtttgggctcattcacaccccttactctacaattcacggtaggattctactctctgtctcgctatggatccaagatggagtccgaactttgatatgctcaccgacttgcgtaatgagcaatctccacaatgtcccgagacccgtgtcggtgcagggcatgtcttctttgatggtatttctcatgtccatcatcggtgggaggacattcctccttgttcctatttcctgactttgcaacctatattcgtatcctccccttcatatctatatcgaccattcactgatgctcctcctaccactaaacctcctaacaccagtgctcctcctcctcctactactactactgaagcttcttccacta

SEQ ID NO: 585 - DNA, 1454 bp, Zea mays
  Probeset Number=SeqID_14988
attttttatttactcgttttcaaatgatctgtaagctagatttgtactaccaatttttcctgtatataaaaaaaagaaacaccagaaaaagagagaagaaggtttagttttgtgctttgatattaatttgtgacaattttaattttgtttggattttctaatatattggaccaaatttacataagattcaaaatggacacaagcatggaggctgacccattcgctgatctaaacgaaacaactgtgatacaattcgaagaatcattcgccagaaattttatgtattacttctgggtcttttcggaaattctaaagttttttctctgcatagctgtcattatcatcgatattcttctaataattgccattgccaaaacggaaaaactgcgaaagtcacgaatgaacaaatacattctattttacgctatcgccaatctgatgtacatgatcgccgaaccgataatctacctcttcttggcatctattgttagtatacctagcgccgttacattttgcttcgtctcgcaatttgaccattcgatttttatgctgtgcttccttctgggactttgtccaggaatagaatggtacttgacttattacaagtccaacattcatcaaaagttaaaggaacattatttgaaaataatcttcattagtttttcttccgtcttttttttgcaccttctgattaatcaaggcgtttgcttcatggaaaactacatgattcaacaatattttattcttgccacgtatatttttgctgccgtcttaatagtggtactaaacgttttgaaataccgcaacatatctacgaaggagagtgaacgtacaaattattacatgcacatctcgacttacgtagtcggatgttggataccatgctttttatttcatgtattttacatgttcaacaacgaatggaatatgttctggcgaattgtggttgaactaaattacattgctgaatatttcgcttacagtgctatgatattcgtcttgatgattctgcttcggcgcaataaatactaccgaatggcttttgacacaatgtttaaaaagtccaaagtccagaattatcaaagtgacgatttggacaatgacgatgacaatgatttagaaacaggaagtgaatcgagcctaaatcaagaaaatcctggaccttagttagatccttagattttctaataatatcattttgtcttatatgaaatagacactttcttctggattaaaacccattttataaatttagatttaaacagtttaaatattatattattttacagtgattttttttttataaaaattctattttttaaggagttttaatataaattagttatttaatttttattttattttttgtgccattatcgtttaagtcttgtataaaatagtcatagtgtaattttttctattctttttattgtgttataaaatataataaattc

SEQ ID NO: 586 - DNA, 744 bp, Zea mays
  misc_feature (1)..(1): n is a, c, g, or t
  misc_feature (744)..(744): n is a, c, g, or t
  Peptide Sequence Number=SeqID_11504
  Probeset Number=SeqID_14989
nagacagagcaggcacagagttcattcaccgccggctctttcatacttcattcccgaggcagagatttttttttggggggtgaagcaccgcacaactccttctcagttctcagcggcagacatgcagcggaacaactcgttcgggacgtcgtgggcggaccagtgggactacggcggcgacccgagcccgagggcgccgcgcgacggcggcaaggcaggcggcggtgtgggagagaagaccaaggcggccgcggtcaccggcatgaggaaggtgaaagaggggcacgtcgcaggggttccagtggatcaaggacaagtgccagcggaagaacggcggtggcaacaagaagcagcagggctccgaggtcccagggtactgaccccccctgtcctcgtcacgtcagcgctgttgcttggcttcgacacgctgtctgtctgctgcttccggcacacagcaattttttctatatttttttctcggttcttgctgttgcctgttggtacgaatagtatactgcgtataggttgtgggagtggccggtgatctgatctcggtgctggttgcagttgttgagtagtttcatcgtacctgatatgtctccttgatactcaattggtatgtatataaaaggatatttataaacttgtactccctccgtttctttttattagtcgctggatagtgtaaaattgcactatcccgcgactaataaaaagaaacggagggagtatgtttctgctcgn

SEQ ID NO: 587 - DNA, 585 bp, Zea mays
  Peptide Sequence Number=SeqID_11505
  Probeset Number=SeqID_14990
aacgcgcgcaaggcgcgcatcaaacactagtatgatggatcctgggatggtcggacggatgggaagacacgaccggagcgaaaacgctgccatggcttccgccccgtggcgcgcttgtcggggttggaccggcggtgtcccgggctttctggaacggcagcggggattggctggcctcaccgggggagcagcccggctttctgctgcgcattcaagaaaaaaggacctctggccctttgccgcctgtgtcgctcgccctcgccctcgcctccaccccatcgctgatcggccgccgggaagaagatgcagcagctggcggagcggcagatgggagctgcccatggatcgcatcgatcggcggcaaccgagtcggaggatcatggtgtgaaggaaaaggaggagctcctcggcgtcggtctgggttgaagccggaattaggcaccgacgtttcatcatgtttttttttttttctttctctgtcccagacgacggacaggcctcatgaatcatgatgtctccgtgtcactgtgtcggtacttggctaccaagatttgtcttctcctgggccgtagtcaagacatgttg

SEQ ID NO: 588 - DNA, 585 bp, Zea mays
  Probeset Number=SeqID_14991
caacatgtcttgactacggcccaggagaagacaaatcttggtagccaagtaccgacacagtgacacggagacatcatgattcatgaggcctgtccgtcgtctgggacagagaaagaaaaaaaaaaaaacatgatgaaacgtcggtgcctaattccggcttcaacccagaccgacgccgaggagctcctccttttccttcacaccatgatcctccgactcggttgccgccgatcgatgcgatccatgggcagctcccatctgccgctccgccagctgctgcatcttcttcccggcggccgatcagcgatggggtggaggcgagggcgagggcgagcgacacaggcggcaaagggccagaggtccttttttcttgaatgcgcagcagaaagccgggctgctcccccggtgaggccagccaatccccgctgccgttccagaaagcccgggacaccgccggtccaaccccgacaagcgcgccacggggcggaagccatggcagcgttttcgctccggtcgtgtcttcccatccgtccgaccatcccaggatccatcatactagtgtttgatgcgcgccttgcgcgcgtt

SEQ ID NO: 589 - DNA, 706 bp, Zea mays
  misc_feature (1)..(38): n is a, c, g, or t
  misc_feature (639)..(706): n is a, c, g, or t
  Peptide Sequence Number=SeqID_11506
  Probeset Number=SeqID_14992
nnnnnnnnnnnnnnnnnnnnnnnnnnnnnnnnnnnnnntagcgcactggcaacatgcccggatacgcttggtataattagtctaatgcagaagctagcataccaataaaattgaaaaagaaagtgtgggaacgttttcggtggagttccgccctagctctctcattgacatggagaacgaccgaacgttcctaaccaggggcgggcccaagtagagccgagtgaggacacatgcctccactaatttctttgttctaagtactagagtctagctagacttttaccataagttcatctactcggtctaatttagatgttcatactctattattttgttactcgtccctattagtatgtcctcagtcatattttatcctgtgttcatctatgttcctaattcctacccttagcacatgtttcccagcgatgtgatctcctgctgccttccaagcctacaacaacaacttgtagtgcgcacacagagacacccttgggcgtgttcggctggctacaagccgacactgttgcagctgtttggactgctgcagctgcaatccatagagagaaaaatactgtagaagccgcagccgcagccggattgcagccgcagcaagccgcagcgaacaagctgcttttcttnnnnnnnnnnnnnnnnnnnnnnnnnnnnnnnnnnnnnnnnnnnnnnnnnnnnnnnnnnnnnnnnnnnn

SEQ ID NO: 590 - DNA, 321 bp, Zea mays
  Probeset Number=SeqID_14993
agcaacaaggacaggattattacccgaccgaaatcagctctgttgattcacatgccccggtatatcatctgcaggcgggcggagacggatacacgaggaggaatggaagtacatctcagagccaggagggatggacggcgacggtacccggcgtcgtcgtcgtccatgccgtcgtcgtccccctccaggtccacctgctcctccggttcctccgacggctgccgatccgacatcgccgacagcaaaccctaaccctttgcgccggaaaaaacctacgcgcggcatgattgatcgattgaaacaggagcaagcagtagtagt

SEQ ID NO: 591 - DNA, 608 bp, Zea mays
  misc_feature (1)..(6): n is a, c, g, or t
  misc_feature (607)..(608): n is a, c, g, or t
  Peptide Sequence Number=SeqID_11507
  Probeset Number=SeqID_14994
nnnnnnacagcacctcagctccctcacgcagcactccctgctctcccacgcgtcgctctctctcgctggacgtcatctcccagccgatccctcccatggctgcctctcctccatctccctccctccctgtgtggtgtccagccgatgctctctcccatggacgccctccccctcttgcagcaagtcagcaaccccatctcctctgccctccatccccagctcgcccctcaaccatggatactgccagccctggcactcgccctctgcacgccattgctctccttcctgcagcaagccccatctctactggcgctctaattttcagtcatcccgcatggccggcgtcctccccattttctacaggtacgttaattaatcacgtgatgtggagaataagagatgggttgatcacaagatgatgctaatggacgaagctaaagatgataaatcaaccaagtgccaggatgggaggtgctcgccaagcgagtatcatctaacaacactgacgtagtgtttattctaggcaagccccggtgcatttaccccttccttgtatttttaaaaagacttttatacacttaagtctaatgaaatgtgcattaagttnn

SEQ ID NO: 592 - DNA, 608 bp, Zea mays
  misc_feature (1)..(2): n is a, c, g, or t
  misc_feature (603)..(608): n is a, c, g, or t
  Probeset Number=SeqID_14995
nnaacttaatgcacatttcattagacttaagtgtataaaagtctttttaaaaatacaaggaaggggtaaatgcaccggggcttgcctagaataaacactacgtcagtgttgttagatgatactcgcttggcgagcacctcccatcctggcacttggttgatttatcatctttagcttcgtccattagcatcatcttgtgatcaacccatctcttattctccacatcacgtgattaattaacgtacctgtagaaaatggggaggacgccggccatgcgggatgactgaaaattagagcgccagtagagatggggcttgctgcaggaaggagagcaatggcgtgcagagggcgagtgccagggctggcagtatccatggttgaggggcgagctggggatggagggcagaggagatggggttgctgacttgctgcaagagggggagggcgtccatgggagagagcatcggctggacaccacacagggagggagggagatggaggagaggcagccatgggagggatcggctgggagatgacgtccagcgagagagagcgacgcgtgggagagcagggagtgctgcgtgagggagctgaggtgctgtnnnnnn

SEQ ID NO: 593 - DNA, 645 bp, Zea mays
  misc_feature (1)..(1): n is a, c, g, or t
  Peptide Sequence Number=SeqID_11508
  Probeset Number=SeqID_14996
nactcaaaatattgtagataccacatagttggcaacctgttaatattacaaatttattaacaactctattatttaatggatccaatagaggtgtgatgaatctgcaaaaaaaaaagttgaacaatcatttctcaagagtgttcttcatagcataatttcatttctaattcaatacaagagaagtgtgcttggaaacttccaacctcactagcgttggggtttggatcttggaggagacgaccttgtactggatcttggagaagaccatgtactgtgtcttggagacaacattgtattgtacatcgtgtcgcggaagacgacggtggaggacagtgaaccgagggcagagatggcggcggagggcgacaaatccgagacggtggcggtggtggagggcactgtcgcctcacgtcccgctcgcgactgcgtcggggaaggacgacgatggagcggcagcagagcggatggcagcggtgtggacgatagtggcggcggagggcgtggttgctcggatccgcttgtgtcccttccaaactggggaaggttgcccggcctcaggtggccatgagggcttccacgggtatccctcagcatcgggggaggactggaccggggtgtttgtcttccaaatggaccaaaaagtat

SEQ ID NO: 594 - DNA, 905 bp, Zea mays
  Probeset Number=SeqID_14997
gcacgagaccattacctagaacatccaaaaaaccccagtcgccgaacgcatccatcggatctcaccccgtcgcccacagaccgcgtcgtggcatgtccaccatggccatgctcacccaccgtctatctgcctcatccgagcacaccgtcgtgttccccgagctctagtaaaactccctgaccgcctccccagcttgctaccacaccaaaaccaccaccatcgctcaccgaagttgatcgttccactggtgaacgtgggccgacctccatagcccacctccgttcaattcctctagcgaatcgcaccaccaccatccagtgaagctccccgaccagtcgaatcgagctctactaccgtcatttagccggagcacatgttgacgtcaagccctgtcgcctggacacgcggccagaccattttcggccatctccgacgaggtttcgaccactgccatgaccgtcacaaccttgtgaaccttaccgcgctcttccctggactgctacagcaaccgagaggatgtcctaatcccggagaaagaaggagttcgtgaaggaggaccagatcctgctctcgagcctccaactgaggatatcccttctgcacctacacctaaaggtatcttcggattcatggtaaaagcagacacgatgaggagcttgatcgtgatgaaggttgtcgtcgctccgaagttgtgcgaaagggagcttcggctaaatcgcagaaaagggaaccgacttaaaagggaaaaggttgttcagtcctcatagatttttctataagccaatggtaaatgtaaagggcataattctaattcctcataggctgtgtcctgtgcctataaatagatgaacagtacccccatactgttcacgctgactgatacttgcttttgcgtcacaattgcg

SEQ ID NO: 595 - DNA, 1921 bp, Zea mays
  misc_feature (1)..(1): n is a, c, g, or t
  misc_feature (1888)..(1921): n is a, c, g, or t
  Peptide Sequence Number=SeqID_11509
  Probeset Number=SeqID_14998
naaaacagacaataccttaaaattataagcacaaattttgttacataataagaacgaagcaacaaactaagcataaagcaggacggagcggcagcggtaaaactggccggtgagtcagcggccaggccagcagtggcccttgccttgcctcctccccggctcccgtctcttcctcaaagtgtagcaaaaaaatagcccggatacgcggagtcacgttgcaaaatcaaacagaaccggagtgtcagattcagaaacaataggcagcagctagagcaagcagcatcgcagcatcggcagcagacgccaccgtcacgccaccgcgccgagagagaaaagccgagcggtggcaggcgaggggacgcctgccgcggtgggttggtgggtgccgcctccgcatccggtgccgctgctctgttcctcagtccgcccccatttacctcgcatggattcctgcttgcttctccccaactccacgcgccgatcctccaacctccaggagagcgcgacgcgatccaattgaggtccaggaggtggagggtgcctgcgctgtccgtgtgttcccctttgtttccatcccaagcctggccgcgccgccgctggacgccatcgcgcgcctgcacagcgtcttggtgaggtggtcgaagcagcggcggcggccgcagctcgggagacccggcgcgaggaagcggtggccgagccggcggagcgcgatgctgtgggtggcgcgcctgtccggcttgttatccgccgccatggtggtggtggtgctgtcgccgtcgctccagtccttcccgcccgccgaggccatccggtcgtcgcagttcgacggcagcgtccgcttcccgggacagatcgcagggggcgccaggggggtcgccttccgccgcgccccgccgttccgcaatgccgccgactgcggcgccggcgcggacaacggcaccggcgccaatgtctgctacccatggctcgtccacatcgcgattacgctcgacaacgaatacctgaggggctccgtcgccgcggtccactcggtggtgcagcacgccaggtgccccgagagcgtcttcttccacttcctcgtctccgacccggggctcggggacctcgtccgcgcggtgttcccgcagctccggttcaaggtctactacctggaccccgggcgcgtccgcgggctcatctccacgtcggtgcggcaggcgctggagcagccgctgaactacgcgcgcaactacctggccgagctcctggagccgtgcgtgcgccgcgccatctacctggactccgacctcgtcgtcgtggacgacgtcgccaagctgtggcgcaccgacctcggcgggcgcaccgtgggcgcgcccgagtactgccacgccaacttcaccaagtacttcacggggcggttctggtcggaccagcggttcgccgggacgttcgcggggcggcggccgtgctacttcaacacgggcgtcatggtggtcgacctggagcggtggcggcaggcgggctacacgcagcgcatcgagcggtggatggaggtacagaagtcggcggcggggcgcatctacgagctggggtcgctgccgcccttcctgctggtgttcgcggggcacgtggcgccgatcgagcaccggtggaaccagcacggcctcggcggcgacaatgtcctgggcagctgccgcgacctgcacccggggcccgtgagcctgctgcattggtccgggtccggcaagccgtgggcgcggctgggcgccgggcggccgtgcccgctcgatgcgctctgggcacccttcgacctgtacggcccccggccccggcggcggcgccgaggaggacctacatgtttttttattcgcaaaaaacaaactatatgttctccatcttttttttcttnnnnnnnnnnnnnnnnnnnnnnnnnnnnnnnnnn

SEQ ID NO: 596 - DNA, 617 bp, Zea mays
  misc_feature (1)..(1): n is a, c, g, or t
  Peptide Sequence Number=SeqID_11615
  Probeset Number=SeqID_14999
nggaagaactgttctctctgtgttgctttattgatgtgtcgagtacaaatatatatagattacaaccaaggaccatgcaagtctgatcctgaaaagatggtcacgaagtctcctgtgatcctaaaataatgggctacgaagtggccgaaagactcggacagaaacaagaaaataggatctactaacagacgctttacattatctaacaatcagcatcatgagccggcagtcagagacggccgacgagctggccgccgtgaaggccgacctcgacgccgccagggcgtcggtcgccatcgtgctgcgagaggtggaggctatggagacgagggccgtcctggagtggagagggagggcaccaaggacgtcctggcgcggatactgctgctcaacgagacggtcctgtcctctgccgtcgccgcgatcagggccgaggaggagaggtccgtcttcttccaggaggccacgctccagttctttgactctgacaggaacctagaggtggccaggcggcagatggaggtgatggagggcatggaggcggagctgctggcgaagtcggtggaagtcgagtacctgcgggcggagctgaagcaggccgaaatgaggttctgatt

SEQ ID NO: 597 - DNA, 1017 bp, Zea mays
  misc_feature (1015)..(1017): n is a, c, g, or t
  Peptide Sequence Number=SeqID_11616
  Probeset Number=SeqID_15000
atcagaaagaggccagaggcccaaccctatatacagtttcctctgtcgtgcttatgggaagggagacgggttttctacatcttcttgcgcctctactgctgacgggagggaagggagcggatctggtgatccgtggtaacgtagttctcaacacgttatcaacacgctctacctcgacgttgctatggattcgatctgcaccgaatctccatcaagtcggcagattggatgtaccgtttatgggcgatcatccggtcgaacaagtacacggcgcctgggcacgtcttcaacccggcactggaggggagttggacaggctattcccgcggaaggactcggtgttctatccctgtcgcagtacctctatggctcaaccctgcatccgaccacggacgtgtggcctgtggggcatggtcacccggtacggtactacaacgcgtacctgtggggctcggatgagaggctgccgctggcattgtgctattcggcggcgccgctccagcagagcaagcgcagagaagagggccctacgagtggcggccttggcttgcccgactggcaggcgccagcgctttcacgccacgggcccgtccgtgggagtggactggtgtctggacggagcggcgcccgaggcctgcggttcacaagcgcgtacgtacacgtactgcacgcacgtaccagaagtttgcgtgagtatgtgtgaaggaaggagctgttgcgtacgggacccggtytgcaccctgccaagaaaacggatcgccgcgcatggatttttttttacccggtcaaagctgcgcataaaaaggaaaggagcattagtggtagttacgctgaggaaaagaaagaagtagtcgtctcctgcattgccgcatgcatgatgcgtgcatgcaaaaggaaaagatatatggctacttggctagattcactctttaaaatctgcatgcgatttttatctttttcgtttttaattcatttattgaaaatcgcgtagaaagcaatattttcctcataagtnnn

SEQ ID NO: 598 - DNA, 1017 bp, Zea mays
  misc_feature (1)..(3): n is a, c, g, or t
  Probeset Number=SeqID_15001
nnnacttatgaggaaaatattgctttctacgcgattttcaataaatgaattaaaaacgaaaaagataaaaatcgcatgcagattttaaagagtgaatctagccaagtagccatatatcttttccttttgcatgcacgcatcatgcatgcggcaatgcaggagacgactacttctttcttttcctcagcgtaactaccactaatgctcctttcctttttatgcgcagctttgaccgggtaaaaaaaaatccatgcgcggcgatccgttttcttggcagggtgcayaccgggtcccgtacgcaacagctccttccttcacacatactcacgcaaacttctggtacgtgcgtgcagtacgtgtacgtacgcgcttgtgaaccgcaggcctcgggcgccgctccgtccagacaccagtccactcccacggacgggcccgtggcgtgaaagcgctggcgcctgccagtcgggcaagccaaggccgccactcgtagggccctcttctctgcgcttgctctgctggagcggcgccgccgaatagcacaatgccagcggcagcctctcatccgagccccacaggtacgcgttgtagtaccgtaccgggtgaccatgccccacaggccacacgtccgtggtcggatgcagggttgagccatagaggtactgcgacagggatagaacaccgagtccttccgcgggaatagcctgtccaactcccctccagtgccgggttgaagacgtgcccaggcgccgtgtacttgttcgaccggatgatcgcccataaacggtacatccaatctgccgacttgatggagattcggtgcagatcgaatccatagcaacgtcgaggtagagcgtgttgataacgtgttgagaactacgttaccacggatcaccagatccgctcccttccctcccgtcagcagtagaggcgcaagaagatgtagaaaacccgtctcccttcccataagcacgacagaggaaactgtatatagggttgggcctctggcctctttctgat

SEQ ID NO: 599 - DNA, 1179 bp, Zea mays
  misc_feature (1179)..(1179): n is a, c, g, or t
  Peptide Sequence Number=SeqID_11617
  Probeset Number=SeqID_15002
gcacgagaccattacctagaacatcctaatcgaaaaattccattcggtcacatattcccgagaaaaaccgtcattcgcgcgcacacgcggtcgcagctgcggtgcccggctcaacgccgcggagatggagggcgacgccaccggagctgacggaggaggcggaggaggaagtggtgagcgttctagcttcgtgatcggcctcatcgagaaccgtgccaaggaggttggtgttgcagcctttgatttaagatcagcctcattgcacctatctcagtatatcgagacaagttgctcataccacaatacaaagacactacttcatttctatgatcccatggttgtcattgtgcccccaaacaaaacagcagcagatggtatggttggagtttcagaactgatcgataaacattacccagcaaacaaaaaggtcactatggcacgtggttgctttgatgacacaaagggtgctgtcattgtaagaagtctttcagctagggacccatctgctcttggtttagatacttactgcaagcagtattatctttgtcttgcggctgccactgcaacaattaaatggatagaatcagaaaagggtgtgttcattaccaatcactcattatcagttacattcaacgggtcatttgaccatatgagtatcgactcaactagtgttcaaacattggaaattattgaccctctccatactgaactttggggcactagcaacaaaaagaaaagcctctttcagatgctaaagactacaaagactacaggagggtctagattgttgagagctaacttattacaaccattaaaagatattcagaccatcaatgctcgtctagattgcttggatgagctaatgagcaatgaggagctgttttttggtttgactcaaggtctacggaaatttccaaaagaatcagataaggttctctgccatttctgcttcaagcccaaaaaggtcacagatgaggtattgaagcctgccaatggtagaaagagccagatgttgatttctgatattattgtccttaaaactgctctggacgccataccattcttatcgaaggttttgaagggggcaaagagttttcttcttcacaacatctatcagactgtatgtgaaaaccctaagtatgctaatatgagaaagaggtagttttatgtgacctcctn

SEQ ID NO: 600 - DNA, 661 bp, Zea mays
  misc_feature (661)..(661): n is a, c, g, or t
  Peptide Sequence Number=SeqID_11618
  Probeset Number=SeqID_15003
cggcatccatgcctctcggctataaattaaccctgccacgtccaactcaagtcatcaccgtgattccgctaggttgcaccgagagcgatggcaccaaacaaagagatgaggagggagaacagagaggttaccgccaccgtcgattcaatacttcaccgtcggttcgacctcagcattgggtcatggggaggccaccgggggtacctgtgcttggtcgaagagggtctagacaagaaggtcctctggtggcatgacaattgctcaccggagttgggcgggtgcggtggattcgcaccgcaccgtgaccgcccctttcaccgtcgtcttcatctgacaacgagcagtccgaggttcctgagtgtgttgttggagacctccctgagcaacaacctggtgaaggttgtccccactgttctcaatgctcaggaggtgagctggcaacatggaggactttgaggagttccaggactacgacgagttctagtttactttagtggcaaccccccagtcagctgcatgtgtaggcttacattctacgtttcgttactccgcactttgatgttattgttaaacactatgtttatgtaatagactctatggatgtctcagacatcttgatgtaactaagtacctttccaatatttaattcaagcattatgtn

SEQ ID NO: 601 - DNA, 1187 bp, Zea mays
  Probeset Number=SeqID_15004
aggatgaactgatccttcagagctgatttggtgacccgggatcccaggaggatcggagtagattgatggggaaattagttcatttccccctcaatcccctccggtctctacgggatccccttgtcaccaaatcaaccctgaaaaaaaggcacaatccaaattgtaggccgcctgctcttggcagcagcagcccgcgacgaccgtgcagaggtcgatacagcccgcccgttccggtcagtcaagctggaagtggccgtgttcagcgaccgcatagttgttggcagcaccaacagccattccaggcacagcagcggcgccagtgcgtccgccgctgccaccctcaacgctgatgcctgcgccactagcgttgctgccaccgcgaccgcgagtgccaagcagcagcagcgccgggaccttcggtcccattccaatggcggcagagggcgaggcggaggtaatgcctgccattgtacccatgtactcggcgccttcgtccccggcatcgtcgctcgcgtcgtcacctcctccggtcaacaagccgtgcagcgggcgcggcggcgacggccgaggcgacgaggcggcgccggcaggcggtctggcgatcgcgcgctccatccagaagctggaggccgacgtgtcggagacgcggcatgaggtgtcgcggctcaggaagcggggcgccgagacggaggcggcgctggccagcctccgcgcgcagctccagtgctccaccggggcctctcgacgctcgccgggacggaggccgacagggcggccgcggcagcgcggcgcagcgtcgggggcgacaccgacgacgcggcgtcgtcgtcgctcacgctccggagcgggcagtggggcggcaggctcgccgcgagcgagtgcctgagcctcggcgaggtggacaccgtggactacggcgtcgagctcgtggggagccggaggcggaatgtgaagctcgtcgtgccgctcatcggcgacattctcttttccaggaggcggagcaccaatgagaagggcgacggcggcttctacagtgcgtggtgatctctacggcgtgctaggcaggctaggctgatcgacggacagtgatttgtgtaaattttttgttattgttcgtgaggcttgtgcagggagttgcgtttacgcgaacgtacaaacatgttgttggtgccttttggtcaccaaac

SEQ ID NO: 602 - DNA, 816 bp, Zea mays
  misc_feature (816)..(816): n is a, c, g, or t
  Peptide Sequence Number=SeqID_11619
  Probeset Number=SeqID_15005
accggccaccgcgaatccagagccccacgccccgtccgaaccccagagcagagcaaagcctcctcgacctccctgtccccgtgctgggccacccgtttggccatctatatgcagaggtgtggtttggaacgtggaggttggttgctcggaggggacgatgcaaaaggttaatttaaaatagatgtgagaggttatttgtaaaaagactacgcataacgatcgttgaaactgatgctttaatatagtagagttagagatttaaaatgctattttggtgtttataataaattcaccaatattatttacaattaaaatattaaatatttatttttagaccaaagttcgttatataattaaatcgggtttcaaaataaaagaatactacacaaatttctcaacactttagcaaacaaagactcatgctccaaaatgaatgcatcaatcacttgatagacatttaatcgttcacaaaatttgttaaacacaattatatcattattttaattattcgaaaatattttccttcctatgaattaaattatattgtttttgtttgatgaatttgagttgttacatgttctaacctttcggcaaaagtggctcaacttytggatgaagcaatagttttatgtggagaaacatttggacaaaagggaggatattaatggtattatttagaggcctatcatatcccgctttggcataaatagaccaactgttgtagagtatgatgaatctcaatcttgtttggtagcgtctaatgttgtttgcagctatatttgtagcagagacttggttcaagagcatataactttn

SEQ ID NO: 603 - DNA, 816 bp, Zea mays
  misc_feature (1)..(1): n is a, c, g, or t
  Peptide Sequence Number=SeqID_11620
  Probeset Number=SeqID_15006
naaagttatatgctcttgaaccaagtctctgctacaaatatagctgcaaacaacattagacgctaccaaacaagattgagattcatcatactctacaacagttggtctatttatgccaaagcgggatatgataggcctctaaataataccattaatatcctcccttttgtccaaatgtttctccacataaaactattgcttcatccayaagttgagccacttttgccgaaaggttagaacatgtaacaactcaaattcatcaaacaaaaacaatataatttaattcataggaaggaaaatattttcgaataattaaaataatgatataattgtgtttaacaaattttgtgaacgattaaatgtctatcaagtgattgatgcattcattttggagcatgagtctttgtttgctaaagtgttgagaaatttgtgtagtattcttttattttgaaacccgatttaattatataacgaactttggtctaaaaataaatatttaatattttaattgtaaataatattggtgaatttattataaacaccaaaatagcattttaaatctctaactctactatattaaagcatcagtttcaacgatcgttatgcgtagtctttttacaaataacctctcacatctattttaaattaaccttttgcatcgtcccctccgagcaaccaacctccacgttccaaaccacacctctgcatatagatggccaaacgggtggcccagcacggggacagggaggtcgaggaggctttgctctgctctggggttcggacggggcgtggggctctggattcgcggtggccggt

SEQ ID NO: 604 - DNA, 630 bp, Zea mays
  misc_feature (630)..(630): n is a, c, g, or t
  Peptide Sequence Number=SeqID_11621
  Probeset Number=SeqID_15007
ctacgcgcacgccgagggaactgagccatcgggcgaattgagaaaatggttagccgccattggggaaatcgcaccgagcttcatcgaagagagagaaagagtgatgggtcgcgttgagtgccagccatggggcattgccgcaaatcgcttgtggcgcctgtttccgtgcatgcggcgcatatggccagccatggcgccgtggcgacccaaatcggctgtagtcggtcttcacaaggaggaaagaatagagaggctaccgccggtgacaataagtgcttcaccaaaggtagtgaagatggtgcgacggttgtagctgaagcttggagtttctattcgtggcgtcatcgggcttcttgcgtggacgaagatggacgagttcttcgccgatgctcggaaggcacggcggacccgctccacaccatgggttgtggacaccggagcacaagcactggtcaagaacaggtaccgcagaatgaggcgcatggaggatgttgcgatgtgttcgtgagaggtttaggccgtcgtctctcagtcaacttttggttgctagatcgttgtctccatatgatgtaattatttatttattttgtacagaacttctattatatagtaaagatgtgacatttctan

SEQ ID NO: 605 - DNA, 875 bp, Zea mays
  misc_feature (875)..(875): n is a, c, g, or t
  Probeset Number=SeqID_15008
gaaaccaaactccgccacgagtggggcgagcggatacacgagctcgtgaaagcttgatctgctctccttgttttcgatctttcgcagtcgccgatcccccctcccgctcgagacacaatgttgacatatcctatattgaacgaccgatcaattgatcagtggacggttactgagttgaaggatgagcttgagcgaaggtatctgcctgtcagtggttcgaaggatgagcttttgaagagactctttgaggccatgcaggatgagatacttgatggtgagggaaaaacaactgttgtaacttcccctcctgaggaattgaaaggtggtgaaactcctggttccattgatgtatctgttaaccaggcttcaattgagcaacatgttcataaaggtgcttccgaggttgcgaaacagggggtaggtcttgttatctctgttacagaagcttatgatgaaagtacatttgctacttcagaagttactcaggaggctgtggttggtactgcagaagttagtcagagaagtttggatgctgttgcagaagttgagtcttgtctagttgatgcagctgcaactgatgaacccgatggtaatggtcaaggttcagcttcaagtggtgatactatagtgaaggaaggaagtccgcgctctgaaggtcatggcaatactattgagaagaccccagaagatggcaccaataagaaaatagctgtcgatgatgaaccttctgaccttactggtggtgacatcaagttgggcctcgatgtgcacagcaagattctaaagctggaagatgaacccgcacctcctcatgatatgttgcataatcatgaggattctgatgttgttgcagttgctgagccagaagatgacan

SEQ ID NO: 606 - DNA, 539 bp, Zea mays
  Peptide Sequence Number=SeqID_11622
  Probeset Number=SeqID_15009
aaatgtgtttactagcttcctgggactagtaattgtatcacatttgagtcccagaggattgaggacacttcataatacaggcctagatagatcacaaaacctttacaaggctttaagccagctgttaaccgtaatctgggctagcccaaaccacataacaattaacaactactggtattatactactaatcacttacaactatccttcatccatgacaaagaggcggcgcgccagacggagctaatgcaacgggtgggggcaaggacactgcaaatcaaggggaatcaatgttggttggggcggtggtggagacgagggcgctgcagaacgaggtggagtcggcgttgggtggttggggcggcgatggagacgagggcgccgagaatcgagtggagaataaggaatatgatgatgttgtgtgaactgacccgcaacgtggattcattgaatccgagagtggtcgggttgcagttcggctagaaagaattgaggctgttgggtatgactagagtttaccattagactagagctttccttt

SEQ ID NO: 607 - DNA, 600 bp, Zea mays
  Probeset Number=SeqID_15010
atctcttcctctgctccttcgtttctcagagctcggccagggagcttccaccctgcgcgtcctctacctggtggacacgctcgccccagcccccagctccaaccgcctctgctccctcctgcagctcgccctcaactccctcactgctgctcccatggccgcctccagccatcttcctcaaggcgtcacctcttttccccatggctgccaagccccttccatggcgctcgccaccgtctcctgtctggtcaccccatctccagcccgatctgctctggctgtcagccgtgtcaccatggctgtcctcctccgctgccactcgttggaccttgcccctgctgtgccgccggcagttccccgcgccctatcctccctggtgctcacctctgctccccctgcgttggacggtcgcccctgtatcattgcgcgtgcccctcctcacaagccatagcgcagcagccaagccctagctcgccaaccccctccgttcagccggccatggccacctcgccgaggccccagccacgacttcatcaccggtgaggacccgttgttctccttgtgtttgttcctctccggtacatgtattcgaccccgatt

SEQ ID NO: 608 - DNA, 594 bp, Zea mays
  Peptide Sequence Number=SeqID_11623
  Probeset Number=SeqID_15011
gcgtggtggatattgtgtctctaatctagcagaaggtcttgagttcaattcacaattcttacagatttcattttttactgccggacagggataaaggtaaaacaggaaatgaaaaaaggcagaacgatagactacccttacagccctaataaatagtagagacagagatttaaccacacaatgtcacaaccacaagatgagtactccagtatgagtgacggagacattgcaagcaaaattaacacgtcgtgtccgttggccgatcgatggacaggagacggctgctctcgacctttttcaccatttttaatccgcactagcaatctaattaaaggcgttttccacgcttgtcctaaaaagcgcaaataatcaccatatcagaagccgaagactccgccgccgcggcagaggatgacgccggaacttggaccatccgatccgacgccgcccctgctgctccacacggacggccacccggacgccgagcgccgagccgcccacaccgctcctgcgctctacgcccgacgtccacggccaccggacgccaggcaatactcggtatcaaggtttggattggaccacctcagcaactat

SEQ ID NO: 609 - DNA, 568 bp, Zea mays
  Probeset Number=SeqID_15012
agatgttttagggtctcggaactatcgggcaccagacgttcttaatgaaacattaaggagagcagtatgtaccttggtcgagactatttttctaggtagtctttgcgatgagttctttatgttttgtaggctcgctaccactcatgattattttttgcatcaaatttgggataggattccaaggattttggttgtcgtgcacatcaaatttgtctatctaggcaactacatgtagttttaagaatccaacgtgagttcatgttctgtagactcaccaccactcaaatgattattttttgcatcaaatttgggataggattcaaaggattttggttatcttgtacattaaatttgtctatctagtcactcaactacatgcagttttaagaatccagcgctcttagaccgactttgatagttttcaatatttttttgagctatagttcatgaaattcatgtgttttggggtgtcctagaatggtcaagccctatacactctaagggcatagttaaagccaacaggatgtatctacggtgagaacattttttgagctagctttacctcttg

SEQ ID NO: 610 - DNA, 581 bp, Zea mays
  Peptide Sequence Number=SeqID_11624
  Probeset Number=SeqID_15013
gcccgcggggctgtgcctgccgccaccaggcgcaagcgccgacgacaacgctggagggccggccctccccacctttgttgaccttcacggcgcgggagagccgagagcatcctcctttttttctctttcccaccgcatgttcgattctagaagcgtgttgcatgctggcgtctggtgaaggagcggacaggcggcggctgccggaggccccgatctggagactctataagcaacagcgaaaggcgcggacgggaggagcacgtggacatgcagaaggacgacgcggagggagcaagaaggggatgagaaactgatgaagtgatctgcagagagacgaggcggagggagcgaggaggaagagagacggtcagacggggtagatcgagcgaggagaggcggccacaatcaacgcatcaggtggaagtctccagaggcgaggggaagatagagcatgtgagagagcgtgatgaaggtgaaccagtgatccacgatcaagcggttaagaagattttcgatgacgtggatgggctaggaggagccggtttgtaccggctttcataatatagaaatagaaatttatt

SEQ ID NO: 611 - DNA, 581 bp, Zea mays
  Probeset Number=SeqID_15014
aataaatttctatttctatattatgaaagccggtacaaaccggctcctcctagcccatccacgtcatcgaaaatcttcttaaccgcttgatcgtggatcactggttcaccttcatcacgctctctcacatgctctatcttcccctcgcctctggagacttccacctgatgcgttgattgtggccgcctctcctcgctcgatctaccccgtctgaccgtctctcttcctcctcgctccctccgcctcgtctctctgcagatcacttcatcagtttctcatccccttcttgctccctccgcgtcgtccttctgcatgtccacgtgctcctcccgtccgcgcctttcgctgttgcttatagagtctccagatcggggcctccggcagccgccgcctgtccgctccttcaccagacgccagcatgcaacacgcttctagaatcgaacatgcggtgggaaagagaaaaaaaggaggatgctctcggctctcccgcgccgtgaaggtcaacaaaggtggggagggccggccctccagcgttgtcgtcggcgcttgcgcctggtggcggcaggcacagccccgcgggc

SEQ ID NO: 612 - DNA, 1495 bp, Zea mays
  misc_feature (1495)..(1495): n is a, c, g, or t
  Peptide Sequence Number=SeqID_11625
  Probeset Number=SeqID_15015
gcacgagaccattacctagaacatcctaatcgaaaaaaagaggttgaagttcctgtcgaagaggcagagcactggcgctggaaggaggcaacagaggggttgaagttcttgtctgtaaagaggttaggcttggcgaggaggtgatcccagaggcaggcgtcgatggcggcggtgaccatctcagtgggcatccactgttgcgtcgcgaccgagcgcgatggtgtcgacgaggtcagatctcgtccactgcatcccttggcgccacccctagggtccctcagctgttgatccccaacacaaaccaccagccaccgaggcgccgcaagccgccccttctcaaaattgagatggatgccaccctgccgctcaagaaggccaagacaaggatgggcactgctctggcggacgaggtccggatgcagaagaagcccacatagaagtcggtgccggccgcagagcagatcctgacacccgaggagatgatgagggtgtgcaaccgtatcatggccttctctatcatggcgattcgtcgggccatgcttaggctgcggtggtggttgacgacgctggatgaggtggtgaagcatggccttctctgtcaaggagatccgccagaccacactcagactgtgcctgtggctggggcataggctgaggtggaggcggcggatgagatggtccgttttaggattatgtcattagagaggaagggattcttaaggatctagagttgattggatttcagtacctcggtgggccaatggagacaaaaagatagagctaaagcacggtttctacatggagcatgacgaagatgtgagagcggttgtggtcgaatttgatcgctacttcaactactacaaagttcagtttggaatcacaacatcccagatatgcatggtgggggactgattggatatcgatatcctgtttggtcaaaatggaggttgcaagactctcctcgttctctcagggtttttatcatttcctcaattctaactctgacaaaggcactgctgatttaacatcagcataaggttctgatttaacattaggataagaattgagcttggttgtccatccacagtcgaggaggaagcggaagccatcgacgacgaataggtagcacagggggtcctccccgtacaccccactgagaggcgtcacctacactgacgtccccatctgatctggaaaatactgcaaacttctaacaatttgacctgtagtattttatatcttgcagataaaacaatacacttttatataattgttactgatgatagcttagtatcataaggcaacaacagaatgggtacccaggaaactcatgggcttgacaacatcgatccaacgtttctgaggtacaagaacacaggtaccattatcttcaatactgttcactggtgggcgcatgacaaaacttttctacggtggggaaaacaatgtcccgcctgatccactaaagatctgtagttcacacatcctacatttn

SEQ ID NO: 613 - DNA, 896 bp, Zea mays
  misc_feature (1)..(1): n is a, c, g, or t
  Peptide Sequence Number=SeqID_11773
  Probeset Number=SeqID_15016
nattagtttattaccatgcgtgtgctgtactgacataactgaattacatctgttcagcagatggaactagaaatgcatacaacgcaaatggaaaccagtcagcaagatatgcagccaacactcagagcattcctgcaaacgtcggcatgcaatacgacgggagtgcagtgtcgcctgaaatccagtttagtggttcatcccttcagagtcagtcttcaagagggtccaacatgctagcattgggccctccgcagcaacatcaaagtttcgaattcccagtgctcggccagcccgttcagccaacaggcctgaaccctttcgaagagtggccgcagcagcaggagaaccgtggcggcggtgtcgacgactacctgatggaggagatccggatgaggagccacgagatcctggaaaacgaagagatgcagcagatgttgcggctcctgagcatgggcggtgccggaaccagcctagccgaagacggcttcaatttccctccgtacatgcctgcgccttcgccgaacgtgagctacgaggacgaccgcacccgcgcgcccgggaaagccgtcgtcgggtggctcaagatcaaggcggcgagaagcagcctccgaagggattgcacggatcagccagctgtcgttctcctcgcggacgccggtctctgtgtcgtacatagcagccgcctccgtgtcgtatgtagctaccgctgctgcctcgcatcgagtgtctcgcggattctttccacgacgcggagacgagggatgtttcccggccaggttgagctgggaattgccagggtgggtcagggttgaagcccgggtggtgggatgaaacgaacacctatttcgttgtgggtcggtttttcgattaggatgttctaggtaatggtctcgtgc

SEQ ID NO: 614 - DNA, 511 bp, Zea mays
  Peptide Sequence Number=SeqID_11774
  Probeset Number=SeqID_15017
atgattgggcgccgccattgtagggccgtgaccatcaccactcatcctcggacgccgccatgaacccacccgcgccgctgccatcgatcgtagctgttgtcgcctcccaacctccgatgtgcagttccaggagtccggatgggtgggtagatcgtgtacaagggcttaatcgagtgctgagacctgcggtgcagcggggatttctcgtcgtcgttgcaagccaccgcgaaactaccgagcgtcgtgaactgggtgtctcggccggcaatttctcgcgcgaggacacgtgtcatctctaaggcaagttggtacctggaatctcaagtgccaggagaagagcaggtggttcaggaggagccacaaggcgaggagtatgatctgatctaggtggcgtttctcagttgacattggcgccgacgatccttagttcgttttatctttattattttattttgtaataagtcttccgctatgtaataaatactctgatggtttatgatatttatctctc

SEQ ID NO: 615 - DNA, 511 bp, Zea mays
  Probeset Number=SeqID_15018
gagagataaatatcataaaccatcagagtatttattacatagcggaagacttattacaaaataaaataataaagataaaacgaactaaggatcgtcggcgccaatgtcaactgagaaacgccacctagatcagatcatactcctcgccttgtggctcctcctgaaccacctgctcttctcctggcacttgagattccaggtaccaacttgccttagagatgacacgtgtcctcgcgcgagaaattgccggccgagacacccagttcacgacgctcggtagtttcgcggtggcttgcaacgacgacgagaaatccccgctgcaccgcaggtctcagcactcgattaagcccttgtacacgatctacccacccatccggactcctggaactgcacatcggaggttgggaggcgacaacagctacgatcgatggcagcggcgcgggtgggttcatggcggcgtccgaggatgagtggtgatggtcacggccctacaatggcggcgcccaatcat

SEQ ID NO: 616 - DNA, 514 bp, Zea mays
  Peptide Sequence Number=SeqID_11775
  Probeset Number=SeqID_15019
accatccgtactggttcttagtcgtgatctgctgagctcaccatcacaagagggtagaaaatacgagcttgttgcaaccatcactcatcatgggagggacccttacagggggcactacaccgctcacgcaaagcatggcaacgggcaatggcttcgtttcgacgacgacgccgttgtgcccgttggtgagaaggatgtcttgcatgaccaagcatatgtcctcttctacaaacgagtctgaaagcacgacgtagttgaatagttagttgctctttcgtattgctgctgcttaaacagccagatatcatcatctaactatggtcctgttaatgtagccgctgagtatcagcagagtattatgtggagtgcaccctggtgccgcctgtgtttgttagtattatttgcctggtcgtatagcgagagggggattcgtcgtcagcccattttgaggttctgtaaaatttcaactgcgcatcattgtaatgaccagcgaagtaatgatgggatgttatgc

SEQ ID NO: 617 - DNA, 539 bp, Zea mays
  Peptide Sequence Number=SeqID_11776
  Probeset Number=SeqID_15020
acatacctttctccgccttttggctaagatcaagtgtagtatctgttcttatcagtagactgcccctgctttcatgtcatacttcttaggacctggcaatctattttgacctgtattgctcttcttgtttataggcacatgttgtttcagcgattttgaattttagtgagaattgtacacaagaaatcggcgaagcatcatggctcctgacgaagcaggggctgcgaccagcgcgctggacgttgctgggaggcggctgctgtctagaggcagcgacagagctcatgatcgttgagacctttgatactagattggtaggagttgtgttccctatgctgacgatatgtttccgttgcaacgcacgggcacctatctagtttatcatgaaaatgcaaaccatgtgcctgtgtagaaacttttgctatggtatgccctccaaacggcgtcagtatttgctccaaggatgttgtgcctagaatacagcagggtggttggagttctataagttttgtcttatgaaaaataaaaagttttgaggc

SEQ ID NO: 618 - DNA, 1807 bp, Zea mays
  Probeset Number=SeqID_15021
gcacgagaccattacctagaacatcctaatcgaaaactgttcagtttaatgccctagctcaactgcatgcatcatggcgacgcccagaagcaagtcgtgatcgatcgacaatggtgacgatggttatggagaaccagaagtagctggcgcggacgtcccactgtggtcctggcgccacccctacctcctcctccctctccgccgctgccgtcgccgtcgtctccgcaagcgtacaataatcaccgctgcaaggtgtgcagcaagaaggggttgatgtgcgggcgcgcgcacggcgttacggacgatgggctcaacaccgacgacgcggcgttcgacgacgaccactgtggcgacaaatggcactctatggtgtcaggtggcaagcgcatgcactcgccccgcatcagcgcgggccgggacgacaaagattgcgggacgtacagaaaaggcgggaaggagtccacgtcgtgtaaatcgctggctgatggcggcataaacaactacgatcacgacaaggacaacttcaacaccgttggcgccgacgacgctgacggagaaaacgatgcagaagacgatgacgacgtaccattggccgacggttgctccaaaggcaatccagcgcgccgagctaacctgatccatgtagaaaaaagagagatcagcgaggacctcgccatctggctcgctgaactcacatcatcattatcatcatcgtcatcatcggcgcaagcaatcctcgaacaagcagacacaacggcgaacaaggatgagaacacaccgtcgagcaacaaccctgtgccggaacgaccaatctttgcggcaccacatactgccgtgccgcaactcaagtctgcgccggcgtcgccgtttcgtggcttgtttcagtgcagggcgtgcaggaaggtgttcccgtctcaccaggctctcggcggccaccgtgccagccacaaaaaagtgaaggggtgttttgcggccaggctagggagcggccgcgacgattttccgcgaccaggcgcaaccgtttccagcaacatcgtcgatacagaatcgactggtgtagatggcgacacgatcaataatgacgacagaatcacctccgcaccagaaactgctattgtgcatgtcgacgagacgtcctcatccttcactgctccatcctcctccttcaacaaggaggagacgaaggtgcacgagtgctccatctgccgccgcgtcttcatgtcagggcaagcgctcggcggccacaagcgacgccactggctcacgacgacgactgggacgaccagtgaccagctgcagacggcggctgccaagcttcagccgccgcccttcggtcctcaagatcacgtcatgcacgccatacgcgagcagttcaccattggtcccacaatgtatggcacgtccgactcatgccttgacctcaacatgccgacgatgaatgaatacgcagacggcctagccgccactagacaggaagccgaagtcagtgaaagcatgatgatgagcctcaatgcaccggcggcgtcactgtacatggactcaagggcaggacctagcaacgcaagcaatacagcgaacggtcaccacgacttgccggaagccacagccaccgaggatgaagaggatagtacgagtgccaaacgaggcaagatcagtgacctcaaggacatgaacatggctggtgaggagacctcggagtggctgcaagttggcattgccctaccgcccgagaccaacgagagattactaaaacctaatggctagaatctattatacaaatatatgggaagcacttatatatagttcc

SEQ ID NO: 619 - DNA, 523 bp, Zea mays
  Peptide Sequence Number=SeqID_11777
  Probeset Number=SeqID_15022
atcgtttggattttttccacagccgccgtctccaagcttctccctccctccccttctccctcacgcactctctctccagcgcctagccgctcctctttctcctccagcgctgcgcccctggcccctctgcccgagctcgcccatggcacgcagctgcgtcttcaagctcggtctccatctccatggcgccgtctgcccttgtcctgctccctagttccggctgagctcgcgccctgctccctggcatcgcaggctcgtcggtgttcctcccgttccctgctcggaccgcggcttttcccccggagctccctgtgctcgccatggccaccgcgcctgctccctggacggcgctcgtattcctccttctcggccgtttccagcgcgcccatctccaacggcgcccggccaaagcctccctacgcgcgcgcctgctcccatgtcgcgccaccttagctcgctccctcaagctcgctgtgcccctgctttccacttccggtcgtccatggccgcgcgtcttcctcct

SEQ ID NO: 620 - DNA, 566 bp, Zea mays
  Probeset Number=SeqID_15023
actccaaacctccctctctcgacctcgacccctcgcccgcaaagccccgcaagccagcggcatcccggctttcctcggcaggcttccaagacccaacccaacagcttccgagcgagtacggcggcggcgacgatggcggccaagtcgcacacacgcaaggcgttcctcctctgcaactacgtcctcctgggcgcctcctccagctgcatcttcctcacgctgtcgctgcgcctgctgccgtccccgtgcggaagacgtagacgttcggtgaggcgccttgagtgaggccgattgcagggagtagtttgactgacattttgtgggacgcagcgcaggagattaacatgggactcagtagctagggtgttgttagctgtaaaaagtcatgtgacgcaacgcaagagcagcggagcttcttcctcatcttctttatcccccctctccatttttctttggtggtctaacttactaggaggctgtattgatccatcatcatttctcccgttcctcttccttatgatcttgtgactttsgcggtcctctgtattgatccgtgaacttttgtg

SEQ ID NO: 621 - DNA, 601 bp, Zea mays
  misc_feature (601)..(601): n is a, c, g, or t
  Peptide Sequence Number=SeqID_11778
  Probeset Number=SeqID_15024
atagctctgggtagggactccaccaaccctcagtaggcctcgggtgtttttgtagaacggatcacacaggaggggcgggagaagaaccaagccgccgcccatgaatccaccacacgtcgtcactaaaaccagggggttctcggggatcgtctcaggagcacgagggatctcgctggcaaccggaccatgtgcgtggcaatgtggtggcgccataatttctcgccggagtgcatggcaccgccgagggccacattgacctgtgggtggagctcgtcatgacacaatcacgggtaagaaaggtcgtagtacaatccgcctccatctgctaactgcataagggcatgtacagtggtgtttaatgtggaggctcttaaggtgtttaaggggtgtatttgcaaaaaaatcttagagccgtctctccgtgaagagacgtctctggctcgtgaaccaaaaccaagtagtaatagacgtctcacttcctactgtacgaatttgtcgtctgttctatcgatctgctgctgtacaaatgcatttaattctgtatttattagtagactacatttatagacactccattgtataatagagtctcttagttggn

SEQ ID NO: 622 - DNA, 545 bp, Zea mays
  Probeset Number=SeqID_15025
acaagttgcagtgacagttccacgcagcagatcagagagacacacgcactagctacctgtagtctggtctgcaggtacgctagcgatctagctaccgctgtgctgcgtgtacagtacgtagtaccatggcgaagaaagtggccactctgctggccctcaacctcctcttcttcgccttcgccgacgcatgcggctgcaggtgcggcggatcctgccctagtccaggcggcggtggcggtggaggatctggtggtggtggtggtggaagcggtgggggtgggagtggagggggtggatcgggtggtgggagcggtgggggtgggagtggaggcggaggatctggtgggggcggcagcagtggtgctcaccgcctagttttcagtccttattcgcctcttggttttgagatctatatctgaactagcagtgctttcttgtctcaactatttgtgttaagaagacgtagtttttaaatccattgctccttcctgtttggacagtgctttcatatcarrtatttcaggtatattagagcyacctgcgct

SEQ ID NO: 623 - DNA, 882 bp, Zea mays
  misc_feature (882)..(882): n is a, c, g, or t
  Peptide Sequence Number=SeqID_11779
  Probeset Number=SeqID_15026
acgagaccagcaggaacggcgtcgctgccttggtggccgccactgcgtccccgacgacgacggacactgtccgccgccgcgctcttcgcctccattggatcgccgtcttaccggcatcctcgcgctggtcctccgatcctccgatgtctcctcgcgtggtcgcgtctgtcctccaatgcccgactccggcgtcctcgccactgacccatccacaggtaaagcctttatcccaatattaattcgtatcctgcaccaaggagctgccgtgcgcttgattcgctgcatctgagtgtcacggccgcgactacgcgccctccaatcctccatcgcctcccgtcgccgccgcacagttgcgataggcatcgaccctgcatcctacgtggtctggtgctggggaatggggaggagtgtcaccctgctcttcattatttgcttagttttgtgtcaccagatgatgatccaagcttgaaggattttcttatgaagtccctacttggcatatacacgggcaggaatcagtaggttgttacccagagatttgagcaactagctagaggcattgcgtgaatgatgagcagtgaacagtccttgtggtctccaccatccattaacaagcaacagcaagatattggtcgtctacccatcaggtcggatggcccatccctaaattctyttggtgacttcataccaaacctcatgaactcaaatgaactgtcttggagcmcatcattgttttgtggcctttaagaccaatattttattgattcggtgcatgtatatttctactcaacaagcagcacaattacaatacaacatytagatggctcatgctgctatatttgtatattgaactgttcttctactgtaaataattaactattn

SEQ ID NO: 624 - DNA, 1099 bp, Zea mays
  misc_feature (1099)..(1099): n is a, c, g, or t
  Probeset Number=SeqID_15027
tattggagagatgaaaagcactgcagaatatgccattcaactttcgaggttggttttgatcttgaagaaaaatatgctgtacatgtggcgacgtgcagggagcctgaactttcacatgaggtaccaaatcataaatttctgccatcacagctacaggcacttaaagcagccattcatgctattgaggcatctatgcctgaggcagcttttactggttcttggatgaagtctgctcacaagctgtgggttaagcggctgcgacgaacgtcatcattgccagagcttttgcaggttcttgtcgattttgtaggggcaatggatgttgattggttgtacaaaagttcatctgcgagattgagaacaaatctggatgacatcattgtcgactttcagacaatgccacaaacaacatcagcagttgcactttgggttgtccaattggatgccctcattgcgccttatttggataatgccatgacaagtatgtttttgttcacaatcgcaatgtctaatgacagctggtgaatgctaggtagcttacgaagatggattcttttgcgtgatgcacaagcaccccgagctgacttctttttctggcaccatctgcaagttttttcttgatgaaagcttttcatctaggtgagacagaacatggggtctgctttgagttcgagaacaagatcttgcgacttgctgtaaagcatggaatatattgttccctcccagcagagcattgcgtcatagacaatgaaaaagttttgttaataatcgttgcttcagatatgtgaaagttttggctttccatgtagcgacacaattgggatgtaggccatttytgaaacagaccgctgtttgcaggtggtgctgtttgggacttgattaccagctgtgcccttagttttaacggaggggtggttataattttgttccttctatatctgtatgtgctaagttgctcctagtccgtgagagctttctacattaggctatttttgtatgttatgtaaccagtttctattagagtgcagttgtagacatttagaacatgtacaccaatattgtgactgtttaaacaagtgagggaggcatagaagacttn

SEQ ID NO: 625 - DNA, 675 bp, Zea mays
  misc_feature (1)..(1): n is a, c, g, or t
  Peptide Sequence Number=SeqID_11780
  Probeset Number=SeqID_15028
ncaaaaatgacatgcatgctttatctaacttgtgaaattatggagaatcagttggctaacaaattttgaaggtttacaaaaatatattatgctagtcaaaagttgtggattcatacggtgatcgttccatccccaactttgccatggaagagaactgcccaactaaggatctcgtctgtcagactcctagccatccatagctaaaatggcacaggaacataccacaaagatgaccaaacccatcttctctataaatgccattggaccccagagacggccaaaaccagcttatctgcaaatgccattggatctcggggcgcgtccgcggcatctgggcaagcgagtggtagagcccgcagccatgagatggtatgcatcggtagcctcctgagggcgctggtcctgagtgcggcggcgtctgcgggcaggcgccgggggcccaggatcctgtgtggccacgaggcggatgtacgcgtgactcctcggcacggacacggctggcgcagattccgggcagtcacgggaaggatgatgctggactcctctgactgtgcctctgctgccgccgccgcggagacggggcaggtgcagccgcagcgccgcgcggtgggggccgtgcccctggcgcacgacggcggctacgccagcggcggatgggagaggtaatgtatgtgc

SEQ ID NO: 626 - DNA, 649 bp, Zea mays
  Peptide Sequence Number=SeqID_11781
  Probeset Number=SeqID_15029
gcacgagaccattacctagaacatcctaatcgaaaaatgtgtatgtcaaccatcgtgttgttttctctgttgttcagtgtgcatgttagtcatggtgttgttcgtttctctgcagataggaggtcgtccgactccaccgccaccgccaccggcagtttgactccatcgtgacctcagcagttgacaggctcctgtgcagctctaggtcgacactccgcaaggagttggaccttccacagccgcacaaagctcatcacgtttgacaagggacacatttgctgacgacgacgatgaggatgatgatgacgatgacgacgttcatgtgcgtcacgacgagatcggtctgtcccatctacaagttgctccagtcaccgaaccgtcacagcctacggccacacagacgacgaccacgtgatccttacactccaggcaccgacactcttgaggccaagtgtaagactaggaggaagtgaggtggtggatgtcttcttatttgggatgtgctatggattgtttctgatatggctgtgatttggactatgtgctacgcacggcgatttggactattttttgttttagactatgatttgtgctatgtacttgattttgtactatgtgtgatatggactacgtatgatattgtctggtt

SEQ ID NO: 627 - DNA, 563 bp, Zea mays
  Probeset Number=SeqID_15030
atgttcctagaaatcgatccccatccccatttcatcgtcgtcggccgccccactgccaggctccaccactagctcctcgccgccagtccacaccgccgctaggccgctccttcaccagctcctcgtcgccctgccgccagctcccagagacctccacggcttcatggccaccgagacgccaacgcctcgtcgaggtcctctcctcgcccagagatctccctgcggcgcgccccgtcgagctcctctccgcttgtggttgcggccaccgcctctcacgtcatcttgcttggatcgctgcagcacattcccggtcatcccgtgttgagtttgtgatccaaattctgcatatggagaccgtgttggccgagaagcttgggccagagcatagcgatattagtgaccctaattagggtttgccatgtgtcgtcatttactcctcttgtaggttgccgtctacggacgacgttctgtaaacactcgtgcttctaccgtattctgtaggtgttatgcttaacagatgtgatggagtggkaccatactaaattgtttttagttatttgccg

SEQ ID NO: 628 - DNA, 1363 bp, Zea mays
  misc_feature (1363)..(1363): n is a, c, g, or t
  Peptide Sequence Number=SeqID_11782
  Probeset Number=SeqID_15031
aacacttcccacgtccccgtggtcagcaccaccgaaagccccgagaaaccctaggcaccaggaccaggaaggcgcgccgcgcagccatggcgaagaaccggaacaagaagaacagggccaagagcggcggcctcgccgccatggacatctctgagggcggccccgccacatccactgccgcggacgtcccacaacgtacttcctcccttccagtttcttttatttttattttttgacaggaaggggaattacatccaggagtctgacttaaggagctatagtccacaacgccctagcaagcagacatcaactaaccagacttaataaagacagaaatccctagagtttttattgagcaagcagacatcaactaaccagaattcaaacaaaagatgctgagaggattcactaattccgcagaaactgcaatcaggcgcagccacccaacctctttttaagagattaactttggtcaaaatacgatccttcagcagcaaccaaaagaaattttttattttctgaggcagtttgattttccaaagaaatttatacgggacattcacagtatcacttttgatactagagtataaggacttgacagagaactccttactcccgaacatccagataactttgtccttctcattagaaaaggcaaaactctcacaccaattctagaggttctaaaaaagggtgctagtttcaggccccaagattcttctaaaactcaaagaattgagattagactgaagggcacagtccacttgtaatattgttatcaaaagacagctcaaaaagccttttgaaacttacagccagggggagatcaccacaccatgtgtcaaaccaaaaactagtgtcctcaccattcccaatattttttttctgtgtttgaggaaatgatccttcaccttcattaggcttttccaaaagcgagagtcattgggtcttttttttttgccaaagcaagaggaactcctttaagatacttggcttctacgatggctcggttcatggttttttgttctttgcctggcagcaatggatacgtcagagggaaagcagccatcgtcgaccacagcaacgctcggttcgatcaacaagaaaataaagaagggagtgcatatgaaaaggtcacagaatgctaggaaaatgaaagcaattgctagggctgtatcgaagaatgagaagtccgaggagaagatccagaaagcaaaaggcaagaagacaagaatccagtcggccaagtctttgtacgactgaatatttagcactgagcagaattttgtgtaccagtatatttctagattgtagagcaaccgaatctgtgcttgcgacgaagaaatgaaagcttgctttgctn

SEQ ID NO: 629 - DNA, 1724 bp, Zea mays
  misc_feature (1724)..(1724): n is a, c, g, or t
  Peptide Sequence Number=SeqID_11783
  Probeset Number=SeqID_15032
gcacgagaccattacctagaacatcctaatcgaaaaaacaacaaaagatccccgcaccgctaggctcaaacccagagctagctagcctagccatggcagagcacgcaagaggctcccaaatccttctcatttacctctgcctcctactatcctcctcggcgcacctggtgacgagcatggaccttgacagctacgacgactacgacaacttctccgatgaggtggtggccccggcagactacgacgacggtagcttctccgacgaggcggcaccagcacggcgccgcctgtacgacatcagcctcaacgcctcctcctccaacaggtccggcgcagccttctgcaggctgctgttcctgcagatactggacctgtccaacaacaagctcacgggagagctgccggactgcctgtgggagatgcaggcgctgcagttcatggacctgtcgaacaactccttctcgggcaagatccccgaagccccaccgtcccacaactgttcgctagcatcactccacctcgccgggaacagcttcaccggagagttcccgaccgtcgtcgggggttgccagcagctggccaccgtagacatcggcaacaacaggttctacggcgacatccctcgctggatcgggaccttcgttccggcgctgaagatccttaggctcagctcgaacaacttcagcggccagatccctccggagctgtcgcagctctcgcagctccagctgctggacctggcccacaacggactgacggggctgatcccgagagagctgggagacctggcttccatgaagcaccccaagatcaactccagcacaggatcgctggacgggtccatctaccaggatcggatcgacatcatctggaaggggcaggatttcacgttccagaggatactggagctgatgacgggcatcgatctgtcgggcaactccctctcgcattgcatccctgacgagctcaccaatctccaaggcctccggtttctgaacctgtcgagaaaccgtctgtcgtgtggaattcctagcagcatcggaagcttgaacgttctcgagtcacttgacctctcgatgaacgaactgtcaggagccattcctccagggctgagcaatatgctgtccctcaacaatctgaatctctcgagcaacaacttgtcgggcacgatacccactgggagccagctccagaccctcactgacccatcgatctacagcaacaatcccgggctctgtggacctcctctcaacccttgccaagacacgtcacgtgttcatgaaggagatgtcggaggataccgggacggggacccatggctgtactactgtgtgatcgctggagtcgtttctgggttctggctgtggtacgggatgctcttctccgttgcgaagttgaggtgctctgttttcttgtttgctgatcgcgtacagtacagagttatgcagaaggtgcggcctaccaatcattttgtttcgaaagagaagagcgatccatcttctgtgcctatgatttctacaagtgatacaagctgaagaatggagtactgatatcttctcttcatcttctgccctagtgcatcaggagatttgctgtctttctttgtacgctttaagatgtactgtaatgctgagaggaggctagaaggattatagtcaactgttgtatagcaatttcagtaaaaaaaacattatatttttaagacagcccccgggcattgtttn

SEQ ID NO: 630 - DNA, 596 bp, Zea mays
  Peptide Sequence Number=SeqID_11935
  Probeset Number=SeqID_15033
gcttgctgctagccgatgactgtatctacttcatgtggttttaggatttccaggattgcccgagagccaaagttagacagatgggttgcaagagctgctatatttgacacccttcgtggcactgttagttccatgcaagtaacggtgattatcttaggccctcttgcacacatctgttgattgccgcaggaaacttgttgttgctgattggatcttgaggattccacggcgattgaggtactcttcagggcgacgcattggtttaggacgtgggctgttcttcataaacaagaagagggtatccaaataaaggaagcttgtcgacggttagagtgcacggctctacagatttttgctcagcatggatggaggtttacaaatcgaattacttcgtagttttgtctatggattgtgtgtctttttctggttatcaaaccatggtcttctatggtgtgtttcgggaggtctgtccctccatttgtggctagtcgtgtgactacttcatgtaaaaacttttggtgtattggctaatcctccaaaagaggagaagctggacaagtatccattatctaaaaaaaatttgacacccttcatgg

SEQ ID NO: 631 - DNA, 559 bp, Zea mays
  Peptide Sequence Number=SeqID_11936
  Probeset Number=SeqID_15034
atactaaagtagtttgcatgcataaacagaattctgaagaaataccatttctaggtcacttgacatccaagagcgacgtgtgcagctttagggtggtgctgctggagctcatgataggcaggcggtcattggacaagagccgatcagcaggtctgccaccagaagttgcttttatgctggatttgtggtatgaagaaactttgttgaggggaaagcgagaaggtcttgctgctcatggagagtggtgtcaggatacccttttgtgtgcatttctgcagcgacaagagcaccacaccttcaggtttcaacctgaaactacgaaagcacattcgtaacaagagacttgaagatgtccatatgctcagatatgacatggtattattctagtttcgctttctctcagataaacatttcatgtcagcagatttgtattgttgcttgttggccatttaattgtgaccattttttgtttgtgcagactatccttttccattttgggcttggcagtaatgcacatttcataattttggatctctatgcacaaataaacattcttccc

SEQ ID NO: 632 - DNA, 561 bp, Zea mays
  Peptide Sequence Number=SeqID_11937
  Probeset Number=SeqID_15035
aacgatgttcctgcaaaggccgacaggagctgcgcccacgatgccaaaaaataatcgggaacggaccctgcctcaccccaatccagttcgtcgcccacccgatcctgcccagcctcgcggtgctcggcctcaccgtgcccgctgcaatcgcgcagcagcaagcaagccggagccaccgctgcggaccctgcctcaccccaagccagtttgtctgcttgccggagcttcaccgagctaccctccgcgaccatcttcgtcgagcttcttttcgaggttgcctttggtgcatcctatgcttaggtaaagaagaagaagaagaaggtgtcgaggcggatctccaggagttccaggacttcgacgagtttgaggattaggctatcgacctcccctagtcagctacctgtggtgggtttgtttacgttggctacatttctattatatacactttgatttatattatgtaaatcactctagtctgtagtattattacctactttttattactattcgaagcattgtgctatgatgagtcatttatgtaatcgctgtgtacgtgaattt

SEQ ID NO: 633 - DNA, 708 bp, Zea mays
  misc_feature (708)..(708): n is a, c, g, or t
  Probeset Number=SeqID_15036
tttagatttttcttataaagtgggtattacacacatgaccctcttcctctaagtctcagcgcaaggcatatccatgtagggctctgcagagccagcgcctcacccttaccacatccctaaaccctaggtgagtcgaggttgagaaatgggatgaagggatggcatttgagtaaaataatgtggttcattctatgatagagcttagtttagcgcctcccgaacaagaggctcaagaagttgttgattgggatgagtaacaaattattgaaacaatggatggtgaagggagattagaagttgctagtgaagagcaactgtacgtccttttaggtttgagagatgacagcgagaaagcacaaaaggattgacaagatgatagtcaacataatcattctagtgttacaaacatatatttagatttaggtggtgcaaccatttatgttgatgatcacataccaaatgagtggatgattttgtacaacaaagataaactaaaaatgaagctaggtgctttgtttacctctagatagagtttagatcatagtytaaggaaatggggtcgatgcctcgttccatggcccgggtcagcatcccaaatygtgggtcggggtcmccatgggtcatggtcccgaatgctaragagttgctataccmttgcacatggaacgacatgkatyttactcattttggatgtgstactccmcttan

SEQ ID NO: 634 - DNA, 639 bp, Zea mays
  misc_feature (638)..(639): n is a, c, g, or t
  Peptide Sequence Number=SeqID_11938
  Probeset Number=SeqID_15037
agccgcaagccaaaaccctagcaagcaaaccaccggagcagcggcgctcgcgcgggcggagccatggcggacgacgattacaacgaaatcgacatgggctatgaggatgagcctccagaacctgagattgaggaaggggccgaagaagagcttgagaacaacgaagatgcccctgatgatgtcataggtggagagggtgaagataaggaacaggaaaagaccaagcgtgagcgcaaaacaacaaaatatatgacgaagtatgaacgtgcgcgcattcttggtacacgagccttgcagataagcatgaatgctccagtcatggttgagcttgaggggaaaaaactgaccctcttgagattgcgatgaaggagcttagagcgcgcaagagggtcagtttctccctcaagctcgccaagcacgccgtctcggagggtaccaaggccgtcaccaagttcacctcgtcttagccgccttgttgtaggcgtcgttgttgtctgcttytcaagcaagcactgtcatgtgccgcttctcatggcagtagtggtggttggctggtgtgtgtaagtggtgcagtggcttttgcctgtgttatgaatttagtcakggtggtaatgtattgctatggyyatttgaatgtnn

SEQ ID NO: 635 - DNA, 859 bp, Zea mays
  misc_feature (1)..(1): n is a, c, g, or t
  Peptide Sequence Number=SeqID_11939
  Probeset Number=SeqID_15038
nataaatagattatattttatatataaatcatcgtattattatatggttgtgtggtaagacatactcaccgggacacagaaggatggaagcatgatggagcacccacacagggctcaaaatcctcccccgaaacgccgacgaaattctccgcgagcaaaatataaagtttataaacccactcctccccttcccctgttccctctaccaccaccaccggcaccgcgggacagtctgctctcgtcccgccgcagcccgtccccgacccggaaccctagcgactgccattgcccacgcgccgctcgcccgatgaatggcgggggctctgggctggcgcccaacgccgcgcacaccgcggacgaggtcttccgcgactacaaaggccgccgcgccggcatgatcaaggccctcaccactggtacgcctccgctcgccccgccgattggccccctgattctgtcctgtctgcgtggattcattcgattgacgcggggtttctcttgtcctgtgcaagatgtggagaggttcttcaaactctgtgaccccggtgagtgcgctcgatatctttggttcctcgccccaggatgtggagtgatagccgaggaggcttccgtggtttttctgcttgggtttcgttgctttggtgggggattggaagctaaatttggagaaatatcccttttctctgtctcctctaccctcactcgacatgcttcggattcgattattggtggccttgcagctttcgttaatgctctgcttgtgctggactgtagctgttcgaatttggtgagagattggaccccatgatgacagttttatgttttttcgattaggatgttctaggtaatggtctcgtgc

SEQ ID NO: 636 - DNA, 1160 bp, Zea mays
  misc_feature (1160)..(1160): n is a, c, g, or t
  Probeset Number=SeqID_15039
acccacgcccacgccgagcggtgaaaggagaaagagagacagagagagagataccccgcaaatggatatgcgagcacgtcgacttctgaccaaggcagagggctagggagaatcgcctgcgcgtatgggtgctcgtcgtggcgtcgttgatggggaagacccttggcgtcaccgcgatttctcaccggagttatgggccccaccgcggatcgcacttccctgtgggcagaaaacgtcacggcatgaccatcgcgaggttacgagtcacttgaagagcaagttggtacctggaatctcaagtcatagattactttatgcactaccggaattggatgctgtgccgagtgcctgaagcactcggcaaagcctggaatgcactcagcaaagtcttcgccgagtgtagcactcagcagagagagttcgacgaactatacatcggtaacagcttctttgccgagtactttttatcgggcactcggtactcggcaaagaaaagtcaccatcacggtgatcggtaatggagacggtgacttttgccgagtgttctaggtgacactcggcaaagatattacctttgtcgagtgtcacctaatacactcgacaaagtggttacctctttgccgagtgtccgtcagcctacactcagcaaaggggccaccaacgggcccctgtgccattttctttgtcgaatactccaggaggcactcggcaaattgttgggggccttcggcttccgaaggtcctcaaaaacaggatttaacagtatttctggagtatagtgtgtgaacaggtatcttcggactcaagtcagcatcacagcagaccagaataatacgaaggttgatacagcgccgaaggtgtgagcaggaaagcttcggcgtggcagcaaaaaatgaaaccgacttaaagatgaaaaggctattcagacctcgatagattactatagaattattatcaaatgtaaagggcataaatgtaattttgcataggctatgtcctgtgcctataaataggtgaacagtacccccgtactgttcacgctgatttggcattcacttttgtgtcacgcttttactctcatctccttcaagttgaaggtacatttgtaatttgacgtcacttctgtttatacatgataataatatataattgtttatgtn

SEQ ID NO: 637 - DNA, 632 bp, Zea mays
  misc_feature (632)..(632): n is a, c, g, or t
  Peptide Sequence Number=SeqID_11940
  Probeset Number=SeqID_15040
attaatttccagggatgcacgcaggcaagctcaagaaggcagtgggttcttcagtggtggtggcacagcttcctgatcgccttgacagccaccaaattcctgaacgagtactacagcgccgatgggggcctaatggagcatcacaagggttgattctgtggtctgggttgcatccatctctggcaacttgggaggacctgattccacttcgtcagaggttccctcgagcgcctgcttggggacaagcggcgtgttatcgggaggggaatctcagtctctccacgcgagtcgacttcagaagacctccaggtgcagcaggcggaagcagccgtgtccgaggagctacagcagcaacagagcaatgtggagactggtgggcctcaagaggagactacagctgggctgagaaggggaacacgccagcgtaaggccaatgtgagattccagggcccagaatggagaacctgaagatatacgctcgctgagacctacggagaaggcaggatgtaacagaactacgtttatcttcttcctcaagtttcttcttctcctctcgctactgtcttccctgctactgctactctgtaattctgtttccaccaagcgaatacatcctcgcagcaaataccagn

SEQ ID NO: 638 - DNA, 1514 bp, Zea mays
  misc_feature (529)..(529): n is a, c, g, or t
  misc_feature (620)..(620): n is a, c, g, or t
  misc_feature (622)..(622): n is a, c, g, or t
  misc_feature (1274)..(1274): n is a, c, g, or t
  misc_feature (1514)..(1514): n is a, c, g, or t
  Peptide Sequence Number=SeqID_11941
  Probeset Number=SeqID_15041
gatgcacccgcttggggacaaactgttactaaagatgggggaatgtcagctccacgacagtgacggacgcggagccaggtactgaagaacagcaggctgggagcgaagacaatcgttgcagagccagacgcaggaacgtgccgctaagtgagccagaatgggacttgtaattcgcataggctacatgtgtgtcgccgtgaggctgatgttatatgcataagaccaggatcagaatacaattcctacctctctcatactctcttctttcttcttcctcacgtcttcttctgcctcaaccgccgatcgacccctacccgacgcgttgctgacatcgtgattgccagcgatgtcggcgcaggcgggaacagggacgtactccccggcggcggccgcaggggacaagcggcgggagaggaaggaggagctacggcgccaccttgccgaggacgccgactggcctcgggccgacggccgatccttccacgactgtcggccagcgtgtaactgactacaccccctcccccacgtnctctatctacctgctctccatttagaattttggtagtatgctttcgtctgctcttgcctgcaccgtacttatggtgttcgacgttatgcdnbnttagcgagagctacttggtttagtaactgtgtcgtctacctgttgttctgtggagttgaaacttgcactattcatttctggaccatgtaattcgtcgataatttacaatgtgtcttgcagttatgtagacaggaccaattactgcctcatcagggtctgcctatgcagaatttgggaagacaggttattgtatctgtgtttggaccaagggaaagtaagaaagcaatgatgcacactgatgttggtaggctcaattgcaatgtgagctatacaacatttgccactccagtgcgtggaatggtacaccatatatctacctctcgtggactaactagtcgaaggtgatcttcccatcattatatcatgcgctagtcttgcactggcagacgctggaatcatgatgtatgaccttgttacatccttgtccagtcctgttttggcaagaacatcatcatcgatccgacctcggacgaggaagcacggcaagatggaagccttgtggtggctttcatgccagtccgcaaggagataacacaactcgcgctcactggagagtggagtgatggcagaataaccaaccaggcggtagagctctgtatggatgcttgcagcaagcacggtgacatactgcgtgaccgcttgaakgatgcmngcaccttgacgagtgaatgacgtggcagagacaacacttgcaacagcagatatccttggctgtataaattctgtaggcaagggaggctgatgggcctgatgtttgagtgagcgtgcatggttaatgatgattttttttctctctttctttttcttgtcatatataccccttgcaactcacttctgaccttcacctttggcttcatatagcatatgtatctttctttttcttgtcataccn

SEQ ID NO: 639 - DNA, 572 bp, Zea mays
  Peptide Sequence Number=SeqID_11942
  Probeset Number=SeqID_15042
aaaaaacatgcacatgacatgatcatctaatatccaacaaaattaatctatccatcatcacatcacataagatcatcttcattcacacgtacaaatagccaatatagcataaaaacaaagtataagtcctttcgttatgaactttgacactagaataaattattagtttaactccttttttacaagcttcatgtggattgttgttccattttccttctccatgtcagcttcaagtgttgcttccacttagcactgtgattttgcgctttagccacattcttcgaacattgtggttataacaaagaacaaaaatttcttctgagagaggatgtgtgaatgggccttttctcttctgagaggtatgagattatagcagggagaataacaaagaacagttcatcatcgacttcttcctcctccaacaaaaaaccgcctaacatgctcctcccaagaacccattatccgacaaaatcaccgacggagggacggcggcggccgacgaaggggtggcggcggcggccgaccgtgacgacaggacgcgagaggaagagacgaggcgaggtcgcgaggat

SEQ ID NO: 640 - DNA, 631 bp, Zea mays
  misc_feature (1)..(1): n is a, c, g, or t
  Probeset Number=SeqID_15043
nacggaaaaaattaggcaattcacttatatatacttctagaattgctataaagtgaagcctttagattgaccttacaagtcaggcgccattgctgtgtgcatatggctcctacacctaccatacataattgttagctagactaaaacatagagtgcatatcatataatgcggtactgtagtttctttctttccttctaatctctactacctattaagatggtaagggttaggctgccccattctgtgttctgccattcccattccgtcttcactgcaaagctcattctcattcctagctgcctgtctttctcattccccctccctgcaaagctcattcatatttccattcccggctatcacgtgtctttctcattccccctcccacaaagcatattcccattcccacgtgcatcccacgcctagctaaaattaaattaaaaaaaacaggctccaaggggattcaaacacgcgacatctcaaataaatgtgtttgtagctaccactacaccacatgtgtgtttatgtctacatctattatagtaaaaacatataatacgtctctcccgaagcccacctgctacccttgcacaatgtgtagtagtagataagtatcactgagattattaaatt

SEQ ID NO: 641 - DNA, 729 bp, Zea mays
  Peptide Sequence Number=SeqID_11943
  Probeset Number=SeqID_15044
gagaaactcttcacgagtcagttgtgctctcgtcatacctccgacgaactcacgtcgcgatagtgacgtgccgacgggcaaggggcgtctcatgtggtatcaaagccgtgttcctcggagtttttccacgacaacgccgacagtgaagccctcgaagcagacgtggatcatgttggaagcaatggaatcgttggagcagaagagcgaggagcagtgggatcggatgatgcggatcctagaccggctcggagacaaggtggaggcgatggagattagacaacgatgcctagcaagcagattccatggaggtgggccagcaacatcttcaacaccaggtggaggttgctgcctctgcggttcggaaggcagaggaggagcgctccatcctcgctcgtcaaatggaggaaaccaggaagacagtgtcgcgtctttgcttggagtggatggccaaggagatggaaggtatgggatcgaaaactgagagggagaaccgtgagcgtaggattgttgaggaagagaatcgaaggcgagaggaagaggatcagaggcagggggagttccgtgagcagcgagggaggaacaaggagattcgtgagggggagttccgtcaacaacaagggggaaattgagagtatagagcagcggatttgccaaaaatgtcattcccaaaatttcagggaactaaagcagggatatggatttataaatgtgtggagtatttttcgattt

SEQ ID NO: 642 - DNA, 1255 bp, Zea mays
  misc_feature (1)..(1): n is a, c, g, or t
  Probeset Number=SeqID_15045
naaatagcatatataaacggttatgcataaaaccggggcttgccttttctttaacacttayatagtgtttgctgggtggcactcgcttggcgagcatccactggttatgtccattcttccttgggtcgtccaccgactgcatcttgtgggtggcaccacatcacttacacgatcgtcatctctcggtccatatcaaacctaaacggtgtttgcaagaatgacggtgattccgattgtgcatcgctccaaacatccgacgagcgttgaatgattggccttcttctcgcaaaacgcagggttcctctccacaaaacaaaaaccaaacagcacatatgcaattaatcataggaaaaaaaataacccgatgcggaatcgaacataaatcgtcgtggtctcaccgggggtgaacgacgacgacaaaggggctgcgcaaaaacagcaacccacggtgagcgacggcggcgtgctgtccacagggcttcacgaaacagcgagccggcagcgcgcggcttgctgcgcattttgacgaacagccggcgggcaccacgacgaacagcgaggaagggggctcgcgcaggggtgcagcgcacggctgttgctgcgttcccggcgctgcaacaaggagaggagcagggggaggaaggggaagatttgcaggggcgccatggacagggagctgctgctcgcctgcagcaagggcgccgagttggggaggctgagcgcagggaggaagaagctactgctgggagcaccttcgctaggggagctcggccatggctgccctgcgcaagggaggccagggaggagggcgaaaaatctgggcgtccatagcaggcaagatggagctcgcgcccatggaagaagaagggcaggggcgtcggctgccctgcgcgcaacggggaagaaagcttctgcgcacgcacaggaaaaacagaggggaggagagggacgagctgcagaggggcgtcgctggggaagggcgccatggctgtggaggtgctcggctgctgcagagatggaactcgcccctgcaggaaggagccgaggggagaagggaggccagccgtgggagggagctcggcgaccagagggaaaagctcctgctcaccggcctggggaagaaggaccctgctgcatgggtgccgagtgccatggcaaggagccaagctctggcgtgcgtggagcctgcggctggaaaatggcagaggaggaagagaagaggtgttggcggctgggggtgggaatggaaattttc

SEQ ID NO: 643 - DNA, 942 bp, Zea mays
  misc_feature (942)..(942): n is a, c, g, or t
  Peptide Sequence Number=SeqID_11944
  Probeset Number=SeqID_15046
attcccaagttcgagcaatcgagccccagaggaacgagtcctgccggacgccgccacaccatctgaaactgacggcggcgggtggccgctgcttcctctcccttctctgtccagatccggcgactggcgtacctcctccaccatcttccctacccccgacgtggcgacgagctgtgagccgtaagccgtgagctgttccaacatttcggttcaagctgaaaggagaacagaaaagaggaggggcagaccaaaaccaagcgaaacaccagctgcgtgcaccaaaggggagacagcagcagaagccgcgcgcgtgcaatgggcaacaacatcggcgggcggtgcaagggtgccaaggtgatgcagctggacggcacggcgttccgcgtgaagccgccggggtccgcgggcacggtgctgtgcgaccacccggggttccagctgctcgagtcggaggaggtgaagctgctggcacacgggcactcagctagttctgtgatgaagagctaaaatataraagtggcggaggcccgggcacgtgcccaggatttggcctgcggcggcccaaccgcccaagtcacgccagcttgctccaggctccatccgccccacgtcaaaccctagattgagtagcgccagtcgccagctccccgctccaggccagcggccagccggctccctcctcccgcgcccggctcccgcgcgaccaccggccacggtctggccccggcgcccatgccagtcgctgcgcgacgcatagtaccagcacctgtcgccgccaggccaggcccgcactcagcaggccgggctactccctcctaattttttttattgcttcctccatttcttgcaatttagggaacaagttctgtacaattgctacaggtctggaagtgtttgactcggagcttsttctgaatggtattgttactcacaagttagttn

SEQ ID NO: 644 - DNA, 942 bp, Zea mays
  misc_feature (1)..(1): n is a, c, g, or t
  Peptide Sequence Number=SeqID_11945
  Probeset Number=SeqID_15047
naactaacttgtgagtaacaataccattcagaasaagctccgagtcaaacacttccagacctgtagcaattgtacagaacttgttccctaaattgcaagaaatggaggaagcaataaaaaaaattaggagggagtagcccggcctgctgagtgcgggcctggcctggcggcgacaggtgctggtactatgcgtcgcgcagcgactggcatgggcgccggggccagaccgtggccggtggtcgcgcgggagccgggcgcgggaggagggagccggctggccgctggcctggagcggggagctggcgactggcgctactcaatctagggtttgacgtggggcggatggagcctggagcaagctggcgtgacttgggcggttgggccgccgcaggccaaatcctgggcacgtgcccgggcctccgccacttrtatattttagctcttcatcacagaactagctgagtgcccgtgtgccagcagcttcacctcctccgactcgagcagctggaaccccgggtggtcgcacagcaccgtgcccgcggaccccggcggcttcacgcggaacgccgtgccgtccagctgcatcaccttggcacccttgcaccgcccgccgatgttgttgcccattgcacgcgcgcggcttctgctgctgtctcccctttggtgcacgcagctggtgtttcgcttggttttggtctgcccctcctcttttctgttctcctttcagcttgaaccgaaatgttggaacagctcacggcttacggctcacagctcgtcgccacgtcgggggtagggaagatggtggaggaggtacgccagtcgccggatctggacagagaagggagaggaagcagcggccacccgccgccgtcagtttcagatggtgtggcggcgtccggcaggactcgttcctctggggctcgattgctcgaacttgggaat

SEQ ID NO: 645 - DNA, 1018 bp, Zea mays
  misc_feature (1018)..(1018): n is a, c, g, or t
  Peptide Sequence Number=SeqID_11946
  Probeset Number=SeqID_15048
cccgtctctcttcctcctcgctccctccgtctcgtccctctgcagatcacttcgtcgggttctcatccccttcttgctctctccgcatcgtccctctgcaagtacacgcgctcctcccgtccgcgcctgcgagtatctcttctcagagtctccagatcggggcctccggcagccgctcgcgccaacgctgtcgctgcctgtccgctccttcaccagacgccagcatgcgacacacttctagaatcgaacaggcggtgggawagwagaaaaaaaggagaacactctcggctctcccacgccatgaaggtcaacaaaggtgggggacggtcggccctccggcgttgtcgtcggcgcttgtgcttggtggcggcaggcacagccccgcgggcagtaaggtcggcgcgtctgcgagggtattcgaggcttttcaggaggcgtatgttttatctcattatttggctctgcttccaagcaagatcaggagtgggggagtcttcaaccatccaccgcaccaccgtcaaaggggttcgtgccgcctgcatccagcagaccatggcagtcagtcttcaaccagccactatgccmccgtcaaaggggcccacgccgcacacttccagtagaacaggcgagcaaggccgtcagtcttcaagggcytaaatcggattgaagtaatacatttggtttctttttttggtccattgaatatatatgctactgcatgtttactatggccaactcgagagggaggcaggcaacttgctaggagaggggagctacgctccactgcgtcgtgcgcgcgtcctcggggaggccctggccaggagccatgcgctggtggccagtgcgctgaaccgctgaaggtcataatttttctgcattcttaatgtattgatgtagcttcaaactaagtaccaggtctgattcaaagcgaggtgagaatttcttacgttgttctttatgaattatgtttccctaagaagaagttatttaaccaaatagactatgttttatttgacgn

SEQ ID NO: 646 - DNA, 881 bp, Zea mays
  misc_feature (881)..(881): n is a, c, g, or t
  Probeset Number=SeqID_15049
agacgttctgttggcgcaccgaaccatttgcgcatagagctctgcaaatggctatctagcagctggtgcactagaccggtttgatagtgcaccgaaccgtggtccaacgactagatgccaatggctatgtgatgtggcaggcaccggaccgtgcgggtagcataccgaccatctacagtgccgacaggtacaatgactagctgacgtggaagctcggaccaaacagtatggtggcgtaccgaaccgttccggtgtacaagcatataaaaaactacagctttttccaatgtctagaattgagtgggggctctatataaacccccttagccaaccatttgaaggtatggtagcccaagaaacatactaaggaaggttatacacatctccatgtgctcaaacacccaagtgcttaatagaatcattcgtttattagcgtagatgctttgcaaagtgtttaggttagttagaccgcttacgcgcttgctctaggttgttcttagttagttgagtgagtttagaaaaacccacaaaacccatcgactcttacacggagctgttgtaatattctactgagtgggacaagagtcttgcgagaccgcatcaaccgtgttgtggtgcgagcaccaccgtgtaccaaaggaaactgggcccaggtgtttcgactggaagctcaatagtgaagacggcgagaagcgtccgataggaggccagaagcggagcaccacttgcacatggagaaggcttatggctctctacagagttagtcgaccggatgcttggcccccgcatgggcttccccttgcgtagtggcaccaacgaggattagttgagacattgcgcggttctggacaccttagtaaaaataccgacgcattcacggn

SEQ ID NO: 647 - DNA, 745 bp, Zea mays
  Peptide Sequence Number=SeqID_12102
  Probeset Number=SeqID_15050
attgaaactgaaaaatctgcactttgaaaattggaatacattacaatttacaaccctaccaagtaccaaatcatactgggttggttggtcctgcacagctgcacgcctggtcgcttgcactcctgcgtggccactagccagcgtgggcagcgtggctacggcctgcgggctgcggaaggagcgtgggcgtgtcgtgcgtggcctactggcctggcggtcgggcsccgtgcggccaggcggagccgcggtccgcggaggcagccaggcgcgcgcggacgcgcgggcaagacgcaggcagcccgcagcccctcgctcgtcgcctcgtcggtcgtcgtgctgctcagtgctcgtcgtcgtcgcggactgcctctgctcctggtccactcggagacagcggctggcggctggcttccctaagctcgttgccctaatcttttattgggccaacccaaggtattgctcaggcaatactaggccatattgggccctccgcccctggtgcgtggcctactggcctggcggtcgggcgccgtgcggccaggcggagccgcggtccgcggaggcagccaggcgcgcgcggacgcgcgggcaagacgcaggcagcccgcagcccctcgctcgtcgcctcgtcggtcgtcgtgctgctcagtgctcgtcgtcgtcgcggactgcctctgctcctggtccactcggagacagcggctggcggctggcttccctaagctcgttgccctaatcttttatt

SEQ ID NO: 648 - DNA, 548 bp, Zea mays
  Probeset Number=SeqID_15051
aggggacgtacggtacgactacgatgggttggggcgacctcgtcggttggatcagatgggcgctagtcggcgccaccatggtcgtcgtggcgctgttggccgtctgcatgctcgtcgtcgccgtcggccacgtcatctacgtgctctggcgaaacttccgcggcggcggcggcggcgccaacaagacgccgccgccgctgtccatcgaggaggtgctggagcggataccggactacgacttcccgtaccaggagctccccggcggtgccggcgacgacgacgacgaccacagggagtcgtgcgccatctgcgtggcgccctacgaggccggcgaggcctgcggcgtgctgcccgggtgcggccacgtcttccacaagctctgcgtcgccgagtggctgcggcagagcaccacctgcccgctctgtagggcggctttcgacgtgactgagggcacgcgacaggccgtcgttgacaacatggtgtagctattaattaattcaagccttttcgttttaacaaagaatagttcgtcgaataggatgtggccc

SEQ ID NO: 649 - DNA, 851 bp, Zea mays
  Peptide Sequence Number=SeqID_12103
  Probeset Number=SeqID_15052
aacataacaaccaacgaatttcgcaatactcaaatacaagttcttttacagttttccaacgacacataggtcgacttctttcacaatactcacgtattcagctcgactcatagtgatagtactcatgcatgttggaaggatcttgatatggtcccccatcccactcctccctgcaccatatgatccaacatcacctcccttcgtcaccatgattgtcatcgtctccatgatgacctacactagggtcgattgtgctataatcactgtcttcatcctcttcttcttcgatttgatcggtgaatttgactctttttccttttctttctgatggactaagtcttgtcttttgcatgccaaggtggggtcgccaactgtttcatcggtccatgctttcacttcctctgtgtctccttgttcgtgtacaagtgatgtaaacaatatgctagaaagaggagtgtcactgttaggtgagtcttcgtccaatgttgaaggtgcattggaactaaactagcacttaaactgggcaaaaaatagcatctaatagtaaatcatcttcacatatagtataacatcttcacatatagcatataacagtaaacaagactaatatgcctaaactggccactaaatacctaaactgaaactcaatcttggcatcaaatccaatttcccggcaaaaacggcggtttaccggtccaaaatcacggtttaccgatccaaaatggcggtttaccagtggtttttcaatttttatgttttttcaatttttttgaatttgagacgaattttggaaaaaactgtggttaatcgaaaccgcgccacgacgattttggtaaaccgactgattttgg

SEQ ID NO: 650 - DNA, 851 bp, Zea mays
  misc_feature (1)..(251): n is a, c, g, or t
  Probeset Number=SeqID_15053
nnnnnnnnnnnnnnnnnnnnnnnnnnnnnnnnnnnnnnnnnnnnnnnnnnnnnnnnnnnnnnnnnnnnnnnnnnnnnnnnnnnnnnnnnnnnnnnnnnnnnnnnnnnnnnnnnnnnnnnnnnnnnnnnnnnnnnnnnnnnnnnnnnnnnnnnnnnnnnnnnnnnnnnnnnnnnnnnnnnnnnnnnnnnnnnnnnnnnnnnnnnnnnnnnnnnnnnnnnnnnnnnnnnnnnnnnnnnnnnnnnnnnnnnnnntgtttactgttatatgctatatgtgaagatgttatactatatgtgaagatgatttactattagatgctattttttgcccagtttaagtgctagtttagttccaatgcaccttcaacattggacgaagactcacctaacagtgacactcctctttctagcatattgtttacatcacttgtacacgaacaaggagacacagaggaagtgaaagcatggaccgatgaaacagttggcgaccccaccttggcatgcaaaagacaagacttagtccatcagaaagaaaaggaaaaagagtcaaattcaccgatcaaatcgaagaagaagaggatgaagacagtgattatagcacaatcgaccctagtgtaggtcatcatggagacgatgacaatcatggtgacgaagggaggtgatgttggatcatatggtgcagggaggagtgggatgggggaccatatcaagatccttccaacatgcatgagtactatcactatgagtcgagctgaatacgtgagtattgtgaaagaagtcgacctatgtgtcgttggaaaactgtaaaagaacttgtatttgagtattgcgaaattcgttggttgttatgtt

SEQ ID NO: 651 - DNA, 802 bp, Zea mays
  misc_feature (601)..(802): n is a, c, g, or t
  Peptide Sequence Number=SeqID_12104
  Probeset Number=SeqID_15054
cgagggaagcaattcttattcattgcactgtcattcccaatttcacaaatcacaagttgaaaagctgcaggaccagggagtccatctatccattattccgacatcaacaacacactcagaatcccgaaagtgagaccctgcagcctgtaatcagaggctcgcgggcgttggagcatctccgacgacgaagtccaggaccatcacctcgtccagcagcggcctgaccgaggccttggcctcctccaccttgccgtccccttccacggcgtccagctcctccacgctgtcgaacaccgccaccaccatgggtaatggatgtccttaaccattccaaatatagacctttggatgtcaagcaaattctttaaatacaacatcagcgacctggtttctgatagaaatcgcttttgcgagatctgcggagatgggggcatggtgtaccacgaggaggagacggcgccggtggagggcagcgccgaggctgggcgctgggattagatctctgagttttgtttattgcagctattgatggtgcgtccaatagatgggatatgtttaaccttagtttatttgcacaaagtctcttccatctcttcaggtnnnnnnnnnnnnnnnnnnnnnnnnnnnnnnnnnnnnnnnnnnnnnnnnnnnnnnnnnnnnnnnnnnnnnnnnnnnnnnnnnnnnnnnnnnnnnnnnnnnnnnnnnnnnnnnnnnnnnnnnnnnnnnnnnnnnnnnnnnnnnnnnnnnnnnnnnnnnnnnnnnnnnnnnnnnnnnnnnnnnnnnnnnnnnnnnnnnnnnnnnn

SEQ ID NO: 652 - DNA, 553 bp, Zea mays
  Peptide Sequence Number=SeqID_12105
  Probeset Number=SeqID_15055
ataaaggatagctctaggggctctgcttcccctttccatcttcgcgagccgttttctagcgctgcgggcgagagacagagaatcaggagtttggtgttaccgctgccgtgtgctcgtctcatcataggtgccgcccggtggccgggagggggactggggtcatcctcatccgtcgtgggacttgcgcgagtagggaatcaggatcacgcgtcggcatccgcgacgaattgctcaccggagcaattagggcgctgcgggtccgctctcagcgtggctagcctccacgggaacacgaattctgacaagcaagtgaccgaggaccccgataccaagcaggtggagaatactgagcaggagcccattgaaggtgaagagcaggtagcccagaaggaggtatacaacgaggagtataagcttatctaggtggcatctcctagtcagcttgatggcgccaacgaatagttattagtttgttttattgttatcattcatttttgtaagacacttccgttatgtaataatgattgtgacatttatctttatacacttggtc

SEQ ID NO: 653 - DNA, 244 bp, Zea mays
  Probeset Number=SeqID_15056
actcctcttgcctcttggttcgcctggttgctttgcttcgtctacttctcaacatccccacgaaaagccgaggattggactcactccaccggaagcgtgtgtacgcacggacccctcggccctcgcccccgcacggccatggcagccgccgtctccccctcatcctcgcccctgtccacaaaccctatgtagcacaggagttcccgccgtcagatccccgataccccgcacagccgcgccgatc

SEQ ID NO: 654 - DNA, 244 bp, Zea mays
  Peptide Sequence Number=SeqID_12106
  Probeset Number=SeqID_15057
gatcggcgcggctgtgcggggtatcggggatctgacggcgggaactcctgtgctacatagggtttgtggacaggggcgaggatgagggggagacggcggctgccatggccgtgcgggggcgagggccgaggggtccgtgcgtacacacgcttccggtggagtgagtccaatcctcggcttttcgtggggatgttgagaagtagacgaagcaaagcaaccaggcgaaccaagaggcaagaggagt

SEQ ID NO: 655 - DNA, 1162 bp, Zea mays
  Probeset Number=SeqID_15058
acaagccacaacagacagacagtaaaatccacaagccttcgtcgacatactgcgttcagaacttcgattgactcatattcaggagcgcaatggtggcgaagagcaaaggggctaggagagcattttgggtccctacgtgccggcgggggagcgccctcctcctgccacgaactacaccgacatgcccaacgggcacatcgctgcaccacatccacggcagtatggatttgggtatcatccaatcccaaaccatcttctggtcaatggtatacatccccctcgcccacttcatactcagtctggattccattatcctgggtcttggaatcattttatccatacctctgatttgtttgggagcaagggaccgagatatgggggagataacagcctaggaaatttactaagcttaatttttcatcatttgacggggagaatcctaagctgtggcaaaagagatgcgaatactattttcatatgtattgttgccgatcctagtgtgtggatacgtgtagctacgatgtagtttactggaccagctcgttggaatatagagcaccaaccatgtcgtggagagtttggttctatgattcttgagagatttggcaaagatcggcaccaatggctgcttagacaactctttcatattagacaaaccagttcggtagctgcctatgtcgatgagttttttcagttagttgattattatacaatgaagtttgtggatggacttagagatggtattaaagcagtggttatgcttcaatgtcccccgatctcgatattgttgctgttcttgcacaattgcaggaggaaactggcactccaatgaggaaaggaggttccaaatggcctgattctagtttgcccttcaaaccacgctagggttttggtctagcacaagcttctcgagaacttaagtcacctgttgctgcgaagcttgatgaaatcaattagttgggtttttcctgtcagatggatttattgggtcggttcaaccttaaattctgggtcctctaatgttcttttaaatggtgctcctaggaagaaatttctttgcaaaagaggtgtaaggcaggggggcctttatcctccttgttctttgtaattgcagttgagcttctccaatacatcattaataaggctactcagcttagggttt

SEQ ID NO: 656 - DNA, 565 bp, Zea mays
  Peptide Sequence Number=SeqID_12107
  Probeset Number=SeqID_15059
aaacggaggaaagaaacggaagccgaaaagaaaagcgtgctcttttttcatccttcgtgcgtggtgcgcgagcgtgcgcctcccttaccatctcgcgatcccaattcgatccgctcgccagctctccccatcagacctgccctccccggccgggcgattcgccgccgctactcgaattcgcgtggacccgtcatccattctcgctccccggcgccccaaaccctagatccgctgctgttcttcccaccgccgccgccatgttctggcgcatgaccggcctctccgcggcctcgccccttacgtgacaaggctcaggtggaacagttgcttcgttatgttgtggaagaagttccagatgatgctgaaaggaagcgatctttcaagttcccatttattgcttctgaaatatttacttgcgaaatcgatgtcattttgaggaccctagtagaggatgaagagctaatggatttgcttttctcatttgtgaaacctgatcatccgcatagtacattattgtctggttacttcagtaaggtaacttagtcaatytgaatcaatattttct

SEQ ID NO: 657 - DNA, 221 bp, Zea mays
  Peptide Sequence Number=SeqID_12108
  Probeset Number=SeqID_15060
agagaattggatctctattatcaccagaacgtcatgctgccacatatcacagcacagacctggataccggcctggccgatgtggatcgaaatgcactccctcatggtgtcgtcgtacgggatggagcggcggccgacggagggaattgggagaagggggaaaggtttgagccgcggaggtaggcgagtacgaagacgcctatctctgcgatgctcgattag

SEQ ID NO: 658 - DNA, 963 bp, Zea mays
  misc_feature (963)..(963): n is a, c, g, or t
  Probeset Number=SeqID_15061
gcaagctcattcatcacagacgtaaaacacctatagagggctcaaaggcacgcgcgcgaaacgcggagcgaagagaagccaagggaggctgttcttcatcatggtcgcatatgcaaccacgtcatacgtcgcagctcaagccctggcgagctctttgcagccgcaggtggtggccgccgtcttcttcacgtcggccgcgtgcacggtagcgctcgccgtcctcctggcctcgctgcggctgcggccgccgtggtggtgcgcgtgtgcggtgtgcgaggcgtacgtgacggcgtcgtggacagccgagttcgacaacctctgcgactggtacgcgcacctcctgagccgcgcgcccgggcggaccgtgcacgtgcacgtgctgggcaacgtgctcaccgccaacccgcccaccgtcgaccacatgytgbgcggccgcttcgamaactaccccaagggcgcccccatcgatgtcgcttgctcttggtgcactcgtcgatagtaaaccgaggatgacaatatcggtgacatcaataagctggtggtagcgctgacggaaacagggccaaaaagatccccatytaggagcaccccctgcatcggcacacctcctattgtctgctgaataattacgaggaatatttgaagttggagacaagagttgagttcctgcatacaactcagatgtgtaattttagtagcatgtattcgttaattgtgcttactattatggattgcagatcagagctgcggcctcccttgacctccctgaatttctctgtgatgaactatggttgcaaacattaaatttgtagatgtatgatcgatcgaatagatgtattctctgttatatgccttgtgatgttgatcgagatgaatggcaactttcatattcatttgtaggtgtatgatggacgaaagttgtctcggccttgtgatgttgtagtacaaagcagtgttcatggn

SEQ ID NO: 659 - DNA, 551 bp, Zea mays
  misc_feature (540)..(540): n is a, c, g, or t
  Peptide Sequence Number=SeqID_12109
  Probeset Number=SeqID_15062
aatctcttagacttagagttttagcatttgtggttttccattccctagattactctagttttgtagccagagatccacaacgttttgaactgttgtgtctgtgattttgtgatcttcatcgtgtaatccaaggaaggttgaccggttccactcacaggttttattgaatcaaacttagtttttattgttgctgaagttcttggttcgattcgctcttgtgttctttttttcctcctcttgtggatttatggagaaccttcgagttcttgtggtacgggtgttgttgggatggaccactgcatacgcctaggtggtgcagttcttggttgtgattcaaattgatcctattttgagtttgttcgagaaaaccccaacaaaatcctatcactcacgggattttgaatctacgcacagatttttaagttgctcatgttcatacttcatgaatagacatctttccctctgtgtaaactggtggtgaagtttgagatgattctaccttgtttttagtgccttgttaaaataaataagagagatgcnyttytagtctc

SEQ ID NO: 660 - DNA, 551 bp, Zea mays
  misc_feature (12)..(12): n is a, c, g, or t
  Probeset Number=SeqID_15063
gagactayaayngcatctctcttatttattttaacaaggcactaaaaacaaggtagaatcatctcaaacttcaccaccagtttacacagagggaaagatgtctattcatgaagtatgaacatgagcaacttaaaaatctgtgcgtagattcaaaatcccgtgagtgataggattttgttggggttttctcgaacaaactcaaaataggatcaatttgaatcacaaccaagaactgcaccacctaggcgtatgcagtggtccatcccaacaacacccgtaccacaagaactcgaaggttctccataaatccacaagaggaggaaaaaaagaacacaagagcgaatcgaaccaagaacttcagcaacaataaaaactaagtttgattcaataaaacctgtgagtggaaccggtcaaccttccttggattacacgatgaagatcacaaaatcacagacacaacagttcaaaacgttgtggatctctggctacaaaactagagtaatctagggaatggaaaaccacaaatgctaaaactctaagtctaagagatt

SEQ ID NO: 661 - DNA, 658 bp, Zea mays
  Peptide Sequence Number=SeqID_12110
  Probeset Number=SeqID_15064
aaagtcctctacacccaaaaacatgctctctagaacttcagtacggtgcagaccggacttggtccagcgtaccaaagccctctacatcaaaaacatgctctcttaaacttcaatcgggtgcacaccctacctagtctgatgcacccaaaatagccagarrtaagtccttttgggacattcttctcttggcttgatttgggtggtgtcttaggcaattctatgacttatacaaaacatatcattagaccaacacacattacttatggttcactagagcagccaccaaccaaaactagcaaacccgatacatcaccacgacaactcgattgcaagtctaccaccacggtagcgcatgcaccagcacttaccatgctgctctggtttcattcccatcttcatttagttgcacgtccgtggtgtcacgttctttgtcttctgggtcctccgggttctcttctagaattggtttttagtgcacgataggcagcaaagacagccatactttagtgcatgataggcagcagaactagtcatacttgcttccgagtggcagaaccgacaacaagaacacttaggattatgcaagggctcctacactctaccactactcacttctaccttgcccttgcaagagtggagagggagagtaggatggtat

SEQ ID NO: 662 - DNA, 866 bp, Zea mays
  Probeset Number=SeqID_15065
atttaatttcttcctctctcaatagcttgatcaggtgatctctagactgggccaaacattctagttcatccacattcagatccctaacttcggcctcagcatctaaagagcaaataatactctgaagctcttgtaagaagggccttcgatagagcgagccactgtcgccttacctattcctcctagtagctgatatgctccaagctctgatcaagtcgaacaggatcatccatcaccctattgttacaggctcccctggctatcctgcaatacgcagatgacacattgatcctgctcaaaggctctgtggatgctgcactcgcgctcaaagccaccccttgatcgcttcataaactactccaaagttgtgatggtcactatatatgcatctagaagaccaacttgcttcacaatgtgtggttgccttcagctgttgtcgggaaggcttcccctagagctacctaggtcgacctctgtctaactgcaagctccgcctccactcattcatgcccactatctccaaaacagacaaataccttgtcgggtggcagtccaagttcctcaatccgatgggtcgctccaaggttatctctcccccaagcaatttcgaatagatcctatcctatcggagatctgtcccaatagctcctcagatgaatgactgtttcgtagcagatcacttcgaccgcctccaaaccaaaaaatctctacatctggttatcacttgggtatgggtagcctatgcctctgtcatacttcatctaggacagctatgccccgccggcccgtgtaaaattcttcgtctggctggctggcttcacgggggacaaactttagaaccgtgtcaacctacgcaagaacatgat

SEQ ID NO: 663 - DNA, 1265 bp, Zea mays
  misc_feature (1265)..(1265): n is a, c, g, or t
  Peptide Sequence Number=SeqID_12111
  Probeset Number=SeqID_15066
atccgacgggcagaagcatagcaccaccaccatacgccgccaccgcaagcagacgtccccatggccatggcttccaccgccaccgctgctgcatctctccgcctcgccttacctctcctctcctcgccggcttcctcctcctcgtcctctaatacccttcgcttccctctccgccgccgcagctccgcccgccccatcgccgtctccgccttcaagaagctctccgaggcgtccgccgtgcccatccctcaggagcccaccgagctcctcctggtcgacgaggacgctctgccccccaaggccggggtctacggcgtctacgaccccgccggcgagctgcagttcgtcgggatttcgcgcaacgtcagggccagcgtcgagggccaccgccggaaggtccctgccaacctctgcgcctccgtcaaggtcgcagtatcagatgaggagacaccagatcgatctgcccttaacaacgcctggaaatcatggatgcaagaacacatagaggccaccggcaaggcgccaccagggaatgttgcaggaaaccacacctgggttggtggcccccagcggcctccagacctgcggctgactcccggacgccacgtccagctgacggttccgctggagcagctgatagaccggctggtgaaggagaacagagtggtagccttcatcaaggggtcaaggagcgctccccagtgtgggttctcgcagagggtggtgggcatcctggaagggcacggcgtggatttcgtaaccgtggacgtgctcgacgaggagcacaaccacgggctgagagaaaccctcaaggcgtacagcagctggccgacgttccctcaggtcttcgttggaggggagctcgtgggcggctgcgatatcgtttcgtccatggctgaaaagggggagcttgccgccctactaataattcagaaatgaaggctttaccctacagtgacttgaattgattcgatggttgtctgatccacacgtagtagcacggagatccaagttgttgtacctgctgtgcatgttggatgtggtacgtcgcgagtttgaaaagcgtgtgatgtggtatggacgtgtggtttgcctgctgtttataggtagaagttgcctggggacgacacacatatattttgttttatttatttgtggagatcggagagcgagcgagcctcttacattacgacttccgttcgtgtctggattttgtgtaacagacgtgtaggttcaggcatgaaattatgttgcagattttgccn

SEQ ID NO: 664 - DNA, 910 bp, Zea mays
  misc_feature (910)..(910): n is a, c, g, or t
  Peptide Sequence Number=SeqID_12268
  Probeset Number=SeqID_15067
gattaacgaagccgccgaaccacctcctatcgctaccaaactagaagcgccaatggggtcagggtgagaccgccgacgccgttcctcaacttcgccatcggtcggagtctgccaggcggccgggtttaggaacgccaatgccgggagagaaattaagatcgacctgtgtggatcttcctcaagcgcgagatgtagggatggatggcctcggccatggtgttcccttgccggtgcgggtctcgccgcggtgccgcaaccccgacgtggacagatctcgtctcaacccacccccggaaatggctcgatgctccactgcatctagtggtcctagtggatcctgctgcgctgcgaaacggaaaggagaacaaaaaaaattgcttggccgggcttcgcttggtgttgcccttattttttggcgtcgtcgttacaacaaaggaatccaatcataggtccatacccgcttggcgcttccatattttccatatataaagtcaacttgcaagggtgattctgcagcttcagaaggattccttgttctttacttggggagttattccaaggctcttgtgatcaaaggtcaataaactagtaacataattgtggtttgggtggaggtacatgtgatctggataccaaagtccaaatgaaaggttaatcatatgatggagcaataaatttttattcccaaggctgttccaaatttaggaactgctttaaatattttcaagacgtcacttactatattattcctcccatgtgaacatgtttctgcgccctgatcccctgatcagggacagggaggaacacgataaaatagtgctttggttcattattccgtgacatgtacaggaatcttgacgcctctttgtaatgctacaagtcagamymwgtacaggtgtagtagtactgn

SEQ ID NO: 665 - DNA, 691 bp, Zea mays
  Probeset Number=SeqID_15068
aaatttctaacttgtcttatgttgcacaagctgaagcacatattcatgcacaaatcatatatcgttttatcatcagtcgtaccttgccttcggctccatctagttggataaatttggtcgtggccgtggtcatattctacgaccgcgccggggcgaggaacgcgcacaggcagagccgcagaggagcagcagcagcgcgctcagcctcagtgcatacacaggcgggcgccgcatcgtgtctttcactgtggataggcgatggagaaggcggcaacagacacgtacatgtccctctgtctgtgcaggcctacgagcagtatcatgagttaaatgaggcctggggacaaatcactgtgaccaacgcaaaggacatttggaagcacatttggggatcagagattttctctacaaaaaaacttacaagcatctgatgggtcattatcaagttcatcagattttcaaatcgctttggaaaaataaatgtcaaccaaagcataaaattttctattggctgtggctgaaaaacagactcaacacaaggaatatgctgaagaggaaaaacatgacacttgagtcatacacttgcgaaaactgcatctggcagaaggaggaaactctttatcatctcttcctcagatgtaactttgctaaggtctgctggaattcaattggtttggcgccccctagaatt

SEQ ID NO: 666 - DNA, 644 bp, Zea mays
  misc_feature (1)..(1): n is a, c, g, or t
  Peptide Sequence Number=SeqID_12269
  Probeset Number=SeqID_15069
naatagcataaaagtwtttattacatagcggaagtcttacaaaataaaagataaatataaaacgatctaaagtccatccttggcgccataagtcacctayatcaagtcgaactcctcgtmgmgmggcttcctattgaaccacatgttcttctcccaaaatgccggtgagggtgaabcagtccacgacyacggggtggcgcggmgctttccttgccgtcagacgagaaatttctcgccccgtgaggatgcagagcccgcttcaaggacacggtcggcttccccggacacttgcgcacgtcgtcggcacacaggggagcttgtttgctatactagctagctactcctactttgctttttcccttccgacttccagtaggttctttgccgaggttaacagcgagagcttactaccacacatctagctacaggagagggtttgtgttgttctagctgctgggactcgtaataggggaagagagagaaagagagcagaccgtgaactgtgcacactcccctgctgctaattttgacgcatcggcagcggcactgctgcgcggcagcagcctgcagcagcctgcaggcaggcaagcggctgctgtgcctgtgcctgtgcccttggggagatgatgtagccacacaaaaac

SEQ ID NO: 667 - DNA, 689 bp, Zea mays
  Probeset Number=SeqID_15070
aaaaccctagatacttcttttcttccccaatccctagccaccaccctacaagatacacacagaaatgcgacaatcacacgctcaatcctctccgaccggaagattccttctgcgcacgcgactccactctctcccaatttaccacagccatgatgacggcctctctcccacttcgtcgagcagggcaccgcacctctaccttatccctcccaaaatcatcgctctctccaagcctcctcccctacgcatccactgttggcagcggctcctccaacctcctcacatgtgattccactgctggctgcccctagagctctcagtcaccctgcctccatcgagacgatgtgctgagaagagggagatctgacattcaatcgatctcacttgcagagytgaggtagatctacttgacagttccttctccttgtaatgaatctcctgtggtatttctgattggtgatgagttttaggactaggtacttagaaagacaatttgattgtgttcttcttacaaggaagggaattgaggtcgctaaccattttcttgttcttttcttgttgtaatttcttcaagaaattaagtgcatgaatttcattttcagtgtctttttacttgaagcgtttcatgttagtttatatgaggagggtattttttctattatttaacaggcacagatcggagcaaaggc

SEQ ID NO: 668 - DNA, 832 bp, Zea mays
  misc_feature (832)..(832): n is a, c, g, or t
  Peptide Sequence Number=SeqID_12270
  Probeset Number=SeqID_15071
aaccccctcggcgcacgttctgtcgcgcgcatcagcctgcatcccgcagccgcgccgaatcccgcggcagcgccgcagccgctcctcgcagacgctccttccatcctccgcattccttcaatccttccatcctccgcggatcccccatccttgcgtgtcccagcgctccctccgcgctcgcccgcagccgccccgcatacgccccaaccacgcatcccgcagtcgcgccgcgcaggtcgaggagctctccgtcgagcgcgagcacctcgtcaatgagttctagcttctacagagccgcttccacaagcacgagatctgctaggcccgcctccagaagatggatggatttgatcaaacagtgaatgtgaaggttgtaatggcaactaatagggcagatactctagatcctactttggtgcggctaggtagacttgacaggaaagttgagttccctcttcctgattggtggcataaraggcttgtgttccaaatgatgaaatttccatggattgcttcaggtattgctattaaggtctttttcatctcatgcaaataactattaagctgctcaaatttctttatttgatgggcggttgcttgacmccccaaatgaacgggtgtggccaggtgttggcaagttgctcaattagtatgtcggtggaagccgacaaagccactctggtgcccagtcttgacactgatggtcactactctttcaatagtgaatcttgcagcgtytgaagtactcttaattttgtgcaatgtatgcaactactaacctttcagagaaacgctaagatattatgtcaatgataacataagttgttcgtgn

SEQ ID NO: 669 - DNA, 1085 bp, Zea mays
  misc_feature (1085)..(1085): n is a, c, g, or t
  Peptide Sequence Number=SeqID_12271
  Probeset Number=SeqID_15072
atgttctgcctccgcaccctccgatcgcccgccgcgtccgattcccctgaccccgcctcgcccgcaatctccgccgccgcgcccgcgacatccatcacccccacccgcgacatcccgcctcgcacgccatcaactcgcagcggcccttctccgaacgtggtttgttttttcgtttgctcgagcagccagccgactcgtctccagcaatgcggccggggtcggctcgctggaggtgggcgtcgccgccgacacctccaacgcctccaggcagggattagttaggcgttcctgccgctcttcttcctcccgtgtcgtcagaggaagccgcgaaaagcatgcaggaatcaggcggtcttgaggacgaggagctacaggtgcaggatgcagttgccagtggttccaagaggagcaaagactccgccgccgccgccacacgcagcgccaatgtcagctcgccctctgtggttcactctcaccctgccatcctccctgctcccgcgcagcagattccagaggttaagcaagcagataccacacatatgcattctatgcctgccgcgcgctttacgtagctaacaagttgaattcatcatcaacatatccattgctcgagcttttyttcaagaaccagctaccatagggcaaagtgaagaaacggaagagttgagcaagatcmcattagagaataaggatattcagcttgatatcaatataagagaagaatctcggagttyttcmcaacaagggaactttgacacagaaggtaccagctccagtgaggctttcttgcttggaacggttgcttcagaaaagatgcttgagaaactgaaacataaatytggaagatgtgagcctgctttagaaaaggctattgtggaactggagcatggtataaacggtttgaagtactttgtttgccttgatccacggttgcaggtttgttccgccactgataccaggaggataaaggagacactaccttggtacatgcctgttgccmcaatggacaaaagaagattagtgttgtataattttatgtctgggctgaaggtcgtgtttgatcgagagaggaaggtcttttgctn

SEQ ID NO: 670 - DNA, 1215 bp, Zea mays
  misc_feature (1215)..(1215): n is a, c, g, or t
  Peptide Sequence Number=SeqID_12272
  Probeset Number=SeqID_15073
acagacaccggcatcaccctaatctcgggccctctgtgttggtacgcgcctcattgctcacccttcccttctcaaactagcccgtttggcacgcgctgagccggaatcgaaccggagctaccttattaccgctcggataatgcagtgcccttgttttggtccaaggtcagcgggaagacctcgctcctcttccagttcgcggtgaaccgcgcggcggagagtggccgcggcgtcgtgttcatctgcagcaaggggaggctggagagcaaccctcctttcctgtcccagggcgtcgatccatcgatgagcttacttcagaggatacaaatcaaatatattgaagacggtgatgaaatcagaaagtactttgctgcatttcaccttcttgacgacttccctgctgcagtcattgttgatgattttgcagatttcttctccgacaggagctgccaacaaagatatggaattgctagggctcgagatctagcaatggtgccgtgcactagctttgtgccacaatgctattgggcatgcaaatgcaaagcttggaactcttggttattgcaatctattactttctgatgtacatcaaggtgatactccaagattgttgttcatttaccagagatgggtaaattccatatacmcaatccgaggtgacggcaatggatcctacatacttcagaaccttggcagttcagaaactgggtcaaagaaagcaagaaaagctaaatactcaatagcactacaatatcttgttcttgaagagaccagcacctaaaaattctgcatttttctattacagttcagttcccaacagagatcataggacccgacagttagttttatgcttttagcatactgagtgtaacaacaatttccttttttatggttctcgtagctgcacttgagttagttgtatatgtaagtttgcacctctagctgatatgggtgttttgcatttgcaccaatccacaactgggtttgatatgctatgctgaacatcagtgagcaccacaaattttcagtgtcctcgtttgccagaagttcaggatttgctcaagttgttgaactggattggttacatgtgcggatgatgtgcctcataactatttagcgaagcagcaaggtcttgctttaaggaaattcttgtcaagaacaaagtgtcaagtggcaactgcgttgtcaggcgtgtttccgttaaaaatcaatttn

SEQ ID NO: 671 - DNA, 506 bp, Zea mays
  Peptide Sequence Number=SeqID_12273
  Probeset Number=SeqID_15074
attgattgaatattgtccaaatctaggagaggcagtccattaacaaagacgatttgataaataagatattagaggaaaacaaacaaccagcaaaatgtataggaactagccaccatcaccacttttctagatttggtttcaggttatctatgatgttcttgctccaatttggtgtccgcaagagtcatcccttccttgcttcaaacaagtgcaaatgtttagcagatttacaattttttatttgcttctataaccatagggaatctgctctcataataagtgatccagaaattcaataattattacgagagtcgtcgtgttagcatgggattattaaggggctctgcaaaaaatgaggctgagcttctggatctcgagaaaaatataaaggtctatcaatatatgtatagtatgtatgcttgtcaccatttggagtcatataattttcgccaggtgtatgtgtggttgtccgatcatgttaagaaatatatttttttctcatgtct

SEQ ID NO: 672 - DNA, 1128 bp, Zea mays
  Probeset Number=SeqID_15075
aattgattaaatgagaactaaggaaatcgtaggaactgtagtagtggctggagccgtagctgccctagcactttacaacatcaacaccgttccagctcacactaactttttggctgatgctaacaatgagtacgaacatgctttcaatgccttcatcgctaagtaccacaagtcctttggcacgaaggaggagtacaactatagactaggagttttttctcgcaacttccacaacatcaaatcccacaacatgatgaactctgatgctggttatgcactagagctcaacaaattctccgacatgactgctgaagagttcaagaaaatgctcggctacaagcctaacctcaatcaggcaaacaaggcacctctcattctagaagatggtgatctccccaagtctgttgactggagaaaagagggtgccgtgacacctgtcaaaaaccaaggacagtgcggttcatgctgggccttctcaactactggtgcccttgaaggacttaacaaggtttctaatggtgtccttgttcctctctctgagcaacaactggttgattgcgctacctctgaaggtaaccaaggatgtaatggaggtttgatggacctcgccttccaatatgtagagaagaactcacttgagagcgagactgactatccatacactggagtcgatggcacttgccatgttgacaaatctaagggtaagctatagatcaagggcttctaagacgtgaaggctaacgatcctaagcaacttatggctgctgtcgccaaacaaccagtttcagtcgccattgaagctgacacttcagtcttctaatcatatagcaagggtatcatcagcagcaagggctgcggtaccaacctcgaccatggtgttctcgttgtcggttatggtagtgaaggtggaaaggactactggatccttaagaactcttggggccctgactggggtgagaaaggtttcttcagaattgcaagagacgtgaatgaaagcggccctggaatctgtggtctccaagaataggcttcataccctaccttgtgagtaagatcagttactcacttacgaacacgtagtgtgtattgataatcgttaacaatatttccctaacatcacttaaccct

SEQ ID NO: 673 - DNA, 870 bp, Zea mays
  misc_feature (870)..(870): n is a, c, g, or t
  Peptide Sequence Number=SeqID_12274
  Probeset Number=SeqID_15076
acgagaaggagcagggcagggtaggtatctcatgtatacaggtttagaggcatcacaaaacaggaggctgagactggttttggcatgttgttgataaaaggccatagctagctactcgaatggacaaactgaaacctctaaaagacaccatgttgctctgaaaatcactacgactgacaattagtacctgatttgcaacatcgaactctgaactgggaggcacacaatccactcatcaacctcagtaggagcaccacgaagtggtacaggtggggtagttcaacctcagcaagagccagctgcaggtgttggtgttcctactctcatcgacacagacatagctgttgtctgcgtccaactaccggacgagtaagacgaaaagctcttcctgatcaaccatgaaaagatggatgcatataacaacctgatatcaaagaaacaagttccatgaccgatgacgaaaagactaaactcgttattagcatgaagtgtttgtggaagatgttttcccctaaagttatataattcgaccggggtccaggagagtaggagactgaaagcaccgtcgagaagactgaacttatcacattgacatgaagaccaaagccaatgtattttatcctgtcataaaaactaaagtcttatgtatggtcattatagtactattttggttctgaaaatacttgtttatgttatgaaaactattggttgaaagaatggtgattgcggttttggcttgaaggttcagaagtgaatttggctaccaattctagacagatggtaatttgtagccaatgtatgctagctatgtggaaagaaattggttacctgctgtccgtatgctagctatttgaaattaaattttgcgtn

SEQ ID NO: 674 - DNA, 519 bp, Zea mays
  Probeset Number=SeqID_15077
acgagcagatgccggcgaatggcaagctctcggcgaagccctccccctcgccgatggttgctcccgcctcgcgccccaaatttacagctgttacctttctcctcgactttctcctccaccgcggcaggctcctctggtgcggacgccttctccgcctccgccgcagaggcaggcgcgggaggctcctcctggtcggggtcgcgggcggtgtcggtggagctggagatggcagcgcggaggcggcccattaagggcctgaaagcggtctccacggtgacccaggccagcgcgagcccccctgcgacgatcgccgccctcttcagggcgctaccctcgcgctggcctccacctcctcccttcgccatgggtgctcgcgggtcgacggtgacggatggggtggcgcgatgcgcgtgtgtttcagtgatttgctcctttttttttctttctcgtggatctatcgatggatgaacatgaatgaatgaaccgaactgcacagctccgttgtgagctgatgcatgc

SEQ ID NO: 675 - DNA, 888 bp, Zea mays
  misc_feature (1)..(1): n is a, c, g, or t
  misc_feature (888)..(888): n is a, c, g, or t
  Peptide Sequence Number=SeqID_12275
  Probeset Number=SeqID_15078
nccggaaaataaatgtcatgtttatcatgayaataascctcagctattctggtttacatggcaatgttaagtaagcaaaaaatgaaatacataaggttatctttgtattgrccagtcaaggggaatcaatgtatattgcctccacactattgactggtgcgtggtaataaaacaacacscgataacaaaaagggcaggaataaattccttgggacggatcatatcgatcttacggmggtgagtggtcatkatcctctataactccttgctcgctgaaccatatccaaaatctgasccaccccccgatgatttactccctccayaagcacctgcagcagcactgccacttcctccggayacaccagcacctatggtagctccaataccaccaacgacsccaccggatcctccaccayaaacgcccgcatcggcaccggttccagtatagacgttgccacttcctcctgcatttcctcctacgccaccaccaactttggcacctccggagacaccagcacccacggtagcactggtacctgccttggccgcctggatgttggcttggtgaaccttcgcgccagactcccgcttcagcgagtccttcagaacgaggaccggggcgtgaagcgccatggtgaagtggaggcagcagcgacgtcgagggaggcgacgataagattgggagtggagaggggaagagggtgtctgctagacaggggaagacggagtaggctgagtatggcgtgcgagcggagtccgccggcgctgctgaggacctcgccttcgacgcggcaatgtactaggaagagaaacggagtagtcggcgggcagctggtgcagtccgcagtggtgaaggtagcggcggcggcggtttgtgtgtggtccagn

SEQ ID NO: 676 - DNA, 925 bp, Zea mays
  misc_feature (925)..(925): n is a, c, g, or t
  Probeset Number=SeqID_15079
gaaaatcgctgctaccgcgcgcccagcccccgcgaaaatcgccgcaaccgaacgcccgccgccgccgcgaaacctcgccgcccacccgcgcccaagagcaccggaaaccccgccagccgctaacaacctcctctggcatgcggcagatgcgccgggaggttgggccctctacttcaaggcgtgcgacctgccgagaacagcctgcctcctccgccgccatcgcccaaggaggagctgacgaaggaggagcaaataccgctgtagacggagaagaaggaggagatcatgccgccgccgccagtgaaagccgtccaaggataatcggttccacggtgagcctgttcagtgcaatccatgggtactgtcactggaaagccgcccaaggaagcttatcgtcacatcgcagcaacaaagtcacagggtcccatataccaaatctatttccaaaaccccaaggccaagatccatctctcaatytagccaaccttactgtctgatgcatgcgaggtgcgctgcgggaatctgggatcgaggctgcggcatcaggccacacagctgccatggcggtttatggtggttctccggtttgagcgatgctgacgcggtggttyttcaatttgggtgatgagatgctaattgatgcctctgcggatggtttggatgtgcccgtgtaggtatcttgcgtgactcgttgcacaagcttcggccacccgtggaaagcagaagacttggaggaagaagcgaaagtaatgatttttctcttccctatgtttttgtcatttggattcatttagctttgcttttgttctgtagtttatggtgcttcttgattagatcaccggtcctacgattgttaactttttatgccgactcattgtggatcttgtagtggttccgacggtattaattggtctgagttatatcn

SEQ ID NO: 677 - DNA, 653 bp, Zea mays
  Peptide Sequence Number=SeqID_12276
  Probeset Number=SeqID_15080
ctgtaaggaagtctctgtttctgttttgccacttaaaaagctgtaacaatgtggattcactggtctgtaacgaagtccccaccccagatattgaaaatcgggagatgaaatttatttatgactgccctggcaaatcgcacgtttgggggtacagcacttgggcttttgtttctggctgccgtgcgtatggccgcgttgggcgagggcaggcaggacggacctgagcttcccagccgcaccccacccaaaggcatcccgtgggcctcctcgaccggccgcggcggacttggcgagcggggagaagccgaatgggattcgctgctgtggtgcgcgcgcggacgcaggacggcgggagaagaggcggacggtctccgggggcggctgcgtgaggtgtgccaagcggagcagcgcgacggcgaggagaagaatacagcgacccagaggcccggcaatggtggaggccgggtgtggacgacgccggaggcaggctcttcactcttgagcgaccacggcacgatgcgaggttcctttcatactttctttgtggcttcaccagattccacatgtcttggaaatttacacaagactagttctcaatgccaatggttgaacacagaccagagactgcaacgctaaccattaagaatgtgcct

SEQ ID NO: 678 - DNA, 1906 bp, Zea mays
  misc_feature (1906)..(1906): n is a, c, g, or t
  Probeset Number=SeqID_15081
agaataacggggtcgatctctagaaaataaacagtgtgcagaaatattaccaaagcctcatcagtggcattagcatagacaaaggttgagttcttcactgaatcaacagctccttcaaacttttcgcgagcaattgcagcatacttccagcagcgattgcctccttctctgcaacgatggccgccgaatgcgcttctgctgcagcaacggcagctgctcgcgcaacgtcgtacgcgtcggctacagcttccaccggaggaatccggtccattgaagaggcggcgactaaggtttctactgccggaagagagaactcggtggaggagagaagagaaaggatggaggcaagtcacggcaaggtcacgatgttagatgcaggagcttaatgacccgtctctacgcataaaagagatttttcgacgaagtcgaccttgtcgtacgatggcaaaaatctccaaccccgatggttttctcgcacaccacatggccgatttttgccgcccgcgccctgctagggcgctcggcctcggacacaaggtagtgccttccgccttgttgcctcactcctgttcgttcgaagcagacccagaccgacgccaggctagtggtcgacgcccgtggcgagctgagagtcggtgccgtcaccggcgccggcgagggttgggcttatcgcgtgtaattaaggttgtgatgtttcttcccgtagatgtgcgatttttcttcgcttgatttgagtgatagtaaagtggagaccggctagcgtcgttcttcaaatgtgttgattcatggggagtcagacattggcatcacaggatgggggaagtggaggagacgtgggtggcagtgccggtgcagggcaacacgggcagatgcagagcctggcaagacaagggtctctgtataacctcacctttgatgaggtgcagagccatttgggagaacccctacacagcatgaaccttgaggagctgctgaagagtgtctttcctgatggcctggaccctgatggtggcactaccagccagtatgagcagagttcgggcctcttgcgacaagggagcatcacaatgctgcttgagctcagcaagaggactgtggacgaggtgtggaagggcatccaggatgtgccaaaaagaaatctcggggagggttgtcagcagaggcaggagcgggagcggcagccgacccttgggaagatgacgcttgaggttttcttggtgaaagctggggttgtggccgaaggatatcttaaggacttgaatgatgtatgcaatgtggatcaggtcagtagcgctggggctgcaggtttgaccgctgggggacaatggttagaccattatcagtagcgggttacagctatcgagccccatcagcacgggcaacatagtttgccaggtgcttacatgccgggtcggttagcccttcagcctctgaatgtagggccaggtgctattctggagtcattctctgatggccacattaattcaccaatgatggctgcgctttctgattctccgacgcctggtagaaagcgtggttccccaggagatgtgacagataagttgatggagagaaggcagaagaggatggtcaagaatagggagtcaactgctcgttcaacggctaggaagcaggcctacactaatgagctggaaaacaaggtatctcgattagaagaggcaaatgagaagctaaagaagcaaaaggagttggaacatatactttcctctgcgcctcttccggaacccaagtaccaactcaggagaacagactcagcgactttctgattgtatagaatatcttgtttcgtacttcctctgatcttttttttatttgacgtttgctagtgtaaaattgaactatcatgcgtcaaataaaagaaaatagaggtattagtttttaagcn

SEQ ID NO: 679 - DNA, 763 bp, Zea mays
  Peptide Sequence Number=SeqID_12277
  Probeset Number=SeqID_15082
ctacattctagctaggattccacgaggacgacgtcgaccgacccaccgacgacgtacgcccgtacgaacaaagcacgagctgcggcggccatggcgctgtcggccaccaacttgaatacgctcaaggcgctgctctgcgccgtgttcatcctgtccacgaccgtcgacatcgtcgtcgcccgcggccactgtgagcctacggcggcggtggtagtgcccgccggcgccggccggagaatgctgggcgccgccgcgagctcagcggctgccgtgagcatgccgcggctcactcgccccgccgccgcggccgccgccgcgacgtactccgagtcgaagagggcgagccccagcgggccagatcctcagcaccattaatcaccaatttaccactcgctcttgcgcattttgttgctacgtgtggaactacggatatatatggcgagaggatctgcaagcagagtcaaagtttcgtagttcgcaccaataaccaataaatattttaaataagatgagtggttaatttttttaaaaaaagttaactgtgtcatatatttatttacgtagagattattatgcttgtaagttgtaaggctagctccagcaaggcactctaaagggttctgtaccctaaatatagaggactaaatggtcctctacgccctccagcagcgtcctctaaacggtcctctaaatatagagaacgctgctggattctctatatatagagaaactctaaacagtcctctatttatttgaatactct

SEQ ID NO: 680 - DNA, 1676 bp, Zea mays
  misc_feature (1676)..(1676): n is a, c, g, or t
  Probeset Number=SeqID_15083
atctccatgagttgagcagcctgagcagatgaggtgaagtgagttggctgccagcgcgtgctgtatcttgtatggctgtactgtatcccccctcctctcgctaaccctttgtctccttcccccacaaaaccacctccgccccctcctcccaccagtacctgtgagttgtgagctccttgctgcggctgcttgctcccctcatctctagcctgtacactggttggagtggttgccagtgttctccccacctgctcctctcgatccactccatcccctttggccatgggtgtgcaagcatacatctacggtaattgcatgcttctcctgccttgaagcggaagccttagccttagcctgccgcctgggggaaaccttctgtttcgccgctgccgctgctgtggtataaaggtggaaggctgatccgtcgacggacggagtcccggcggagggaagattgctccgtcgccgcggtttcgcggccaagaaggtggcctacgcggtggaaaggggcggggcggggccgtgaaggaatcttgctccgacgccaatccctcctctgcccctcgattttcgggcggttgtcggtgctgcctttcgcagtaagaggtgggatctcgcgtccggcggcggcggcggcggcgttgctggatcgagcaacctccggcggtggcctgcgtacctgcgtggccgatctgtgcgtggctgttcatctcttcgccggcattgcgaggcgggctcgccgggcggtgtggattgcttgcggtgaggagtgcggaggagaggtgctgatccaagcggcgggcgggcgggcggctgcacgccaggtgttcgacgaaggaccccgaccgggccagccagccatgagggacttcccttcctgcttcggcgagagcggcgtccagatcgcggacgcgtcgtcgtcgtcgtccagcgccggcaagggcgcggcgcagaacctggtgacctgcctctaccagacgcagttctcgggccggccctgcgtgatctcgctcacgtggagcaggagcctcatggggcagggcctcagcgtcggcgtcgacgacctgtccggccactgcctctgcaaggcggacatcaagccgtggctcttctccaagaagaaggggtccaagagcctcgacgtcgaggacggcaagatcgacatcttctgggacctgtcgggcgccaagttcggcgctgggccagagccggtggaggggttctatgtcgcagtggtgttcgaccttgagctcgtgctcttgctcggcgacatgaagaaggatgcctacaggaagactggagccaaccggtcgatgctgaacgccgcgtttgtggcgaggagggagcacatatacggcaagaagacctactccgccaaggcgcagttctgcgacaatggccagttccatgacattgtcatagactgcgacaccgtcgacctgaaggatccgtgtcttgaaataagagttgacaagaagcccgtgatgctttaaagacccaccggcactggcagtgagtgttgctgcttgtgtaggctttggtacgtatgggctttatttgcttctggatgttgtgtactacttgggtttgttgaattattatgagcagttgcgtattgtaattcagctgggctacctggacattgttatgtattaataaatgctttgctttcttcn

SEQ ID NO: 681 - DNA, 1098 bp, Zea mays
  misc_feature (1098)..(1098): n is a, c, g, or t
  Peptide Sequence Number=SeqID_12384
  Probeset Number=SeqID_15084
gccgctcttcttcctccctacgcccagccgctcctgctcgttctttaggtagccgccggccgagctccttcctgcttctctctccctctcacgtttcctccttcccatggcgcccagtcgagcttccgcacgcgcgaagcttctctgcaggtcgcgcccaccacgctccagcaccccaccgtcggttttagctccagcttcagctccgccgtggcgtccatgctcgccaagcccatctctcatggccggcttgggatcctgctcgtgtgttcctggccggatttcctgcggacctcttctcccccggcgttcatctccctgcgcgtgtcgtgcccctggctcggtcccagctcggccttgccctttgccatggcgccggtcgccaggatgtcttctccacctctctcatggcgctcggctctgcccatctccatggctgcgcgcggacctctctcctccccatctccccaagctcgtcgcgacccccagctccctctgtccagctcgtgcccagctccctgcgccttgcaaaaccccctatgtcgcgccctgctccctgttgccgcgagctccagctcggattcaacccagctcgcccctgcccatgtcgcacgagtttctctgaccccggcgttgtcgtttcagttgaccacaccggctgtgcagtggaagcatggtgggcgcgatggtcggggactggccggttgtcgatctcctatttgccttggacagcgcctygacgccccatcacagcagcttgtcggggaactatagtgtttgacgttaattytcggtygtctccaacctttgtctcgccgtcgtcgttcggtcaccccgcctcgatgtcggtccctacatgatgtctctgactagtgttcgcgccgacaaaagaatcccaagaggatgtggagaagcaagcccctggtcgatgccccaagtgctcggcgagaggcctgaacaaggatcatcgtcatttttgtgaagttctagtaatatggagagattccaagagttgtggattgaggagaaagtgaagctcggttcaatactcgtcaggtgtttgatcgaagacttcaatcggagactgtcgtcgttctn

SEQ ID NO: 682 - DNA, 603 bp, Zea mays
  Probeset Number=SeqID_15085
aatctctgagtctcgttaccactactctctaacacgttatcagcactgctcgcgagatcagagaaacaagatcagagaaacaaaaaaaaaaggaacaagttgccgctagcaagatggaaaggagtggcttcgatgtccagaaaatgtgagcagcaggttgttggcctggcttttgagggcacaatcgtagcattcttgcatctctttattgaagtactagtggagatggcgcgagagcggcctgctttggagaaggcgcggaggtgtggtcgcaggcagaggcgcatgcattgaccgaccgagagggtgcaacatggcgatggacgcgagcaagaggatgggtcgcgatgtcagctcaggaaggaaaaccgtgacgacacggtgaggagcagacgagctagctcttygcggcgacacgttgaggactcccagcaaggcccgcttccgtgaaggcagggcaacaagctaggacagggccatgaagcggacatcttcagctccgtcgcgacgaataagggcctattcgtttctgtaggaacacactaagaattgttcctattgatcaaaacttatacaaattagagaagcaattcggcttgatgc

SEQ ID NO: 683 - DNA, 1197 bp, Zea mays
  misc_feature (1197)..(1197): n is a, c, g, or t
  Peptide Sequence Number=SeqID_12385
  Probeset Number=SeqID_15086
gtagatgtccacggtacacggttctgccctctgtgctcacagccgcggctcggctctgctccgccckwgctcctgccttccctaatckggsgctccgctgatattgcgcctcgactctgctcttccataatcacggatccacaactctcactccataatccgccctgccctaatcacacgtgccttccataatccatgctgctctgcccgtgcccccgtgatactcgccccgcgctcatgcctcgcccttccatcgacacagatatgaattcccccgccccaaatctccccttccatcgacgtccccatccgcccttccatcggcgtctacatctccccttccatcccacgcagacacgcccacgctcagccaacaggccatggcccgagcctcgctccctttagcaaatacccttcggcagaaaacagtgaaaagakgkskgcttkttggtttctttcsmyyyctctactcattttctgtacatgttttgcaatccttgaaaaatcatgtytattgcagcatcttattgcatatctgtttttgctcttctctgtttgcttcctatttcttggaagcatttgctattctctatctttgagattatgaatattgccgaatccatatgttggcaaacaaatttcttaactgtacccttttgtatattcaggcaattgatcacataattaattcagctgccaaatcgaactacatgtctgctgggcagatatatgttcatattgtcttcacgggtccaaatggtgctgctgttggagttggtgcccaacactcacagagtaaaggaatactcggagcagacccaagaaggcgacgaccaacaagttttcaagttctcaagccttcttgatgacaagcaagacttgaagatttagggaagaaagtggaaagacttcaagaactgccacttctacatgagatatctgaactaatagaagcctatagctacaggaaagttggcctgaatcttgtaaagcttcaaaagtacatcgatgaacgtttgggttataaatttacagattaatattagcagccaatcaaaccagccctactgaaattatggagaatatggtctggaagtttgagagggaggcgttgacggttatgcagagtagacaacacaatgtgcaatgggagttctttcttgtacgctaccatggtttcagtgatttccttttccn

SEQ ID NO: 684 - DNA, 773 bp, Zea mays
  Peptide Sequence Number=SeqID_12386
  Probeset Number=SeqID_15087
aacctagcaccgtcctctcctcgctcctgctctctgctctctcccagccgtcgtaaacgccgccgtccgcccgtgacccgtccctccacaggtgacaggacacagctccactgctccagccgtccagcgggcagctgcgcgcctgcgccgtcctctcctgctctctgctctctcccagccggctagccgtagcaaacgccgtcgtccgctctctcccagcccttccgtagcaaactacaaatgccgtcgtccgctctctcccagctcggccgtagcaaacgtccgcccgtgacccgtccggccgtccctccacagctcctgcgggcaacggtccagcctccagagggccgactcggcggctccctcccagccggccagcctccacacgccgccgtccgagaccagcccgagaagaagcttgctacgccgttgagggttgcttcactttccgctgggccccacagtccacacgctgccgctctgcatctgctctccactgctgaagacgcactactccctgcatttactccctatataccaatcatgttgtatatatatatttatttatccaaaactgacttatttttgtgcattaacatgatgaagacgcactagaattttctaagaacgaagatatagcaagtggctcctctccatgagcaatgtgtcttatgtttgttgagagatgtgagcaaatgagccttcgttgtaatagtctatgcgtgctaagtgatccatatgtgagcaagtgattaygaatgtgttttaaattt

SEQ ID NO: 685 - DNA, 564 bp, Zea mays
  Probeset Number=SeqID_15088
aacagagtgtatagagataaatgtcataaaacatcagagtatttattacatagcggaagacttacaaaaataaaagataaatataacacgaactaaggatcgtcggcgccgatgccaactgagaaacgccacctagatcggatcgaactcctcgatacatggctcctcttgaaccacctgttcttctccttcaatgagctcctgctcagctacctcaacctgctgctcaccaggatcctcagcaacgggctcttcgggaatggaggagcagacgaagcggtccacggtgccgcgcggatctacggtggcgcgccagagccggcgagaaattccggttgcacggatcgatccccaggcgtgattcttcacgcacacgatccccgcacgtggcccaacacccaaaacccaataccagccaccaatcttcggtgcaggagcggggcttcgggggcggatgactgcccttccgcgaatgcagtaatggcggcggcggtggtgcgttttcggggaaaagaagctcgcgcgagaatgaggcagggtaggaacgaatcacgggagcgaatt

SEQ ID NO: 686 - DNA, 571 bp, Zea mays
  Peptide Sequence Number=SeqID_12387
  Probeset Number=SeqID_15089
attacaacggctcatgcaagagtcgatgggttgtgtggtttttctaaactcacttaactaactaggattcacctagagcaagcgctaatgcggtctaactaacctaagcacttcgcaaagcacctacgctaatcaccgagtgattctattatgcacttgggtgtatgagcacttgaaaatgtctatactatgccttgttatgtttcttggactcccacaccttgaaatggtcggttgaggtggtatttataggccccaacataattctagctgttgaagaaaagctactgctctctacggcacaacacccagaatttgcttgcacgatgtccgcgcaagagaaaataaaaaaacggttgttaccggtgcttcctcctaagtcgtgattaggtggggtcttttctctttttctcttttcaattttctgtttgcattttattttctatttctggcttctaatttcatattttcaaatcagtttgtatttcaaaattcaaattttgtttggatgcaacaaccaaaagtattcagcatgaaatacaaagtgtataaataagtaaaaatgcttcgg

SEQ ID NO: 687 - DNA, 1696 bp, Zea mays
  Probeset Number=SeqID_15090
gagagatatctcgatactttgctgtcctgaagctagccttgccgaaagcgacttacaccgacgtggagtggcaaggggcgacaatcccggccaacacgctcgtattcctcaattcatgggccatcaatcgaggtaagttgaagttaaatacagccacactatttagatgccgcgcaccagttgcgggacggttttttctggtatttgagtattctcagtctgactaacgatgatgcgtcagatccggctttgttcacagaccctgatgtcttcgccccggagcgctggcttcccgattctccagaccatcaagcgcatcagtatgcattcggaatcggaggtcgaatgtgtgtagcgtcgctcctggctcaaaacgccctgtatactgtgttcctgcacttgatagcccactttcacatactcccagccgcgggatcaacacctgaggatatccacccactccaaggtctaaaaggcaggtcatttgtagcaacgcctagaggttatcaggctcgtttcacaccaagaaatgagtcggcactgaaagcgttcatcgatagtaactaaatgtggcatgatattggaggagataattcactctcgtagagttgactcccaatactaaagcttaaaatacacatcagagcgtacatagcctaagaaatacactacttccatcatgggatacgacagcatgcagaattaggatgaggccagggcgccgccactaaatctagtagtgttgattgcgcaatacacaagcggggaatcagattggaacgcaacacgcggtgatacgaagacgtcggatgagatacttgagcccccaaaagcctgagaacggaaatgggtgtgctcctccgccacctcctcaccttgtctttaccatctcagctgtacgactctcacctcttttcatcgcgacctctgaacgttaccgtacctcttgaaactgtattctcaggaaagtgtcgtcgtcaaccatgagcgctggtctgtttgacgttcaaggcttgattgccgttgtcactggtggtggaactggtacgtgaggtttaatcgtcgttacatccgaacaaagatagctgacgctccaacaggtattggattgatgctggctcaagccctggcatctaacggcgcaattgtgtacatcatcgggcgacgacaagatgttctagatgctgcggctaagacagaagtatgtaacttaccttgtcgctgagtactgcgactgcaaaccgagagctcaattgacgccgtagtaaacatagcctagcggtcggatcattccgatacaaggtgatgtgacctccaaggagtctctggtggctgccgcagagcagattcgtcaggcgcacggatacatcaacgtgctactccccaatgctggtatcaacggaccaaacttcggctcattgccgtccaaccccagcctggcagacatatccaccaagctactctcctggacgaccgcggacttcaataacacattttcagtgaacacgtccggcatgttctttacggtcgcagcgttcttagagttgctggacgagggcaataagcggagtaacctgaagcagaagagccagatcatcgcgactagcagcatcggcgcctttaacaggaagccgttggttgggttcgcatatggtggtagcaaagcggctgttgttcatatttccaagcagctctc

SEQ ID NO: 688 - DNA, 519 bp, Zea mays
  Peptide Sequence Number=SeqID_12388
  Probeset Number=SeqID_15091
atcatcaaggagctccgcgacaaggtcgcccaggacaatgagagcgaggagctgaagcagacggcgaggctggtgtaccagacggccctgatggagagcgggttcaacctccccgaccccaaggagttcgcgtccagcatctacaagtcggtgcacaagagcctggacctgagccccgacgcggccgtggaggaggaggacgaggccgaggagcagccggaggtggaagagaaggagccggcggccaaggaggggtcggagccgtccttcgacaaggacgagctgtagactgtagtcggcgtgcgttggtctcgtcttcgggatctcttttgaagtctagctgtagctcccgtttagttgagatatcggggagctccactcactaccagctttgtgtttaggaacgtgatacgggatcttcttcctttttttttctgtttcctgtctttgtacttgtacaaacctcagttcagtgactcggtctaattaccggctctgattagtgaactgtttctgtcc

SEQ ID NO: 689 - DNA, 868 bp, Zea mays
  Peptide Sequence Number=SeqID_12389
  Probeset Number=SeqID_15092
aggcgttgtctcgtccgtttgtcacggtccagcaatcttcgctggagtgaccgatgaagcaaccggagaactgctcatcaagggaaagcgcatcaccggatttacagatgaaggagaagaagtgcttggagttatggggcagctcaagagctggaataaggagcttgttcaggaactggccgcgcgtgtgggcgcgacgtgtaagtgaaaccaagacaactatcttcagattgcaacgaggactgacactgttttgcagatgagaggtcggctgggccatgggatgacttccacattgttgatggtcgcttggtaactggtcagaacccagccagcgctacgtccactgctaaggctgccattgaagtttttgagagcctttaatttaagccaccatggcaaaagccagaccgtccatgattacagcctatgatggtagttaggtagagaacgaatgaattttttttctaactagtctagaagtagctctgtgaagcaaatgtaaaccttgaacagatgcgccttgagccgttgaagaggatattgtgcaccaggctgtgaggggcaggcgggcatgcatgtcatgcacgagtcgccaacaatgggttcaactaagggttcgactttgctcctgtttgtaggtaagaccttagtctttcacgtggttccaaaagaaatcatcgaaaaaaaactacatttcgtgttgagcgcgcttcagaaacaccaagagaacaagccaagtaccaaggcgtggatccaataaatctgcattccactgtcgcgaaacatactacaaggatcgaagaagtttcttcatcagtctactgctaagacgccagtgttttctagtcttctttcggaatcattg

SEQ ID NO: 690 - DNA, 915 bp, Zea mays
  Peptide Sequence Number=SeqID_12390
  Probeset Number=SeqID_15093
accagcatcgagcttgtcaaacggggcgtcaaaacacttgtcatgggtgtgcgcaatgtttcgcaaggagaagttctgaaggccgaactgctgtcactgaacgaccaagttacgatccatgtccttgaactacacctcgacaggtttggtagtgtggtggcattttgtggacaagtcgcctcggtcacagatgaactagatgttgccgttttgaacgctggtgttggaggctacgatttcagagtctcggaatcaggtcacgaaaacatcatgcaggtcaatgtatattcaaacacccttttggctgtcgagctcctgccattgctcgaacgcacggccaaagcgaagtctaggccttctcgcttgacttgggtcggcagttttgttcagatgggccatggcttcactaagaaaccccttttgcctggcgactcaatcatttctcagttggacgatgtcagcaggtttgacaagagcagataccaggattcaaaactgttgaccactctcgttgccgagcgtctcgccgagcacatcgacaagaacctagtgcttctcaatgaggtgtctccaggtccggtcttaacaaacttcggctctacatatcctgcatacttccgcattgctctttccatcgctggtcacttcatcaacaaagaaaagcaactcgccgaaggggtccggaaatatatgcatgccttcagcgtcttggggcaggagtcccatggccaatacatcagtgattataagattacaccgtgagtagagtatcctcctgtcggacttggtaatcagctaatcgcttgcaaagaagggcaacgtatacttcgtctgcggtgggtaagcaggtgggagactcgtttttcgaggaggtgatggccgagtgctatgccgctgatgctcggctgcagcgaa

SEQ ID NO: 691 - DNA, 671 bp, Zea mays
  Peptide Sequence Number=SeqID_12391
  Probeset Number=SeqID_15094
acgatttctgttcatttctccccgctgcatctaaagtccaggatggcaggatctttgcattccgatcccgccaagatgagtaaaacggccctcctggtgatggactaccaagccggcattctctctcgcctgccgttgcccccgaaccatatgcaacttctcgcaaagacaattgatgccgcccgtgctcatgttaaaataatctacgtgactgtcgccttccgtcctggccatcccgaagtttcggcttcaaatgccacctttagcgccgctgcgaaaactaactcctttgtgagcggctcgccagaaactcagattgacccggctattgctcctaaagagggcgatattctcattgagaagaagcgtgtgagtgcctttgctggtagtggcctggaccttgtgttgaaaggtctgggcattgagactctcgtgctagcgggcattagcactggaggtgttgttctctcaactgtttgtgaggcagcagataaggactttggggtcgtcgttctgaaggatttgtgtgcggatggtgatgagaagctgcacaatggtctcatcaacaaaattttcagcaagcgtggagagattttggaagctgaggagtggttggagaaattgaaagcctgagatagtttctgacgctagaaattcaaatcttgctagtc

SEQ ID NO: 692 - DNA, 994 bp, Zea mays
  misc_feature (1)..(49): n is a, c, g, or t
  misc_feature (993)..(994): n is a, c, g, or t
  Peptide Sequence Number=SeqID_12392
  Probeset Number=SeqID_15095
nnnnnnnnnnnnnnnnnnnnnnnnnnnnnnnnnnnnnnnnnnnnnnnnnacctgccaaacatcatatgctggattgagtataaacatcggggtggtgatgcctttttgcaacttcttgtgggaagaagcactagcagcaagtaagaggaactaattagcatacagcagcttggatagtgaagagagtcattattttaaagaaaggaaattataacttaagcaaatcaggggacaacctgccccggttccatatctgagctgcaatgagggaatattttacgcacatcctgcaagatagtagtaccatataaagtgtcactgattgaattgggttgggttagggttgagagagagagagagacctgcagccgagcaacatcgttataaaagccccgcatataccttcttccagaaatgtcttctctgcataagaaggtgtttaactcaactttttgcaaaggacatcactctagatgagaaacaggaacttgatgaagtacttcaaagagagtggccgtggatggcacactctcgctcttcaaaggaggtaggtttctgttatttatttttctaccagtggccgtggatcagtttacgctcttcaccctcgacgattcaactccaacatcctccaaaggaggttgtgcacacgtgcttgtacgaagatccaaaatttctaacatgaggctgggctttctagcttaagagaaacgccgaccagatcagtctacatcatgtttttttgctactctgttcccgtttattatagaagattggaaaaggatggtgcgtagctgcaaaagagaggacatcttgcttttgtgctcgcaagaaggatgcaaaggatctgtgatgatcagttgctgttttgggttattgtcacataacatctcctatttttaaagagcaaaactgaaaatgcagttccggtcttgttggtgaaccgctagagacttaatgattttatatggtgctggcggttgtctgttgtcnn

SEQ ID NO: 693 - DNA, 1361 bp, Zea mays
  Peptide Sequence Number=SeqID_12393
  Probeset Number=SeqID_15096
atctagactcgcgcgacgatcgtgacaggatcccgattcctggccagcaaacagcgtaatgcagggcttcggcaagctggccccaaccagaacatggcatcagttaagcatcatcatcgtttcatggtttcgttctagaccagaaatcgtccacgacctttcgtcagcccagcccggatacggctttgcatcgcgattcaccgtcgttctcgcgtcgcttcactcccggaagcacggaggtgattcttgctatggtccaacattcgaatgtcgcatcatccgtcaatagacagatcgtggatccgtgaacacacgtttgggtcacgtaaactgaagccatcacgacctcgacactcgatgttttcaatatggacaacgtgactgaacctaccactcaccagtcataacaagatggccaaaatgaggcaacagagctgaatactcactgcagcagagctgaacacgctgatgagtaacatgtgattcttgagtattgtgccgttgactcacaatccaccatccacatatcttcctgttacgtgtgtcggtttctgcaagccatcgccagccatcacccaagtccgcttgcccaggccaacagcccttcccgtccatatcagttatttcacatcatagccccattctggaccattctctccggctcgatcgcctcactcttgctcaccaccgtcgttccactttgccgtttaaccttacgcacctgccatcattcatctcgcactatcgctggagcttctttgtacctaaccgtaggccgaacccatctagcaggtctgagatcaggctctgtgtcgaatgcatcacacaccatctccctgtgtgtcggtaagctattggcccgtaagactttcgcacaggtattatgtagctataagcgatggtcgagcctgatgccatatgtttcagcatactgactcgtgtctggtcttgacagggatccttcaggacttgggagcatgtcacttgtcgcagtggatctaacgtaataactcgttccttgctttgataccctcatgatcatccaattgggacccctcgctggtacaggattcggaaaggcggcttggccagagccgatgttgccgactgctcctctccctgaacatcatgtcaagatatggtataactcgcttcataaagccacgatggcataacgagatcatcaatggcttgtccatattggtaaatgggcgtcagctgagtctcggctgcagggtggcacatgtttcccgtgaaggtatctgtcagcccaaggatcatcacatgaaattctcgtcacatgtaagataccagtgttaattttaaacatcagggattgtgccgagtctgtgggaggtctc

SEQ ID NO: 694 - DNA, 1144 bp, Zea mays
  Probeset Number=SeqID_15097
agcgctgtcagtactagggcctctgatctgtagtgcccgtcgctccttccaagagttgtaatcatataatgagtcccaaacggatttatctcccttcgattcctgatattcagcatgcgtcgtcaagagctggtctacaacgtcttcttcgaatgctaccacgaacagccttacgatcatccacagcccttgaaggtaatcgccacccattccgggagggatcaaggaaagcacagacaaatgagattcgaaacgctcggctgtttgaatagctctagaaacatgaccttggccgttgaggccgcggcgcgtattggtctgcctgttcatcacttccgccatatcaagagcagaaatttgaggaagtcagaggatcgaggattgcttagaggtaagcaatccgctcaggccagcatgcagatgttggcggggaagacttcgaggatgctggcagggggctgaacgcagtcacctgaccaggctctgattgagactgcttgattggataatattgtccccaatcattgaaaggatgcgattattgccttgcccactacattgcgatacatccaatagccaagggaaaaaagacgatggcgatttctcccagagaacgaggcgagcgagaatagatggggcccttggcgaacgagcgacgcagaacgaccgcactgtaaaggatcactgaattcaaccgcctcaatttcagagtgtcaaagatatggccaggaatcaattctagcaatctttactcgacctactgaaccatcagtttcaagatattgtgtctgtctattttcgcacaggtgcaacgctgttccgtttgttattcggggctaaaaccggggcccaagttccctcggatccagcaccaactcacgctccttgtgtctttctgatcaacacgcactcccccgactttgcacaggtgttgacatgccctgaaaccttgggctgcggttctgacacgatgcttaactcgtttgatagagcgtggaatacatcagcagtccccacgatactcgcctagccctttttcgacgcgccaaagtgcatcaccatgccggccctgcaacgatccaactcctgcacagacataggcttcacgctgcgccagtcattcggaaaggatgagttcaggttc

SEQ ID NO: 695 - DNA, 695 bp, Zea mays
  misc_feature (695)..(695): n is a, c, g, or t
  Peptide Sequence Number=SeqID_12394
  Probeset Number=SeqID_15098
aaaaagagtttgtacaaagatctcaggtgaaagagactttgttaaaacaaaataagtttaaagacatcccatctattggacgcacatcactagctgcaataaacaaaactcagagaatattgatgtcaacaatcttgttgaaggacgaccattggagaacttggagttcattgaaaatatattgtgattctatgaatggtggaattatgattgaaaactacagtcctatagaaaggaggtctaagggatgcaaagaacgtggctcaaagggttccaataacccatctaaatcatcgcaaactaataggctttctggtgctgaatcagcagatggaggtcctatagttgggaaagtatgaaacactttttcttaaagagcattacatagaacagattcagaagttgtttgagaaggcggtatgcaaagtattcaccgctacctgaggcgaatgatagaattaacaagtgacatctataacaatgactacgatctcaacaacaaatgatgacttcaacataaaagaagccatgagccgacttgtttctgccatcaaacaagatctcctagcccttgtggatgctttacaatctcaaatacaaaagtttagcatccataattcaatttgattcatccagtcgaaagtttatcaagactagatccttgtacatgcagtttgatgggtaattatatgttn

SEQ ID NO: 696 - DNA, 606 bp, Zea mays
  Peptide Sequence Number=SeqID_12395
  Probeset Number=SeqID_15099
ggtcgtcgaccaacagcctccgcaacgagcgcatggtcgtggagggcctcccgtggctgcccctactgctcccacccgctgtaggctgcttgtccccgacgaggccacgaagcgggaggaccccgactggttcggcgacgaggaggagctgcgctagggcgtctggacgatcgaagaggacctctacgccatgctcaagaagagctcagattgcaacttcggcttctaaagagggagactatagacactagagatgacaacgagctttttacattgagtgatgtgatgtgaaaacatgtcaatcacttcctgagatgggggaatcccacgcttttaggaatatggaagaaatggatttcttctatgtgtttgatatgcttgttgctttgggcattcatgcacacaatgaggatgacctccttgataactgctacttactgcagtgtcctctaggggtttattcaggtagctctattcacatgattcaaatggtgattagttttagtggaaccaagtatgtttacatattgcttggttttgggcaaaaataaaatctattggaatgtgtttgaacaactatctaattttaaaaagtcaatgtgttat

SEQ ID NO: 697 - DNA, 633 bp, Zea mays
  Peptide Sequence Number=SeqID_12396
  Probeset Number=SeqID_15100
tgttccccaagaagaagcgtcgtcagcgcctcccccacggtgaagcaacggatgtatcacatggctcccacgtcagatcggatacccgccgatcgccaggcccagtgaagcttgattgcgacaagacgcttgtgattgtcgcatccgaagcagagcatgtcggggaatagacggatcaggatcctagggcgaaacacggcacttgagacagtgtttcctggcaaagcttgaggtctgatcctgaaggaaacccggtctaccgaagctttgttggtggactttggtggttgatggttgcggtgcagtgcagtcccagtgcttgacaggtgcggcagtggttaaggtgtgcccccaacaagccactgacatgcaccaagcctcgcatcggccggctcttctttttttggctacagcttttttgcgaatcttggccttttcctacccagcaacgcgcgtcgcgacttcatccgacttgactcgaacgacaaccccgaatcattgttgtttctctgggatctggccaaattcgagaaacgaacccaacagacggcactgcgcaatggacgactccgagcgtcgcaccgcgaagcgctcccgcttcgaccagactgagccagaaccaaaacgagcctc

SEQ ID NO: 698 - DNA, 571 bp, Zea mays
  Peptide Sequence Number=SeqID_12507
  Probeset Number=SeqID_15101
gccattttagcttccgtgaagcgacatgctcattgcacactcgaaggagggccgtcatgcaatgcatgtcctacctgggtgctcgatcgtctgttatcggagatgacttctcaaacaaggcagcctggctgaggacatcaccgatggcgccatgttgtgcaatgtcggatcaggggtggggaccatcgacttagacaggcctacatgttccccatgtagtcttgctgtggactgaggacaatgcagctacgtgacggcttgcagaactgatgtcattcagtctataagtgaagtcgctttggcacaagatccagcccaaacccctgtgctattcaccttctcctctcttgcgtcttgtttccatagacctaagtgacaccttcaagaatcatgcagctcaaggatctgatgctgggctttgcccttgtttccggcgctctagcagcaccgtcaaacagcaaaagagatgatgggaaatttgacgaagggcaacccatcagcgcaracggcaagggaggcccaatcctcggtaagtggttcataaactcccatggtagctcggcagcgaact

SEQ ID NO: 699 - DNA, 639 bp, Zea mays
  Probeset Number=SeqID_15102
cgattacaaaccagcgtgaacagtacgatgctactgttcatctatttataggcacaagacgcagcctggacaaaattacattcatgttcctgacatttactgttagccataagacaagctgtcgaggactaagcagtcttttcccctttaggtcgatttcatcctccaccatcgtccttgcgrtaagccgaagcttctccagccacagcttcagagctagttcatccttcctccagaccgcgcctttataccatgcgcatcttcatctcaaagccgaagcctcctgagacagtatgttatattggaaaacatgttagttaagttttttgaggaccttcggaaaaggaaggcccccaacaatcccattcgactataacctagaagcaaaatactttaagcgcctaaatgcacttccgctatataactctcggattacaactgaaataaacctattgatgctatttgcttccaactaataaggacaatgaagaacatttattcaagataattaacttaaacgaccaatctccatctatgacatttactcaatcaacaaacatagaacatgacaattactaacacaagccatcacttcaccaattgagaatcaactaaacttacttagccaaacaagagtaa

SEQ ID NO: 700 - DNA, 684 bp, Zea mays
  misc_feature (684)..(684): n is a, c, g, or t
  Peptide Sequence Number=SeqID_12508
  Probeset Number=SeqID_15103
aggtacagacgaatccgctaaatccagcgactccagagaggagctgagcctgaaggatgacaaccatcatagggaggttccgctgtccaccgattcatcggagcagtccagctggccagagccaggcagcaacgtcggcgaccaagaccctgaactgctggtgaattggccatcggagaccgacttgtcagtggacgagccatggctgggttttatgagcaacggcaatgagcttggcgatgtcgaggggacgtcgccgtgggacggaacaacagactggctgctggactaccaagattttggcatgtgcagctccaactcggtgacgattcaatgttccacgcctcaaatggattgaacttctaaacgttggagaaaggctgtccaatttcaagaaatagggaggaagacagactgcaagtttgagcgcactgcacagctcccagtatagaaaatagatacaatactttcaagaataagattgtgaaaagagagagagagagaggcatggggcgtatcttgaccatagaatagtgataccttgcccttaaaagtaaggggtttgtattgttagaaacctaatgtttctcggtacgagaagctgaagaactagacccaaatgttcgaaccatgcaaggcatcctatcctatgaacaaagttagggtgttgcagcttttctgtgn

SEQ ID NO: 701 - DNA, 658 bp, Zea mays
  Peptide Sequence Number=SeqID_12509
  Probeset Number=SeqID_15104
ataaaaagttaaaggaggaaattaaaggggcattgagggcttctttaattgagagtggtgtgttgccagccacagtgcaaaataatgctgcggttgagtctatttctcctcatgtaggtctaacatttaagcagcagaaggagctgttgctattgacattaaatgcggagatggaggaagaacatctcaaacattctttggaaaaagataaattaaatgcggagatggagaaagaacatctaaaacagtctttggaaaaggaaaaattggggttgcaacagtaccgattagaccttattaaagcaggaatgattgtgggtaatgctgagggttcaggatcgtctgaagaacccgctacagcacaggtaaaagggtttgatgtggttcgtaatttgcgtcttataccaaagtttgacgagaaagatccagacacgttttttatactttttgaacgtgtagccgatatgagaggttggcctgaggggggggctctggtgggcgctttcgaacaacccacacaaaatcccatgttcaatgctgtaggcttatttagtcaacatcgcaagaaattaacctactaaagcctcgtgaatggggacgtacccagaaaaaatagtaaacatatgttatattggaaagacacacagccacacgttat

SEQ ID NO: 702 - DNA, 550 bp, Zea mays
  Peptide Sequence Number=SeqID_12510
  Probeset Number=SeqID_15105
aggtcatccactcatccggctgkcagcgaccgagcgtcgtccgcccgccccgcaagcgccgtccccgcagccgcaggccacagcagcagaccacaggccgctactccatgtctccgctccagcacaacgcacagcgccgcaggccgcaccacacacagcgttgtcgcgcgctccgccgctccgcggctccgcgctgcaggcctgcaggctacagcctgcagcagctcgggatcttgggctctcggcgagccgctgctgcctgctggggggctgcgagctggcgggctgcggctgggcgctggctgcctggtcgcctgcctctgctagtctgctgcccgctccagtgcttcgcttgacgcaagacgctatcagctagtctgatgtccgctgtcggctgcctctgtgtgactgcgtcccggcgtggtcggctgatagggtatttgaattattgaatatagtccagttcactacgcacagttcaattccaatttatttgattatacgtgtctaatccattagatttttcaatgtacagattttccaattttct

SEQ ID NO: 703 - DNA, 693 bp, Zea mays
  misc_feature (1)..(1): n is a, c, g, or t
  Probeset Number=SeqID_15106
naaagcaaaccgcatgctcaaacttatwtatgatgtatataatttccgaacggatggatggacatgcaggcaaagaggckcagtacaggtacgtgttttggttacgccagttgcaccgtcgaagaagatgaaaaagccggtgttgtcgaaaccgacgtcgaggacgagcgagtcgattggcggtgggcgatggggatgcaaatcggatcacagatcagagagaaaaaaagaagaaaaacaacaacaaaaaagacacagagggagacagaggcagggtccccatggccctcgtccaccagaccaccacaagcgaggggagacggcgcctcctggcagcgatagggtggcgtgacgcgggcatcggatccgggcggtccgtggcctcatgacctacggaattcgtacaacagtagaggagcagcggcgcgaagggtcggtcagaagaggcgtccgggccaaccggctggccaggcgggcgggcaacacgcgccgacggacgacgctacccgcagccagggccggtggacgggcggcgcgacgaggggcctccgcgctggtgccgagagggcagcgcacccctgcagcagaagccacgcaacgacgatcttcctgccataaggaaggttatcccaatgtaaatcaaccctcaaccaagacttgcgctttcctgccataagaggagactatcaaccc

SEQ ID NO: 704 - DNA, 536 bp, Zea mays
  Peptide Sequence Number=SeqID_12511
  Probeset Number=SeqID_15107
gcagcgaaaatcttattaccaaattttacaagttacatcaagtttacattgtttatcggagtgattacaaaagtggttcaaagaaataaactttgcaatgttataaattgtttataagtttaaaatatattctagcttaagtgaccatccacaataagaagtgtagaagaagtacttagacttataagaaggccgagcccccttgcacttaacatcatcatcagcagcacaaactatagcctaggataacactaggttagtgtttgttagacgacggtcacttggcgatcatcactcatcttggcacttgatcaagtcgtctatttcgatattggtccgtcgacatcacttctccaagttgaccatcctttacaccacttgacgtcaactcagctcttgatctccgcatcacgtgatcaactagcgtaccaaaccaaactcgacttgaatccgtgaaatcaacgacagatccggttcatgcaattcatcgaacacctagcggcgtcgcgttgatctccactttctccttcatccaa

SEQ ID NO: 705 - DNA, 748 bp, Zea mays
  Probeset Number=SeqID_15108
taaaccaaaagtttttgcagcaccaaaagttgaaccatcascggatgtgacggattctactaaagtcgcaagagatactaaccaagaaggtgaaaaggctgatgaagtggaaaaggcgaagtcctgtcaacttgaatttgggagttattgtctctggtctattgagcacaaagaaataatgaaagattatatagtgaaaaggctaaaagatcaactcttcgtagcacgctcatactatccaagcattgcaaaaattcaaggacaggaagctctgactcaggaaatgaagcaaaacatacaagaccatgagaggattcttagtgcatcatcagttgatgctgatctaccatcctttatcaacaaaaggatgaagcagatggagcgaacaatagcgagagccaaatcttgcacagtagattgtaagaatgttgacaggaagcttcgccagatacttgacatgactgaggatgaagctcgttttcatatgaagcagagtgcattcctgtacaatctcggtgcccatacattgccgaaaagtcaccattgcctttytatgaggttgacactagaatatttcaaatcatyttcattggattttgatgattytcctgggaagttgagcagaccagaatacaagcactatgttatactatctaggaatattcttgcggcttctgtagtgatcaactcaactgtgagcagttgtaaggtatttggstgatatttacaatgttaatytawacactat

SEQ ID NO: 706 - DNA, 705 bp, Zea mays
  Peptide Sequence Number=SeqID_12512
  Probeset Number=SeqID_15109
atcatcatcacatcaaacaagaacaagaacaagaacaagaacttcaatcaaccaaaccatcaaccatctatccacctctcaaacaaacacctcaacaaaacctcaacaaacatcaaaatgttcggtctcgacgcccccaaaatcactcgcgcccaattcaacggctccgaccctcaactccagcttcagcaacgatacgccgcatctctgaaatcacccgctaccagcgcaatctcctctgcgcgtgtctcccttgacgatgatgcttcctccatttcttcctctgacgagaagaaggccattcctagcactagcaattcgaccgagaagaagcagaagaagcggattagtttgttccgggctgcgaatatggtgctttctttgaaatgatcgatacaagttcgcttcaaaaaaattacaaacggtggaagaaaatggcaacaaaaatgaaaacgagagaaaaaaaaaagaataacgacacgatacgaccaaacaaaaagttcattcccttttgatttcgactattcattcatttcaatataccacttcgcgaaaactcgacaactgctgcattcaaaatccgacataccacgcgcggatcaaaaagttatggagtttggagacatttattctttttcatttgttagttatacttggctacgattaaataatacttaatacaatacgatcatcgattggatacgc

SEQ ID NO: 707 - DNA, 690 bp, Zea mays
  Probeset Number=SeqID_15110
aaaacactgaccgttcactcttctcaggagctcttcatcccttggtcatttcccaatctttcatcttaacaaaccacttttcgcgtacttacctgcacccaaaatgtctgacggagtcaccaaccctcacggcgaggattcctttgctgagagcaagggcaagggaaaggcggttcaggacgatgttcctcacgacaccgccatggatgaggatgacgatgaggacgacgacgacgatgatgatgaagatgagaatgctgagccagaagaggacggcttggaagaaattgacctgaacaacattgtcgagggtggacgccgcactcgtggtgcccagattgactacgccagggccgctgagcagactcccatggaggacgacgacgaggatgaggatgacgaggacttccagcctgcccatgaggacaccgagatggacggttaagcaagtgcacccctttggcttccgatgccattggatgactgacaaagtctatgatgttaatgtttatgggttcaccaaggttaaaagctcgggtgattgagaggggagctgggcatctatcgagggggatcccagtatyttagccgatgggtcatgtaacgacaaaaaggctctctgtttgctatttagctaggcgttagtttgccaccctgtgttgggggaagaacagagaacgttgaaatttg

SEQ ID NO: 708 - DNA, 744 bp, Zea mays
  misc_feature (1)..(1): n is a, c, g, or t
  Peptide Sequence Number=SeqID_12513
  Probeset Number=SeqID_15111
nagttaattcaacacgatcatttcaacattgcacaacactcccaacgttaccagtttctcctttcccctcttctttacaacgaatgtgacgtgactacaactatttgagaacttatgtacccgtatcayaagtgtacaacaacagcggttgtttcaataaactcctccaagagaaaaaaaggaaagtaaaagacgagaaattgtcatcacaactaagattagacatgacatctggtattatcaccgctgattatccgtttattactttgtgttgccaagagggtgtttgattcctgacatctggtccatctcggattgcaatggtcctctttgctccagaacttggcaaccagcatcttcacgaaagccctgaagtcaacaacaaatgaagttacaatctccttaacttattgcggatccctcttaattgagcggcgatttctataactcaagaattataaaatgaatactgatgttgtttccaagcacttggagcacgctatatgatgtagaatgttaatccgctgtgcttttacatttgcatactcataagatctgtgcttcttctgtctgtagaataactgtgtaaatgctaggagcaaacttgttagaatctctgtttgttttgtcatttaatcaccaaaaccctcaattggggttgattgcacttacaatctccccctttttggtgattgatgccaaaacaaactagagtagagataaacattaaaaagtaaaaacact

SEQ ID NO: 709 - DNA, 780 bp, Zea mays
  Peptide Sequence Number=SeqID_12514
  Probeset Number=SeqID_15112
aaacctcagccacacacacttatttattaaaaaaaatactactaacaacctaagcacctctctacttaaacctgattgggccaccgaaatactccgtacgtacgtaggagctgtctgttcatcggacaagcgtgcgacgaaggcgaagagagatcaccggccgacggccgtacgttcgcatgcccagctagcgttagttgtggctgcctccattgccaccggaaccttcttccggagggctactaggcggccacggcggcgtcctcgtcgcggccaacacctgagtggccaccacctcgctgccaaagggcttgtctcctttctgcggcgattctgctcccacagaagcagcggcggcggcggacggcttcgggtcgctgcggtagccgcgcagcaggcccaccaggcagccggcgcaggcgcggagcaggagctggagcggcgccgaggcttcttcttcgaccacatccaccaccgcctgctgctccttggtcagcacaccccgcgcggtctcatcagtatcgtacccgccgttgtccgtggactctccgtggacgccctccggcaccgccgccgcgacgtctttgcgcttgcgccgacgatccgacgacgattcctgcagggagacgcgctgatccattcctgggaggtgactaggcctaggcctgactagacgacgggggagtttctggagagcggagtttccggcagggagggaggctcctgagtcctgagacgagaccgagaggatgccgatgatgtgttcatgggaacatttgt

SEQ ID NO: 710 - DNA, 709 bp, Zea mays
  misc_feature (709)..(709): n is a, c, g, or t
  Probeset Number=SeqID_15113
tagaacacccccgcagtccactctcttctcccatcgccgatcgggacccaccggtcaggccggtcttcttcccgggtggttgcgcctggaccgattctctcgcttgggagctcgccaaggtggtttccttgctccctggaggccataaatgcgcagtcccggtccaccacttcggcgggcgccttctcctacccctagatccgcgctgctgcaaccatagtcaggaggctgagagagaatcgagagaaagagagagaaccgggagaaagtcatccgcgccgctaggtcggccactgttgctgccgctccgccgtcgccgcgcatgtgggaccaccgaccgccggggcatgttagcaggacaggctagctcgaaagcctccatggcaatgggaatgtctcgccggaggaagagaccgctatggatcggccattgatgcgagcatgggctctctgcgccttcggaaccgcggtgaggtcatgaggatctgaagaatcmccgtggtaactggaatytcaagtgccaggagaagaacaggtggttcaagtggagccacgtatcgaggagttcgattcgatytaggtggcgtctcccagttgtctttctggcgccaaggatgaattttagatccttttgtatttacctttttttatttttgtaagacttcctctatgtaataattactctgattatattgtgtcatttatctcn

SEQ ID NO: 711 - DNA, 513 bp, Zea mays
  Peptide Sequence Number=SeqID_12515
  Probeset Number=SeqID_15114
agaagtcaactcggatctaatgcaagtcgtctaccctccgagggctgcgcaggctactcctccagctcgcttcctcgtggaagggagtcgttcctccttcctctcacacacgagtcacgacacacaccggtcgagaggaatgactggcatcgaaacactcgtggcctctgccattgcatcgcaggtagctcgcaagatctccgatttcgcgaacgaagagatcaagctatgctgcaactaccacgacgacctcgagcacatgaagaagacgctgtccgacattcagccccggctgaagcgggcggaggacaattcctttggtagtgatagggaaatcgtccgggagtggctacgtctgatgaagaccgtcgcctatgacatcgaggacatcctggacgagtactactaccaaaaccccggtgagcaatttgacgagatctgctgcatcgcctgttatgggaaggaccgtcgcacaggggaagtgattgggactggccgtcgccgtaragctgc

SEQ ID NO: 712 - DNA, 974 bp, Zea mays
  misc_feature (1)..(4): n is a, c, g, or t
  misc_feature (801)..(974): n is a, c, g, or t
  Peptide Sequence Number=SeqID_12516
  Probeset Number=SeqID_15115
nnnnatctcttctctctcactcccatctcttccaccaggacgaagccgccgccgcctctgccagcgcacccgcctcgcccccgctcgctgcggccgcctctgccagcgcacccgccccgcccccacccgccgcggccgccctcgcccgttgctctcgccgacgcggccacctccggccccgcccgccgtggccgccctgctgtacggctacaagaacaacaacctcaagtggctggagcgcttcgcctacatcaacaccaccatctaccccttcgccttgctcccactgctcgcctactgtaccctgccagccgtctgcctcctcaccggcaagttcattatgccgtcggtggatgcggtgcaggtcacaggatcttcaggggctgkagcctgcaggaaaagagggcttttgataatactgagagatgagataatgaatttggtggccgagcctcacatgcaagaatcttgaagtgagaattgggagaaggaaatggttyttgaagatatgaaaagggaggaagatttgctgaaacaagttaaggaattatacaggaagcagaagcaagagstcatggattatgtcactcaaccagcagcgacacagacgtcacgtgattcgccagcaactcattcacccgcaactcctgagagtaatctgtttggagccaagctytccaacaagtggcggtaacattttggtggsgtacgtccctattttgttggggcttattgcctgttytggcatcagcacgacgtaactagcttttgccmcaagcttggtgttagtttgtgagggtnnnnnnnnnnnnnnnnnnnnnnnnnnnnnnnnnnnnnnnnnnnnnnnnnnnnnnnnnnnnnnnnnnnnnnnnnnnnnnnnnnnnnnnnnnnnnnnnnnnnnnnnnnnnnnnnnnnnnnnnnnnnnnnnnnnnnnnnnnnnnnnnnnnnnnnnnnnnnnnnnnnnnnnnnnnnnn

SEQ ID NO: 713 - DNA, 998 bp, Zea mays
  misc_feature (1)..(1): n is a, c, g, or t
  Peptide Sequence Number=SeqID_12517
  Probeset Number=SeqID_15116
ngaagctctcatttattcacctgcgtatttttacagtccggmggaggtkcacttccaattacagcaaggacactggaaaccataattcgtctatcgacagctcatgccaayatgaaactgaggcatgaggtattatgtttattccactagcaacctacccacatcaataattttctggatgagccacaatatgttmgctcatgatttttcttaaagttgaccaayaaatgaagcaatttctrtgttttacaagcactttattttttggaaggataactgasccgtttgtcctcgayaagatctcattatggcgtcaatgtcttgttgcaggttctgaaatccgatgttgaggctgcattgcaagttctaaattttgcaatataccacaaggaattgactgagatggaagagagagaacagagagaaatggagatgaaacagcaagctgccctcccacctgccatggayaagtttgacgtcacaccatcgccggcaccggsggsagggcayccacgagcgctgccgctcacgttctacgacctcgttttcttggccatcccgcccgtackacgcctgttcttctacgacagggccgacctgctcgacgtctccgacttcacgctgggcgagctgccacgattcagggactccctcgccgccgcgctacaccacttctacccgttggcggggaagctaacgtgcgagctggtcgacgaggaggccgccgcgccgccgaagggaccgagggaccagggagcgccgggaggaggaggagggatcgagggagcatggagcgccgggtggatggagcagccgagcagggagccagccagccagggaccaccgggatgaggcagcagccgagcagggagcaccgggaggagggagcagccgagtgccgcgcccgacaccgagtcgccgacgccgcgagacagagagccgcggccgccgcacggagacgcaggtgggagggaggagagtgcgttagggttagggtt

SEQ ID NO: 714 - DNA, 805 bp, Zea mays
  misc_feature (805)..(805): n is a, c, g, or t
  Peptide Sequence Number=SeqID_12518
  Probeset Number=SeqID_15117
cttcggtcatccacctagacggcaatggaggccgccgctgccgacctcatcgccgccctctcgtccccatcctcattcgctggcctctactctcgcttcgccgcctacctacagcccttcaccccctacctgcacagctcaaaccctaacaccaagccaccgcagaagagggcgacgaagcagaacaagcagccgccgcctcccgacgcggccaccctccgcccccttgcgaagcgattcctgccgtttctcggtcgcgcgctccacctcctcccgccgctcgtccgcgcttgtcctgtttcgggcgataagggcggcgaagccgccgacgaactgcttgagatctacggcctcctcttggactgcctagaggccatatcacccttgccttgcggggaaaccctactccgtgttgstccaamgcggccgcttyatytgttgcctcgagtygsgcggtcacttygcacgcgccagtgcggaggctgccgctaccctygacgccctccgstccgsgctytytccacccaccacgagcaccmagtykcgacgtggtgctgcaggsgttgatyccgtcctccttccggaccccggcagcgctggggaggstggcacggatcctgaagtcaccctccttkcggttgagctcactgtttgccytgctaattgttccagcaagggcaaggtgaaggaacctaccccttatgaacgactcatcagccttttcaaacagctaaaaccatggsttcggtgagattaccmattttgtgatagtattcatcmaataagagagatactgagtgggctn

SEQ ID NO: 715 - DNA, 889 bp, Zea mays
  misc_feature (1)..(147): n is a, c, g, or t
  misc_feature (889)..(889): n is a, c, g, or t
  Peptide Sequence Number=SeqID_12637
  Probeset Number=SeqID_15118
nnnnnnnnnnnnnnnnnnnnnnnnnnnnnnnnnnnnnnnnnnnnnnnnnnnnnnnnnnnnnnnnnnnnnnnnnnnnnnnnnnnnnnnnnnnnnnnnnnnnnnnnnnnnnnnnnnnnnnnnnnnnnnnnnnnnnnnnnnnnnnnnnnncagcatgtcctgcagcatgggaaaccagaagagcgttctacaataattacacaactcgctggacagatagtgaaaatgagccagcagaaatttgcttctaatgttgttgaaaagtgtcttacttttggtaatcctgagcaacgtcagattctgatcactgaaatgcttggcacaactgatgagaatgagccgttacaggttcgttttcaacaattggactgagcatgctccttttaaaaaaaaacagtaccaggatttgctgctgcagggttgaatttcatacattctaagtttctaacaacacttgtaatgtgaacttatgttccccaggcaatgatgaaagaccagttcgcaaactatgtggtgcagaaggttctggagatatgtgatgaccagaaccgtgaattgattctttcccgtatcaaggtccacttgaatgcactgaaaagatacacctatgggaagcatatcgtggcacgtgttgagaagcttattgctgcaggagaacggcgcattggtgccccatcctcttgctgagatggcaataaagctatatacaggtcgcagaataacacctgtacagacagacagggatagcgaggcctagctttttaccattaccagtagtcggtaatattgagcgacggagaggttaaaaaaggctcccaaatcctttgatgtaaataaaggatagccgctggaaataaataaaaagaatgagaaaagatgaagagattttgcn

SEQ ID NO: 716 - DNA, 818 bp, Zea mays
  misc_feature (1)..(1): n is a, c, g, or t
  Peptide Sequence Number=SeqID_12638
  Probeset Number=SeqID_15119
nagaaagcaaggtttatatggttgagggtgcaatcccctaataggctagctttttgggggagtgttggcccaagagacctaaagcccgttgctatacgtgcgggcgcgtgtgtcgcggcccgacaacttgggtgggcgcgccgtttgtgcgggcggccccgacggacacgccgtgtgtcggcgatccggttccaacaattggtatcagagccaggttggccctgtgcattctcagataaaatctcggctcacaatgtgtgagggggagattgttggcaatagtcccacattgtctagtgagagtgagaaagcaaggtttatatggttgagggtgcaatcccctaataggctagctttttgggggagtgttggcccaagagacctaaagcccgttgctatacgtgcgggcgcgtgtgtcgcggcccgacaacttgggtgggcgcgccgtttgtgcgggcggccccgacggacacgccgtgtgtcggcgatccggttccaacaaaacagaaggaaaaaaaaagagcacaggtttatcatgcttgagatggatcagtcagtcactccagcagaggagcatgacgacgcatcggcggatgatgtagagccgagccttctgctcccttagcaccctctgcagcttccccctctgctgctgctgaggctgcttcttctcctgctgctgcgccatggctgctgcggatgatcagggccttcaggggcactggggcagggaccggatgtggttgcccagaaggttcaggtgctcatatcagcagtagtggtgcagtgctcggtgctctcctttctagctaggtgat

SEQ ID NO: 717 - DNA, 986 bp, Zea mays
  misc_feature (986)..(986): n is a, c, g, or t
  Probeset Number=SeqID_15120
tctgcccccctcctcgcgcgctcggccagccatggcgcggcgccccctgctccttcctcgcgcagcagcagccgagcgtcccctccctgggccgacctcggccaagtccctgtccatggcgcgcatggagcagccctagggccagcgcccctgcgtgcgttcctccctaacgcccagaaatttcagcagggagctccttacactcatgctccagtgcctcgccgtggaatccccctctcctccctgctctggcatcaacacggccagggacacaaccagcggcagccttgctgttcacgtgtggcaccaaggaagaagaagacccctttgggtctatgacgtgtgggcccaaggcagggaccgagagatgatgatcgagcaactgatgtggtgccaaccacaagacgcagttggtggacgacctgaagaatgatggacatgaccagtggatgctcgccaagcgagtacctcctccaacaaacactgtctaagtgttaaattaaaggtactccttaggatgattgattgatggtgtgacttggcctttgtccctsccmccgggacagacggtcgagtgggttattgcttccgcaggaggggaccaggaggagtagtgtggccaggcttcgccatgttactcggttyttctccattgcaacctcgctgacggagagtatgtgctcatccctgagcaaggagctgtccacgaggaagatcaggagcaagctcccaagcctgccatcgaggatctccccgcagccccagcaattgaaggtaccttcttgatttggttgatggtgtgacttggccttcatccccgccaccgggatagatggtcgagtgggttactgcttccgcaggagaggaccaggaggagtagcatggccaggcttcgccatgttactcggttttytccgttagttattthtgctgcattaaaatttatggctattatttytgaaactccgataatataatcactaatn

SEQ ID NO: 718 - DNA, 896 bp, Zea mays
  misc_feature (1)..(262): n is a, c, g, or t
  Peptide Sequence Number=SeqID_12639
  Probeset Number=SeqID_15121
nnnnnnnnnnnnnnnnnnnnnnnnnnnnnnnnnnnnnnnnnnnnnnnnnnnnnnnnnnnnnnnnnnnnnnnnnnnnnnnnnnnnnnnnnnnnnnnnnnnnnnnnnnnnnnnnnnnnnnnnnnnnnnnnnnnnnnnnnnnnnnnnnnnnnnnnnnnnnnnnnnnnnnnnnnnnnnnnnnnnnnnnnnnnnnnnnnnnnnnnnnnnnnnnnnnnnnnnnnnnnnnnnnnnnnnnnnnnnnnnnnnnnnnnnnnnnnnnnnnnnntggcgtccgaccttagtaggtcgccctccccgcccagcagcaagcagctcttttcccctcgccatgaacgctgtcgatcccctgctgcagttcctccacatggtctggtcgtcgaccgtgcgcgtcacctgctcgtggttatgggaaaccagcgagcctctcctcacgacgtagtttcctcgcgtcatcgttcagcctgtggaggtacgttaattgatcgcacgatgtggaggaaaagtgttggattaacctcaaagtgatgctgacgaataaaccaraggaatggatgatytgatcaagkgccagaatggaagatgctcmccaagtggtcatcatytaacaacmctaacctagtgttatcccaggttataagtttgttytgttgtggatggtgttaartgccggkgggctygtccttyttawataagtttatcccatccttagsttytttattcaggattgtcacttaagstagaatgtattttaaaacttataaatgtttatacattcmaattgtaatatttttgaatcaaattytyttgtaatcmctccgatgatatattgtaatatggttataacttgtaaatgttgtaacttgtaatcmttttgtaataaagaatttatttccsctgcc

SEQ ID NO: 719 - DNA, 896 bp, Zea mays
  misc_feature (1)..(34): n is a, c, g, or t
  misc_feature (635)..(896): n is a, c, g, or t
  Probeset Number=SeqID_15122
nnnnnnnnnnnnnnnnnnnnnnnnnnnnnnnnnntacaagttacaacatttacaagttataaccatattacaatatatcatcggagmgattacaayayaatttgattcaaaaatattacaattmgaatgtataaacatttataagttttaaaatacattctascttaagtgacaatcctgaataaayaasctaaggatgggataaacttatwtaayaaggacyagccckccggcarttaacaccatccacaacayaacaaacttataacctgggataacactaggttagmgttgttayatgatgaccacttggmgagcatcttccattctggckcttgatcayatcatccattcctrtggtttattcgtcagcatcactttgaggttaatccaacacttttcctccacatcgtgcgatcaattaacgtacctccacaggctgaacgatgacgcgaggaaactacgtcgtgaggagaggctcgctggtttcccataaccacgagcaggtgacgcgcacggtcgacgaccagaccatgtggaggaactgcagcaggggatcgacagcgttcatggcgaggggaaaagagctgcttgctgctgggcggggagggcgacctactaaggtcggacgccannnnnnnnnnnnnnnnnnnnnnnnnnnnnnnnnnnnnnnnnnnnnnnnnnnnnnnnnnnnnnnnnnnnnnnnnnnnnnnnnnnnnnnnnnnnnnnnnnnnnnnnnnnnnnnnnnnnnnnnnnnnnnnnnnnnnnnnnnnnnnnnnnnnnnnnnnnnnnnnnnnnnnnnnnnnnnnnnnnnnnnnnnnnnnnnnnnnnnnnnnnnnnnnnnnnnnnnnnnnnnnnnnnnnnnnnnnnnnnnnnnnnnnnnnnnnnnnnnnnnn

SEQ ID NO: 720 - DNA, 639 bp, Zea mays
  misc_feature (639)..(639): n is a, c, g, or t
  Peptide Sequence Number=SeqID_12640
  Probeset Number=SeqID_15123
gcctctcgcgcaaccaactgcgccgccgtctctaccgtccccctccctgccccctcaaatccctcctctcccgacgtggccaggctatcgctggctgagtcaggcgccttcgtcaaggcccctggcgacgcgcccaccaaagtcgcatgtgccatccccatgatcggtgggtgctccgcctatgtcggcaaggtgttccgtgtcactaagcacgttggggtcgcgctcgccgacctcaccgccgacgaccgcgtcctctcgcgcttcctccgcaatgagtgcatcaaccacttcgtctacgaggcgccgctccccatctccaggctcgctaacaaggtgcatgtcgattgcagttaagtcagaagaaaaggtggaagaagatccagaattcccattaaaagttatctcaaatgctggaggtgtacccatattgatggatgaaactatttggtttaattttgatagtgaaacaaaatcttccattccaggacgttatgcaactytgccatytgttttacaagattgctaataaggttgtaragaatgatgacattaacmcaaaatactccaacgaaagttataacacatttagttgtgttttatgstacaattacctcaaaatacttyttgatgcmtttn

SEQ ID NO: 721 - DNA, 541 bp, Zea mays
  Peptide Sequence Number=SeqID_12641
  Probeset Number=SeqID_15124
gtctcgagtctagccatggttccctgcttagggtggtgattctaaagtctacaggtctctgtagccctctccagttcatcgcatgccattcccctgtgctggtgaccacgcctgcagttctcccacctcgccatggctcggacgtcctaaggagttgctggcctggatgaagcttgttctgtaatcatctcagagctcccaaaataaagagtgaagattcaagatgaagtggttgctaaagaggagtctactccagtgcctgctcatcaagtggatggagctatctaactaaaggttgggtagaaggatctagtacctcttcactgcaataaggtgatgaggagtacactacctgttcctaaggctggaggacgtttccagttctggaggaagattagttaggcttatgtataagctttggagggttcctacctttctgctattgtaataagttatgcactttgagtatatcaggacttgtaataaatgtaaccttcccatgtaataaccttcagttttagaaataaaaagaatgttttgc

SEQ ID NO: 722 - DNA, 541 bp, Zea mays
  Probeset Number=SeqID_15125
gcaaaacattctttttatttctaaaactgaaggttattacatgggaaggttacatttattacaagtcctgatatactcaaagtgcataacttattacaatagcagaaaggtaggaaccctccaaagcttatacataagcctaactaatcttcctccagaactggaaacgtcctccagccttaggaacaggtagtgtactcctcatcaccttattgcagtgaagaggtactagatccttctacccaacctttagttagatagctccatccacttgatgagcaggcactggagtagactcctctttagcaaccacttcatcttgaatcttcactctttattttgggagctctgagatgattacagaacaagcttcatccaggccagcaactccttaggacgtccgagccatggcgaggtgggagaactgcaggcgtggtcaccagcacaggggaatggcatgcgatgaactggagagggctacagagacctgtagactttagaatcaccaccctaagcagggaaccatggctagactcgagac

SEQ ID NO: 723 - DNA, 636 bp, Zea mays
  Peptide Sequence Number=SeqID_12642
  Probeset Number=SeqID_15126
attaaccagtgaagttactcaaccaacctacaccgccagtcgcctctgccttcgagtccgagctccgaccggtgaccggatgcgggatgtctacgagtgctctgacgccgagcggctgcctgctcgcgcccgcctccgcctggccgcctgatggacgaccgccgatcgccacgctgagcgccgcggcgtgccctgcccctcatcggcttgctgctcgtggctcgtccagcccgcgcgatcgcgccagcgcggtagcgcccccgcgtctggcgacgggcgaccccaaccccatccctgagtccactgctcggcgcctcggtgatagggctggaaaataaggtccaggcccgcgagtcggctcgatctcggagtggtcggctcggagcggatcgcaagcctcgaacgagccgagccgagccaaccttttaggctcgtcgtagtagcgagccaagccgagccggttcgcgagctgtgccaaattacttaatatgttgaataatgatggatattggataattttatatatagtcaatttgttccttagcgtttcatgatagatatatgacaattcataatttagattactcataatgatgaatgatatctatatatttaatatttatatactaatmattt

SEQ ID NO: 724 - DNA, 899 bp, Zea mays
  misc_feature (899)..(899): n is a, c, g, or t
  Probeset Number=SeqID_15127
catcgtgcgacagccgatccacgcctcgaggcccaggcggcgccatgcccgtgggaggcgaaactcgcctacaggccacggatctccttccaaacttggaggcgatggcccggcataggggcgaccttccatggtaggtgagatccacggtccactagcgatgcgcccccatgctagccactcccgtccgtcaccatcccgtgtgccccaccggccttgcccccatcgcaagaggtcccccaccaccgtgatgctcgccacaacaatcgcccccaccccttgcccgaggttcacgcctgccgaggccaccctgtcccccatgccgaatcgtgatggttttgcccccacccatgtgccacgggtctccttccccgtcgttcccaccaagttggtgagcgcccttcctcctttcgatcccttcccctgtctccgctctcaacacggccggccagccatggagtgtgacatcggattcgccgagcgagccttggtggcgtccggcgctgccgttgtgtccgtcgttytygtcaatgtcctcgacgtcaccaagatgctcaagacatttcccaatgcgacaaaatatytaaaaaacaattataagctttggtaaggttgatcctaggcacaaggaaaaagttgaactgagtgtcttgtccatctgctcatgggaagagtttytgcaactaataagggaggtgaacataaatttgaacttccacccaaggaaaatgatggcatatgcatgataatgtacatcagtggaacaactggtgatcctaagggagttgtgatyttgaataagagcattgctaccattaattcagcagtagatgagttccccaacaactcaaacgagtagtaggccattcatattttgacattcagtggatatgcttgtn

SEQ ID NO: 725 - DNA, 617 bp, Zea mays
  Peptide Sequence Number=SeqID_12643
  Probeset Number=SeqID_15128
accaaagcattagatacattttacttctcttctttttctctttatatctgtcatctttagctttgtcatatcgaaatggccactgttgaggttgaacaagtgattgctccagtagcagagaacgttgaggtaccagcaaatgcagtggaggagccagacgtagagaccaaacaacccgaagaagtcgtcgccacgacagactctgctgctgctccagccgccctaaaagaacaagaagccgaagccgaagcaccagtcgtagaaacgagcaaagaagtggttgtggaagaggcagagaaaaaagatgaagaaacagaagagccaaaggtagaagagaaagaagagaagacggaagctccggtggctgtggaggaggcaaagatagaagagaaggaggaggtgactgaaactccggcggttgtggaggagaaggagaagactgaggctgaggaagttgtggctgctggggaagtcgccgccgagaaggccgaggagtaaagaggaagaaacaatatatgaccttctttggtctcatttcgttgttaaaaagaagattcttcacaaaatttcataagtattttctatcgtttgttatggtgaaatgatatttggttatg

SEQ ID NO: 726 - DNA, 716 bp, Zea mays
  Probeset Number=SeqID_15129
aaataatctaacatcaccaattccatacattaaaaacctccaagcctccatctccagggcagaaacaaaacatcaacacagctaattaagagaagaacatggagaaagtgtgctgcatgtgcggcgacgtcggattttccgacaaactattccgctgcgggcactgccgcaaccgctttcaacactcctattgtagtaattactacagtgagtttgcggagccgaccgagatttgcgactggtgccagagcgacgacaaaaagctgagcagcgttgctaaacacggcggatcttcgttttcttcttcaaagaagaagaaggcttcttcctccgtaaattacgagagcggggtcacaaaccaatcggagtatccttccggtggcgggatcaagcatgacaataaccatcacgatcaagtggccaagagcgttgttgccggacctgcaggaggcggcgtgccgtcgccgaggacggccacgcgaaggtacaagcttctcaaggatgtcaggtgttagatcaatttctgaaagagagcttaataatataatatgctaaaataataataaaaatgcgcctttgagatatgattgagtggtttacaaaatattacgattatctatgtataattaattagatatagtgaatgtatatcttgttgagaagcttttcgtactaatgttgaaaaaataatgaatttatgtttgtcgtgagcttcc

SEQ ID NO: 727 - DNA, 915 bp, Zea mays
  Peptide Sequence Number=SeqID_12644
  Probeset Number=SeqID_15130
aacccaagcgaaacatttattacaacatatatcaaatcctaacctccatactatgcacgaattcaactgaacctgagtgcaaaccttttttaaggaaccaaaaaatattaaatgaaacgagccctttataagtgtaataaaaaacacaagagtaacatttcatcatatgaagaataaccatgcagctgcgatgagaacagatccagagatagagatctcaagcgacgaggctcttcccgtcggagctgaagcttcggggccttcactggtgggtccttcatcaggggacgacgacggagacatgtctggtgtcggagacggcggagacgatgcggatggtgagtcggacgagctagtaggaccttcagacgagcttgtagggccttcggacgagcttgtaggaccttccgatgagcttgtaggaccttcggatgagctggtaggacctccggagcttgagtcggggcttggagccggagttttggctgacgaagattttggagcgtttgcgggggagccaccacctgaagatggggaagcgcttggagtggcggaggagttcttcttggtggtggtgggagcagaggccgtaggcggcgaggttggggcggaagcggtttgttttggggaccctgcggcgggtggttttggggatcctgcggcggttggttttggggatgctgctccggagggttgtttgggggatgctgctgcggtgggagaagcagtgggtgagcttttgttggcgttggctttaggcgctccggctggtgttggaggatcagcggcgaagacggcggtgatggccaagacggcgacggcaatagataggagcataatggtccttgtcatctttaaatgtgtgaatgtgagattttctcaaatgcggtaattaagtattaaattacttatggt

SEQ ID NO: 728 - DNA, 876 bp, Zea mays
  misc_feature (501)..(501): n is a, c, g, or t
  Probeset Number=SeqID_15131
tcaagtatacacttctctagccttccacacgctagacaacaaacgcgaccccgcgcccctctgctctgcctgcgcccgcccgctcgctcacaggcgctgcctggcagtgccattactgcccccacccgtctctccgggcccgagcacgccagggggaaccgggttcctcctcatggccggtgaccgccgcggcgggtcgcccacgatggagcgccggcgggggatccggcgcctcctgctgccccgcggggaggtctcctcgtcctcctcgccctcggtgccgctgcctccgccggccgcagccgaggtggggcggaggaagagcttcgcctccgcggcgctgcgcgggctgggctgcacgtcggccgcggcctcgcaggcgtacgcgccaggggcgggctccgcggctgcggcggccgtgcggtcgtccgccgactggcacgggcgaaggaagaaagggaaggacaggaggaaggagaggggaggaggtggaggaggcgnccttgtgggcggagggatcggcggcgacgtgtggtgcgccccggggataccgttcgccgcggaggcgtcgtccgtggactgcgtggtggcgcgccaccagatgctggggagggggcgcggcggcgacgccgagaggccgcacagagaggtgagccgtagatgcttactggcttctttggatctgttcgcgctcacagcttgtccatttcgtaggattgcttgctgttcttggtgggtggttattctcatcagttttctcattcctcatgtgcgtccgtttttgtgctttttttgaactcgttttttgtctgttgttgaaaagaaagcgtgtgttcttctccaagtattcaggttttctggtggctgttttgctcc

SEQ ID NO: 729 - DNA, 1005 bp, Zea mays
  Peptide Sequence Number=SeqID_12645
  Probeset Number=SeqID_15132
actcgactcgactgatttgtatcttcctctcccactggtgtaacggagatgcgagggatctcgagtagatcgctttattctttgagccgatcgctgttatcacgcgtaagtcacgggatcacagtggcgacatcaggtggatgctccggggaaactcgtgcgcttggttcactgtggtctgctcttcaaagccgcggcgttaaagttaacgccattcagttaaggccagggaacgttattgaacgaacaggacgtactttccgggttgtagaatcagagcataaacaacaaggcagaggaggagcctccatacaggtagagcttcgagatgttgacaacgggagcaaacttaacctgcggtttggacctgaggagtccgttgaaaaggtttttgttcaggagaaatcgttcacatgtttatatacagagggagatacttcattcctgattgagcccgatacgtttgagcaagttgaggtgccattggacatatttggcaaagctgctgtatatttaaaagaggaaatgagagtccagttgcagctgtatgatggaagagctttatctgcatctgtccctaagcatgtcacatgcacgatccaagaaactcaactaccaatgaaaggcttaacctcagctcctcgttacaagagggctctcctggataatggttctactattcaagtaccatcttatctggaggcaggtgaaaagattgtgataaacaccgaggatgattcttttgtcaagagagacaacaaataaaacgacttgcatagtcaaaatggcgctgtctctcatggaggaagttttatgttgagaagcgttttaatagaaagattaagatgctaatgttactgttattcaagttctcataatctatgaacaccttcattgattaaggtgttacaatttctatacgaaaatttacagattcttgtaaaacatgagtgggtgtctgtctttcaataaaagcgagggctttgatcaaaaaaaaaaaaaaaa

SEQ ID NO: 730 - DNA, 740 bp, Zea mays
  misc_feature (1)..(45): n is a, c, g, or t
  misc_feature (740)..(740): n is a, c, g, or t
  Peptide Sequence Number=SeqID_12646
  Probeset Number=SeqID_15133
nnnnnnnnnnnnnnnnnnnnnnnnnnnnnnnnnnnnnnnnnnnnncaagagatcttgagagagagatcgagccgcggtggttcccgtctttcttctttctttctggttcacggtatcgactctagtgcacggtggtctctttgacgcggtgtagctggctttgactccggtgttttcgcgatcttaggcgaaatcattcggctttggtccacggttaagggtttggatgagatcttggtgtttaatcgattgatgctctccaaactgggtatgtgtttagctgaagaagcccaaaacgtccaatacagttgttggaggtggatttctttagtgtttatggttgagttcccggtgaaatccggtggtcgtttgttttgtttgggttgatggagaagcttgaagtcggaaacgatggtggagaatcgtgctcacgatttggctctgatgaaacacggtgggttacggtgaattagccgtgaacatcaccggcgtcatttctggatttggtaaaagcggtgaaggataacggtgaagcgttgatttcttgccgcgtgtatgttttatgtgtccttctatggtgtctgttttactgggcctttaaggcaggttagcctggtgcttttttggacttttgtgtaatgtattttatatttgggttttttgtatggtctgggctggtttcagtttttcaataaaattcagtgaaaaaaaaaacgtttagacaaaaaaaaaaaaaaaan

SEQ ID NO: 731 - DNA, 1245 bp, Zea mays
  misc_feature (1244)..(1245): n is a, c, g, or t
  Probeset Number=SeqID_15134
ataacaaaacgagatgaacaaatgccgtggcctttggccgagcggccaggctcacatccgagcggccctctttttctcactctagcaggtgggccccacccctgttgattattcttcttcttgacggttcctcctgccgttcattcttcctcccatccagatcgcgcacgtcgcgtttcctccggcaaaacctccagctcgctcccttcggcgcccacgtccggcacctatggtgctgagccgccagctcccttctctctcgtctcacgctacctcccctctccatcttcttcccatggacaccagcagcgggagcctttccccatggagccagcgcctctccctagtgtgttcttccacccccagcagcaggagtggccccatgcatggcgtccctcctctccctggttggatgcgcgtagcaccttcttcctccctctctcttccccacacctgcgtctcgcctcgcagccgcccggatcgccaccgtccttcgtgtcagcctcgtcgtgccctaccgtcgacgtcgttcgcttcctcgacgcgcccgccgttcatgctcgtctcgctgtccaccagtgcgcggtcgtctggctcggctgcccggcacagccaacccagcgtggtggccggcgtagctcgcccggcgcggcggcgtggtcggcctgcctgcacggcgcgcagcccgcgcggcccgcggcgtgcagccagcccagcgtggcggccggcgtggctcgcctgcgcggccccggctcagcctcgtcgcgagctcgcctcgccatccgtcgtcgtcggaagatcgcgatttgtttccgcacttcgaggaatcgaagatcaggagttggcgaccaagtgatctggttcttcgagttctacgagattgaagaccctgagcatctgtttggtgaaggttgtccacattgcaaccactgctcaggagaagacgaagccgtggaaggagacttccaggagttccaagacatcgacgagttcgaggattaggctagcgacctcccccagtcagctgcctgtggtgggtttatttacgttggctacgtttctattctgtgtactttgattttactatgtaaatgactctagtctttcatattattacctaccctttattgttattcgaagcattgtgctatgatgagtcatttatgtaatcgctatgtacatgagttctgatcctggcacgtacatggttcgcattcggtttaccttccaaaaaaaaaaaaaann

SEQ ID NO: 732 - DNA, 655 bp, Zea mays
  misc_feature (655)..(655): n is a, c, g, or t
  Peptide Sequence Number=SeqID_12759
  Probeset Number=SeqID_15135
aatccacaccagccataagcagtgagtgagtgcatcgacattcgatcagctcagctatatcctgcatcgatctggtcatggcggcagcaatgctcccgaggctcgttgccgtggcggcgctggtcgcgctgatgtgcgccgtcgctgtggcccagaaggtacctgccgtcggcggtgcgccggtgtgcaaccttgtcgatcagaacgtcgtgaatgcttgcttcgagagctgtggaagaggtatgaaaattgccactgccgacaggattacttcagcgggtaaagtcaaggttcaagtggactgctgcgtagcctttggaggccactcgtgcatgtgccagatgaagaaggcgtggaaggctcagggcaaaagtgcccagaataatgtggggtgcgtcagggaaaaggcctgctagtgagcacatgcgggaggtctcttcgtgcatgcaagacctctagttcgtttgatatgtgtgcttcttagtttcaagcggtcgatgtccacctgctccttttgcttttatttgcttgtttgtgttgtattttttttcctacgcatgagagcattgatcggtcagttgactctttttagtttgtaccaatcagaaataaatgtgggtggaagttcttgtatcatccaaaaaaaaaaaaaaan

SEQ ID NO: 733 - DNA, 920 bp, Zea mays
  misc_feature (920)..(920): n is a, c, g, or t
  Probeset Number=SeqID_15136
ataacctactcacaaagcaaccagacaacacatacatctctcatctctctattctctctcactgtaaacttcaaataatgatgggataccaaacaaacgctaatttctccatgttgtacgaccaagaccaccctcataattatgattatgatgacctctcttcatcaacttctgttgattgcactctctcccttggaacaccatctactcgtctcgacaaacaccgtagattttcttctgccaattctaacaacatctccggcgacttcttctttcacggaggaagcgcaaaaacgacgtcttacaaaaagagcggtagtgagcacaacctgcctcgccgttgtgctagctgcgacacttcttctactcctctatggagaaacggaccaaaagggcctaagtcgttatgcaatgcgtgtggaatcagattcaagaaggaagagaagcgtgcagctgccagaaactcaataacgtccggtggtggttcatcagtggcagaagttccggcagagaacccgtacaacggaggtggaaactattacactcatcatcaccatgcttcctcgtcaccgtcgtgggctcatcagaacacacaaagagttcagtatttctcgccggcaccggagatggaatatccgttcgttgatgacgtcacggctgcctcgtttatgtcttggaattaacgtcacggaaaccactggccttctccaccatttttgacgagatgaatgaagaaacgttacctatggaaggtcttgtcatagattctcacccaaagtaaatcagtcctggtcaaattcattataaagtttctttttatttatttatttcttacatcgacactatctccttgtgttttctttttatgtctttttgaaagatatatatacgtactgtagtgtttaaaaaaaaaaaaaaan

SEQ ID NO: 734 - DNA, 740 bp, Zea mays
  Peptide Sequence Number=SeqID_12760
  Probeset Number=SeqID_15137
agatttttagggcttccagtgtaaaaaaaaaaaagtttaagcgcggcggcggagccatggttctcaagactgagctttgccgattcagtggccacaagatttacccaggcaggggtatcagattcatcagatctgactctcaggtgtttttgttcatcaactcgaaatgtaagcattattttcacaataagttgaagccttccaagcttgcatggaccactatgtaccgtaaacagcacaagaaggatgctgctcaagaggctgtgaagaagaggagacgtgcaaccaagaagccttactcaaggtccatcgttggtgctactttggaggtcattcagaagaagcgtgcagagaagcctgaagttcgtgatgcagccagagaagccgcccttcgtgacattaaggagagaatcaagaagaccaaggatgagaagaaggcaaagaaggccgagtttgcttccaagcaacaaaaaatcaagggcagcatccccaagactgccgcacccaaggctgctaagttgggtggtggtggtggcagacgttgaatagattagccctcattcatctctgcacttatcttttttaattgtttcgacttttgtttcgtcacaagtttttattacagtcttgcaccctatctgatatattgcactcaaaagagatttttatgcagattatgaaattttttgtttgtatacttacttatctcattttatttgaatctaaaaaaaaaaaaaaaa

SEQ ID NO: 735 - DNA, 1065 bp, Zea mays
  Peptide Sequence Number=SeqID_12761
  Probeset Number=SeqID_15138
cacgagaccattacctagaacatcctaatcgaaaaaattatcacaccactctctccctctcctcctttatattttagttatggccaagattggtttgaaacccgatccagttaacaataatgccaaggagattcgttacagaggcgttaggaagaggccatggggccgttatgccgcggagatccgagatccgggtaagaaaacccgggtctggcttggtactttcgataccgccgaagaggcggcgcgtgcttacgatgcggcggcgcgtgatttccgaggggccaaggctaagaccaatttccccaattttctcgagctgagtgagaagatgccggctgccggcggcggtttcgagcgtagcccaagccagagcagcacccttgactgcgattctcctccggcggcggttacgccggcgagtgctgggattgttccgccgcagctcgagcttcgcctcggcggctatcagatcccgatggcgcgtcctatttactttttggacgttatgggagtaggcaacggaggtcgtgctcagcctccggtggcgtcagcttttaggtcgccggtggcttgtgtggctcagagcgactctgattcgtcgtcggttgttgatttcgaaggtgtgatggagaagagatctcagctgtttgatctagatctaaacttgtctcctccgtcggaacaggcctgaacttatcgaaggtggtcgtggtcgtgttcatttccgacgcgcatgcgttttttttttgtttgggagctgagagaattcgtattctcgttagttttttattctctctcactctagaataattattattatcggtttaaaaaaaaaaagtttatcgggagagagaatataattttagctgacatggatcgttatgtacatattattacataactggagatctgaacttttgttgtgtgcttttttgcgacttggtttcaccttgttgttcctctatctgtagcctttaattttgttattgcaaattttatatcaataatttggtggtcaaaaaaaaaaaaaaaaaaaaaaaaaaaccaaaaaaaaaaaaaaaa

SEQ ID NO: 736 - DNA, 685 bp, Zea mays
  Peptide Sequence Number=SeqID_12762
  Probeset Number=SeqID_15139
cacgagaccattacctagaacatcctaatcgaaaaaatcaaaactgatagaactcactctctaatatacttcatatccttttttcttctttgaatcaccaatcatgtctcaacaatcattcaatgctggacaaaccagaggccatgctcaagtcctttttatgatcttaatcattttcattaatttcaaaccatatcgaataattattttgagaaattctaaatatacttgatgtacataacatttgttggataatgcaggagaaggctgagcagtggactgagtctgccaagcagactgcacagtcagcatgtgacaagaccgcagatgtagcgctatcagcacgtgacaagactgccaatttgacacaatcaacacaaagcaagtctgcagatgcatctcattctacccgagaatcagctcaacatggccaggaacaaaccgctggttttctcggtcagaccggtgaatctgtaaagaacatggctcagggtgctttcgatggtgttaagaatagccttggcatgaacgagaagaaatgaggaaatgagtattcgtacttctcaaataactatttatttattcatggctatttctggtgtctagcaattttttatttctctaaattatgtttgtaataaatatatttttgaaaggtttcgtgatcataaaaaaaaaaaaaaaa

SEQ ID NO: 737 - DNA, 1194 bp, Zea mays
  Peptide Sequence Number=SeqID_12763
  Probeset Number=SeqID_15140
cacgagaccattacctagaacatcctaatcgaaaatttttcgacttttactactcgaagttgatgagatttcctggataatcaaagtctcatcccttctctgttccgctcgctgaaaaagctcataacctctaaagcatggagtctctatcctttcctattctaaatcctctgttagcttctggttctagtctttacagaaaacagagctcgaggatgacctcttcaatgtcatcttcagttagtttcgccacaggaagaacatctctgtccactgttcgccgctctagagtaggtgttgttaagatgcaagctgttgatgaagatattgatctgaagcaaatgagagacatggctgctgctaagaagcgttgggatggtttgttaagagaaggaaaggtgaagcttctgacaccaagagaagcaggctatgctattcagctttcaaacaaacctcttctcgatgtccgtccttctagcgagcgtaacaaggcatgggttaaaggctctgactgggttcctatcttcgacaatgaagacaaccttgacgctggaactctttccaaaaaggtcaccagttttgctatgggtggatggtggagtggtacacctattttgtctttcaataagctcttcttgtcaaaggttgaggagaaattcccaaaagaaacagagctgatcgttgcttgccaaaaaggattgagatccttagctgcttgtgagctacttattaatgctggatatcagaatattttctgggtgcaaggcggtttagagtctgctgaagacgaggatctagtcacagaaggttctcagccgttgaagcttgctgggattggggggttttctgagttcctcggttggacagaccaacaaagagctcaagctgcgaaagaaggttgggggtaccgtttagtatttactgctcgtctgtttagggtaattctggctgcggatgccttgttccttggtgctcagcaacttggtcattatattcaggagttaagaggtcactaggactctctctgtaaccaaagctccgtgtggttgtactgcttctcttcacaaaaaaaactgtaaatttctgttgaagattgtagtttttgagatagagtagttgaaattgagatactgaaaaagaaaaatctttaaattttggaaaatcttcagtttctgttgaaaaaaaaaaaaaaaa

SEQ ID NO: 738 - DNA, 842 bp, Zea mays
  Peptide Sequence Number=SeqID_12764
  Probeset Number=SeqID_15141
cacgagaccattacctagaacatcctagtcgaaaagtgctagatcactgcccccggcagaccacctgacccggccgctcgagatggccgccagaaggcacgccgggagcagctccggtcccacttcggccaacctaagcatgaagctgctggtggaggtggacaggcgcggcacgcccaggcgcgtggtgtacgccgaggccggcaaggacgtcgtcgacttcctcctcaccttcctcaccttgccgatcggcacggtcgtcaagctgctcaggaggaactccatgcccatggtaggctgcgtcggcaacctgtacggcagcgtcgaggagctccccgacgacttcatctgccacagggacgccagggccgccaaggacaccctgctcaggcccgccggcggcaggcttcccctgctcacgaacgcggggtcgtcgtcgtccagcaccggcggctttgtgagggcgggcgtgacctacgaggtcatggacgacctcgagattgctcccaggtctaacgtcgatttcatcaccaacctcaacagatatggtatcagggacatcggctgtctccagaggaagactgtccgagttggcgacaccgagggtctccagatactgagggcgtcactcaagtcgaagacggtcctcaccgacgtcttccttcggacgaacactccgagtccgagtccgagggccttaactgcagggtgaagtgtccttgccgtgtcatccttgtggtgcgtgcatgtgtttctttggtcatatcgttcgtgtgtggtcactggttcacggctcacatactatgaataaaggcaaggaattatcaaaaaaaaaaaaaaaa

SEQ ID NO: 739 - DNA, 522 bp, Zea mays
  Peptide Sequence Number=SeqID_12765
  Probeset Number=SeqID_15142
aactcagcaaataccaaaccctactcatattcaccggccacaggccacctctctcatacataccttcacgggctcacggccacacacagacgcatggtcactggcggcttgccggcttcacctcacggcaggcaccaggcaacgcagccgacaaccgctgccgcagcccgaagcgcatggctgcacgtcgccgcccatttcttctgttgccgccaccgccgtccgcttctgccgctgccgccgcagtccgattcacgccttcacctgtagccccgcgaggacacgtgtcatctgaaaagcaagttggtacctggaatctcaagtgccaggagaagaatcagatggttcaggaggagccgccaggcgaggagtttgatctgatctaggtggcgtttctcagttgacattggcgccgacaatccttagttcgagttatatttatcttttattttgtaagacttccgctatgtaattaatactctgattattgtgacatttatctctatacactctgttattatg

SEQ ID NO: 740 - DNA, 522 bp, Zea mays
  Probeset Number=SeqID_15143
cataataacagagtgtatagagataaatgtcacaataatcagagtattaattacatagcggaagtcttacaaaataaaagataaatataactcgaactaaggattgtcggcgccaatgtcaactgagaaacgccacctagatcagatcaaactcctcgcctggcggctcctcctgaaccatctgattcttctcctggcacttgagattccaggtaccaacttgcttttcagatgacacgtgtcctcgcggggctacaggtgaaggcgtgaatcggactgcggcggcagcggcagaagcggacggcggtggcggcaacagaagaaatgggcggcgacgtgcagccatgcgcttcgggctgcggcagcggttgtcggctgcgttgcctggtgcctgccgtgaggtgaagccggcaagccgccagtgaccatgcgtctgtgtgtggccgtgagcccgtgaaggtatgtatgagagaggtggcctgtggccggtgaatatgagtagggtttggtatttgctgagtt

SEQ ID NO: 741 - DNA, 770 bp, Zea mays
  misc_feature (770)..(770): n is a, c, g, or t
  Peptide Sequence Number=SeqID_12766
  Probeset Number=SeqID_15144
gaccactccaaaccctcgaatccaagccgcctccgcctccgcctccccgcggatctcccatccatccatggccgccgccgccccggcccgcaggctgctcctgcgcctgcgcctccccctccccctctgcgacccgccgccggcccccgtcccgctcctcccccacctgctgacgccgcacctccacccgcagccaccgccgccggcgcctccgctcccggacccgaagctccgggacctcctcttcgccttccaccccgccgtgcacctatacccgtccctcgtcgacgtcccgagaggagggccaggcgactgcgacgcgcgcgaggacgtaggggaggccaaggagccggaggtgtgggcggacagcgtcaagaagaagcgcaagcgcaagatgaacaagcacaagctccgcaagctccggaagcgcctccgccgccagacctgagccgccgccgcacgtggatcccgtaggcttgaggattgtgattgcaaggaggttctccggtgccgctgccacaccggtttcaagctgatggtttcttccagttattttggtttggttataggagtagcagttctggtaccaacaaagcaattgctgcgactgggcacgacgtacctacaaacactgtaatgacaaggagccaggaacgggctgtttcatgtctggatttctggcaaataaagcttcaaatgcccgtctaactcatttgtactgttctttccccggatcaatgctatagcctgagtatgctcgtgccagaaan

SEQ ID NO: 742 - DNA, 1949 bp, Zea mays
  misc_feature (1949)..(1949): n is a, c, g, or t
  Probeset Number=SeqID_15145
agaagcaggaaccgaaagttcgacaaatggtcaccaagctgggaaggcccttacaggatcacacaggtaatagctggtaatgcctacatgcttcaaactttgcaaggtgaggacctacctaagacgctaaatggtcgtttcttgaagcaataccatcctagtatgtggcaagatgcttaagaaagctgatgttgtcatatcgagttgattccaaccgcaccagtgcttttgtttcgctcagcgtccccaaaaggcagagggcatgtgttgagcacctattgtggcactgggcgcagtcggacggttcggccttgaggcccggacggtctgcaataggattagatcatgcggttaagctcctttctcctcgtgtgtttatccttctaaactcgtgggagctgttggagaacgcataggaacgggttcagacctccccttatatatttgaaggggtacggctgattgcgggcatccacaatcgaaccaatcaatatacttgtcgttcttctacctttcatgccctaggagtagcagtaacttagccttcgcatctctactttcacctctgtgcgactctacgtcgtatggagacgtcttgggtggtattgttgatcccaagacaaatcctaggatctctcctccctgactagggatggcagcaagtcgggttgtgttcgggtatgataatacccgacccgatatcatacctgatccttatacaaatatccatacccaccaagtcaatcgggtaaaaaatgaacccgtacccgtatgcaccgggtattcaccgggtatcgggtatccggtggatatgctactttaaaatataaatctgcatgtaaattgatgagcaacacagtttatgatagatgggagttaatgaacaacatcacaacatgtgaaattgataagcaacatcaccaatttacaaatcatagattcatagtacagttcatgactagtacacgtccagttcacaaatcatagtacacgttcagttcacaaatcagttcacaaatcatagactcatagtacacgtccagttcacaaatcataattcacacaacacaaatatcccttagcccttagtcggttccctgatttgggcttcttttctttgcttcatgggcaaaaaacacaacatgtaaaattatgaattaatatttcgggtatccagtggatatccatgggtaaaatatactatccgtaccctacccgacgtatttcgggtagccgacccgataggatccacgggtgagatttcaaacccgtattcatatccaccgggtacgaaacccgtgggtatccatacccaagggtccaattgccatccctatccctgacggggtctcttccgtggggtcagatccaggtactgttggcgaacgccgccgcgtatgcgcacgcacggaccgttcggccaccaggcgccaaccgtccgactcggcgtagagaagaactcggtcctgccgcacgttgtgggccgtccaaccctaggtcgtgtaccgtccgcactgccgcagaaagcaccgccgctatactacctcgtagtgattgacgtccagatcgacgccaacagtattatagcctaggtttgcgtgtcgggcgccgcagggttggacgacatagcttggaccagaaatgaaatgaaaccatatgaaaccatatgcatgtatgcatcgtggaaagctagcaagggaagcacgcaatttgcaaatgaaacgagtctctggcatagtcgcacgcaacacgcaagcagcggacggcagcgatcagcatggccaccgggtcatagacggcgacagatacataccgcgccggtgacctggcatggcctccttggtcgtagtctctctctctctctctttctgacacgcaagtatatatataaaaaaacatgatcgaattaagttgagatcgaaaataaattgatgcatgccgcagctgan

SEQ ID NO: 743 - DNA, 765 bp, Zea mays
  misc_feature (738)..(765): n is a, c, g, or t
  Peptide Sequence Number=SeqID_12767
  Probeset Number=SeqID_15146
agaaagccgacgaaaaggcagagaaaagacgcacaccgaagaaaaacacaaagacttcatcatcatcatctcctccttctttcgcctcagcaagaagctaatctgattcagccatggctaatgcggcgtcaggaatggcagtccacgatgactgcaagctcaagtttcttgaattgaaggccaagaggacataccgtttcatcgtctacaagattgaggagcagcagaagcaagtggtcgttgagaaactcggcgagcctggtcaatcccatgatgactttgcagctagtcttcctgctgatgaatgccgatacgccattttcgattttgatttcgtcactgctgagaattgccaaaagagcaagatcttcttcgttgcatggtctccggacacggcaagagtgagaagcaagatgatctacgcgagctctaaggacaggttcaagagagagctagacgggattcaagtagagcttcaagcaaccgacccaaccgagatggatctcgacgttttcaaaagccgagccaattgaggaaccggttgaattgaacttctttcatctactattgccgagtgatatgcttttacttaaggtttgctgtgacggcaccaaccaaaaaacagcttcatttttatctgtctttggtctctgtctttattttattttggtccttacagtgttgtcttaaaacttaagaggtctggctcgtgctctaccctaaaccctctatcaaaannnnnnnnnnnnnnnnnnnnnnnnnnnn

SEQ ID NO: 744 - DNA, 860 bp, Zea mays
  misc_feature (860)..(860): n is a, c, g, or t
  Peptide Sequence Number=SeqID_12768
  Probeset Number=SeqID_15147
attttggactacgtcttgaaaattgtagcgtgccgtcaaattttattttgcccttgcccctcggaaataagtagcaagaaaagatgccagctaagacgacttctgttaagaaaaggtttgtgtctgatggtatgttacgtgcagaactcaacgagttcttaacacgagaacttgctgaagatggttattctggtgttgatgtccgtgctgctccatcgcgcacagaaattgttatttctgcaacacgtacccaaaacgtattgggtgataagggacgccgtattcgtgaacttacatctctcattcaaaaacgttttgacttcaaagacaaggcagttgaacttttcgctgagaaagtagcacaacgtggattgtgtgctgttgcccaagctgagtcattacgttacaagttgattggtggtttagctgtcaggagagcatgttatggtgtgttgagattcatcatggaaagtggagctaagggatgtgaagttgtagtgtctggtaaattaagaggtcaacgtgccaagtcaatgaaatttgttgatggacttatgattcacagtggtgacccatgcaatgattatgttaatgtggctactagacacgttttgttaagacaaggagttttgggtatcaaggtaaaaattatgttgccatgggaccaaacaggtaaacttggcccaaagaagcctttgccagataatgtcagcgttgcagaacccaaggaagaaattctacccatagcaccaaccagtgatattaaatctaaacccgaagtagcagtacctgctgttccagttgtacctgttgttggttgaaatgattgtataaaataaactaaagttttttttaaacan

SEQ ID NO: 745 - DNA, 612 bp, Zea mays
  misc_feature (1)..(1): n is a, c, g, or t
  Peptide Sequence Number=SeqID_12769
  Probeset Number=SeqID_15148
ngacctcgcgtttgagacgaagacgagcgtcgtctccccggaacacgccaattccgagcaaacggacgacgccagcacgctcgcgaaaggcttgctgggcgtcaccctcgtacctgagacgacgatgcagtcagtccctgacgtgacttcgtcaccgcccgtcgaccaagaggtacctaccggttcccatctcacgccctttggatttagcctcgacccgccaagcgacttcgctttggcggacgctctcgtagaggcgagtccaaaccctctggtgtaacaccccaggtgtttatattccgctcgacaacgggtacggatttaagcacgtgaacagtggataaactggatgttaaattttaaacatcttcgtttttcgcgattttaatatcgcatctgtcccatctgtcgcgagtgcgacgtcgtttttatttttatctacccgggcttttccgaaattttcatgatgttcggaacatagctgtttcgaagatcggtgcgtccgatgtttatttaaaatacatcgctcgcgccaatacgaattcggaagcccaactcactcggatgattttatcccgagcaaattaatttgaactcgacgcctaaaatgtt

SEQ ID NO: 746 - DNA, 653 bp, Zea mays
  Peptide Sequence Number=SeqID_12770
  Probeset Number=SeqID_15149
tcgtcgtttgtgccgagtgggttggttatcgagagcgtaagtggttcatctgactagactattttagctgtccgatcgaaagcggtgatggccgagtgcccgctgtgcgggacggcgtcgcgccgaattcatagccgatacgccagacaagtcgcggacctgccctgcgcgggtaggcagatacgtctgtgggtgatcgcgcgacggttcctgtgcgagattccgcattgtcgtcggagaattttcgccgagcggttcggtcaggatgtcgtcccggtgcagtcacgccgaacagccaggttggaatgcatcgtcgtcgccggcattgatgattgggccttccggaacaaccattgctacggaacaatcgtttgcgatctggagcgacggcggatcgtgaggttgctgctcaatcgcgagattgcaacggtgcaggcttggctatccgaccatcccgggatcaaaataagtatcgcgcgatcgtggcggcggctatggcgaggctgccgcaaaggcgctgcctgaggtcatccaggttgccgatcgctggcacctgatggaaaacgcgagcgcagccttcctcggtgccgtgcgccggtcgatgcgcgtgatctgtacggcaatcggcgctacgatgatcaatccagagttgc

SEQ ID NO: 747 - DNA, 213 bp, Zea mays
  Peptide Sequence Number=SeqID_12771
  Probeset Number=SeqID_15150
gcagcagcggccgcgaggcggtgcgccgccgcggcggcggggggccgttcgtagggcgtggaggcggcgcggaggtgcggggcggcgccggatctttcctccggcgccggaaccgtcgtacgggcttgggtacatggcgcggcggaggcgggggcgcagggtggaggatggggcggaggcgcggggtaggaaggaagggggtggaataacgca

SEQ ID NO: 748 - DNA, 664 bp, Zea mays
  Probeset Number=SeqID_15151
taactatgaaaattaataatcatttaatatgaaacattggattcagaccactaagtcttatccaaattctttaagttttaaaatatattgaattatattggagcggcaagtcttttgcctctccctttcaaaaaaaaaatatattgaatgtaaataagccgatggatattgattgtttcaacatggttgttcggatgctcgaatgcaatgatgccttgtggttagaagacaaatatcactacatagacctataattatgtgtaatctaaagtaattattctgtagtcatataaatatgtttattatatcactattttactgacaaaaagtaattcatatctaatttcgcttgagacccttactttcgtgcaaagatagatatcaacatgttggcaaaattatttaaaggttggcttgacatgaatacaataattcagattgcagtcatgaaagctatattactttattattttttaatcttgcattttgattcttttacatgaatgatttggttgactaaattttattgccctattctttcttgaattactttagcttatttgtacttaacatggacactaaaagtgtctatataatagattccatgtctgtatcgtcatggtttaagtcatggtttaaggataatcatttaagcatgtattat

SEQ ID NO: 749 - DNA, 561 bp, Zea mays
  Peptide Sequence Number=SeqID_12893
  Probeset Number=SeqID_15152
cggatccacatactgccacgcttacgagtgcaaagtggaatgcgtggagtacgtcgaagccatcgtcgaatctgaagccctcattgccgacctggattgcctctccaaagaggcgcccgacgcgaagcggcatgccggcaacttcgaaccagccaaggcggttaagtccgtctctctcgaccccagcaacgacgccagcaagaaagttaggatcggctccgagctcgaccccaaataggaagcagtgctcgtcgactttctccgcgcaaacaccgaaatttttgcgtggagtccctcagacatgccaggcataccgagggatgtcaccgagcactcactggacattcgagccggagcccgacccatgaaacagcacctgcgtcgttttgatgaagaaaagcgcagagccataggcaaggaggtccacaagctaatggctgcagggttcatcaaagaggtattccatccagaatggttagctaaccctgtacttgtaaagaaaaaaggtgggaggtggaggatgtgtgtagactacactgggtaacataaagcatgtcccaa

SEQ ID NO: 750 - DNA, 614 bp, Zea mays
  misc_feature (1)..(6): n is a, c, g, or t
  misc_feature (614)..(614): n is a, c, g, or t
  Peptide Sequence Number=SeqID_12894
  Probeset Number=SeqID_15153
nnnnnngccgccggccaagttttgtccctctccctcgtccggttcggatcgtcgtcgccagccaggtgctggatccgtagcggcggcggcggccatggacaagagcatgctcggcgacctggatggcctccccgaggaggacaagatgtggatggccgccatgatcgaccagctccagatccacgacaggttcatgctataccaacgcatctcgtgggtggagcagggccgctgcttcgtggtgtggaagcccgtggagctggcgcgcgacctcctcccgctccacttcaagcactacaacttctcctttgtccgccagctcaacacctacgtgagtacatcaaaaacacactcgtccatctatacatcatatgttctgttggtgactgagattgttgttgcaaaacaaaggtctgctttggttcgatcagtgtgtcttttgtttatgtccaatgaaactgatggaagaaaaaagcctctcgatcggcggtgtcagagttgcctgtgacgatgtaaaaaacatgctagatgtagcaatgactaaacctgtgatgatggcatagttgtgcagaaagatttgacagggttgtgggatgttaatcttaatggaaagn

SEQ ID NO: 751 - DNA, 601 bp, Zea mays
  Peptide Sequence Number=SeqID_12895
  Probeset Number=SeqID_15154
atatctgcatcgaacttgatcaagtgttccatgtgcttgttggtgtgaacttgagatgattaccagaaaagggcgtcagcggaacactccagaatcgcatagcgagtacatattatacatgataaccagatactcacaaaaggcatgacattattcacaagcgacatattgccatggcgtcgtatctcttcagtctcgtgtcacatgccatacagggtaggattttaggtcaaatcccatgatccgaggtagcgggtttcgccgcaagaggcgcagaagatacaacctcgtggatttcgacaacaatcaagcccctgatcttgctgtgatcagttcaattacactatactgcgtactggaactccctgcgggtagtcctataccttggaacaacctcattccacctccaggttgcgatacggaaactcaaagcaacacagcaaccatggggaatgtcgccagtagtctcgttccggccaacgcctcaccagcgcaatacacccaagcgttcttcgccctctcttcagctttcatcttcagcatccaatttcttcctgatgacatccgcggcgtgctaatggactacggcgcgcgccgtccc

SEQ ID NO: 752 - DNA, 594 bp, Zea mays
  Probeset Number=SeqID_15155
ttagtatatttaatctatttaaatatgtagaaagcatgtcacttatttctctaattttacaacacaggattcatgtctttcgtttcgatccccccgcttttccgcgaatgaaactaggaatcatcaaaggcacggcaacacgattccaattgtataattattcggccctatccatcgaccagccacgatcagttaccttcatcggcggattcttctcagctagcacgcacctcttcgctttcggtagccgccggctccgatctataccgaacccgcaccactctccagctcgcgttcggtcacaaacggagtatccatcggcacaagaatatttcattcgagcgagtgcgatctcaggtggccggggctagctggagtagtcgatctcattcccgaccgtgcatgtttatacacgtacgatacgattaaacccgggaagtggccgaacgcgatcggttctctgttggtcgcgaatcggatcacgtcgtcgggttctgaagctagctagatgcagccatcatatcgacggtacccaagcaacgaaagcagcataataacgtgcctcccaagcatctcggttcattcatcagccat

SEQ ID NO: 753 - DNA, 1744 bp, Zea mays
  Peptide Sequence Number=SeqID_12896
  Probeset Number=SeqID_15156
atcgagagccacctgcatggtccggtcctgtatcgtctgaagcgcaacggagtgaattccaatcaaaggatgctcggcgcggttctagacgagtgggctatactcaataggcaaacggtatgtcccgtctaatctgtccctacaagccgattgatggaaactcaccatctcagatcctccttcgatcaacctttagctatttcgatcggacctatctgcttcgccaactacacacttccatcaacgacatgatgatcagccaatttaggagaacgatttttccctcgaccaaggagcagcagcaagactccccgggtgagatgctcctcctgggactgtgcgagctggtcgatttcgaccgcaaaggagatagccgcaaagacgcagaattgaccaagcgatcggttgcactgctctacatcctgagcgtctacactaagcttttcgagcccctctttttggtgaaaacaagggagttcctcaaggacttcgcgggtacccgtagtgcctccagcctcaaggaatacatcaaagcctgtgagaaactcattcaagatgagcgagtcaggttcttgcagtacaacctggagagcacgacccagaagcagatgatggagattgtccaccaggttttgattcacgattacaccgacaagctgttgaacgagggttcgttgacagaacttttgcgagagcacgatgtagcgtcactcaaagcattgtacgatcttctgcatctcgctggcatagaaagcaagctccgcgtgccgtgggcgtcgtacgtcatgtcaaccgcaaagggcatcattggcgacaaagagagaggtgatcaaatgacggtcaggctcttgaccctgcgccgaggcctagatgtcatcatccgagacgccttcctgaaaagtaacgaactcaaggaggggatgcgtggcgcatttggaagtgcgatgaacgacaaagcaactgcatcttgctggagcactggcacctccaaggttgctgagatgattgccaaacactttgatttgctcctccgaggtggcctgaaggcgatcccgaaagagctcctctctgatatccaagatcgagcagtcgccgagaaagaaggcctagcaagcagcgcagatgaggatgctgaactcgacagacaacttaatcaaacgctggagctttgccgtcatgttcatggcaaggacactttcgaagcattctacaagaaagatctggcacgccggctcctgatgggtcgcagtgccagctctgatgccgagaggaacatgatcaccaagctaagagatgaagctgggtcgtctttgactcagaacattgagaccatgttcaaagaccaagagctcgctaaagaggagatggatgcgtttagggagtgggacaggaacacattaggcaaaccgagcgaccttctccatgtcatggtactgtcctctggcgcatggccgacgtatcccgacgtcaacctcaatcttccagataatgtcgcgagtcagcacgagaggtttgataagttctaccagcacaagcacagcggcagggtgcttacttggaagcattgcctcggccatgttacactcaccgccaacttccccaaaggtcgcaaagagctcttcgtctccgcgtttcaggcctcagtccttctcttattcaacaccgttcctaacgatggctttctcagctacgacgagatcaaaactgggaccaatctccaggacgctgatctcgaccggacatt

SEQ ID NO: 754 - DNA, 807 bp, Zea mays
  misc_feature (800)..(807): n is a, c, g, or t
  Peptide Sequence Number=SeqID_12897
  Probeset Number=SeqID_15157
cccccccccccccccatgtccgttttaattttaccgtcatcctgtttatattgttatctgtttattttcagttgttccataataatacatgaaccatgtttatatacttattatatttatatgattcatatgctttgtgttctcatgatccatattgtcatggatatatttgagatcacgatttctatggttaattatcttttatatgtcatcatcataatgttaatttatggaattaaaatgatatggaaaatgcctataattctaacatctgtcaccactactttttgtcctagcagctgaccttctgcaatctatcattaataaggcaaaatatcttggtctccttcggctccctattcagaatggttgtggccaggacttccccattatccagtatgccgatgatgcaattatggtgatggaaacctgcccaaagcaactgtttttttaaaagcgatgctaaactcctttgcagaatctaccggtctccatgtcaactatcataaatccaacatatatccaatcaatgtgtcaagccagaataaggagctcctggtaaacactttccaatgccagattagaacccttctgttcacatatttgggcctgcccatgggtctaaacaaaccgaacctataagcctttttcatgttgatccagaaaatggaaaggagactagcatcgacatcccactttctgtttcaggtcggccgactggaaatggttaacacagtattttcatccctcccagcatactacatgcatgtgcacacttagaatccccaaagtcgtgatcnnnnnnnn

SEQ ID NO: 755 - DNA, 698 bp, Zea mays
  misc_feature (1)..(97): n is a, c, g, or t
  misc_feature (698)..(698): n is a, c, g, or t
  Peptide Sequence Number=SeqID_12898
  Probeset Number=SeqID_15158
nnnnnnnnnnnnnnnnnnnnnnnnnnnnnnnnnnnnnnnnnnnnnnnnnnnnnnnnnnnnnnnnnnnnnnnnnnnnnnnnnnnnnnnnnnnnnnnnnggttagtaacagctagaagggcaagcctggtgcagtggcgagagctattttactgagtcagcaagtcaggggtttgaagcagcttctccagatttgcgggggaaaggcttgccttggtttatcactttctcagattccactcatgtgggagccttcgatcgggttagctcttgatgtagttgaccgcatgtgtaaatccagttctgatgtgccaattgaatcatttcacccaatcatacatgcttgtgaacaaagatgtgaacttcacatggcccgccccatatatgatttgatccgccaccacaatttgaaatttaaaagcaaaacattcagaagcataataagtttatttgtaaaattgaaggattttgaaggtgcttacaatatactcacagacgctgaagaatctggggagatatcaaccgtaagcctgtataatgctataatgctagggtattatagggagaaaaactacaatggagcacaaatggtcatgtctcaaatgcagattgctggagtaaaaccagattctgagacattcagttatttgatagcgaattgtgagtctgaagagacatttctaagtactgtgaccaattan

SEQ ID NO: 756 - DNA, 648 bp, Zea mays
  misc_feature (648)..(648): n is a, c, g, or t
  Peptide Sequence Number=SeqID_12899
  Probeset Number=SeqID_15159
taggtgctctcagtagccatgctggaacatatagcattggagcatatggttctggaagtggaacatatggtgttgtgggtagccatgcctcctaagattcaagttatggagcaccccattcacaacgacgtcattcggtttgcggacctatttatgatggtagccataactcagttatctcaagttacaactatttgcctcgatgtgtgtaacaccctgaatttgggggtataagatttctcttctaatatccaccaaattcatgtgttaccgtctcctttctttgctttccttctctttttttctaaataaagatgagttattttgttatattggtgtaagcctagtgaagtgagccctagaggcactttggttgttgcattcatgacattgcatagtgtttctatatgaaaaggtgtttgaaacatgttaatatgtctcgtagaagtttccggtaaattttcatatttttctgaatattttatattttttcgaaattcaaaatatatttatttgaagtacttaaaaacacttttcaaaagttctaaatatgatttttgagttcattgggtgccaaatcatgtctaggaattttttttctagaatttttggagccttcgagatatttttcgaatattaaaaacgatn

SEQ ID NO: 757 - DNA, 548 bp, Zea mays
  Probeset Number=SeqID_15160
atcaattgagggcctactagcttactactgctgccttagtttcctttttcatgaatacggttacggtgggaaggtcaaattctgttgtgtgttcatgcatcagctgtgctcctggctggcagaccttaataaccagtacgtgtttcgaatctcttatgtttatttctgggaactgacctgtgtttatatatgtttggacagtacgaactgaaaaacaagagtaaagaatttccgtgagatgagacgtacgtaaggataatccccaagacattgctcaatctgtttctctctccttttttttcggcgagcagtttgtccttttttttttcaattttttactactatctccgttctcgaatatttgtcgtccgctggcttatttttgaactaaaacacgacaaataagaaagaatggagtgagtagtagtttagtttcatgtagctagaactctaacaccctcctggatccttgtgcagagaatgccgcggtgatgattcagtttggccatcagatgcctgattacgactccccggctacccagtcaacc

SEQ ID NO: 758 - DNA, 611 bp, Zea mays
  misc_feature (611)..(611): n is a, c, g, or t
  Peptide Sequence Number=SeqID_12900
  Probeset Number=SeqID_15161
gcgtgggaggggtcggcttgtgtggagtgtgcaattagaatcttatcttattactactagcgaagtggttgcgcagtaacctgccagtttcggacctagtgtagcatgttttggaaatttgctgctaatattcctgtgattattttggagttgttgtattgatgctcgattcaattcattttggccctgactttgtttaaatttaaacgaagggtggtgaaaaaataactggcctcctttcactgtgtactattggcttcactgtttcagtggttccttctgggagtttttatttttattattatctttccaactctgcttcctaggagcacacgagtagtcggaagcatgatttgtgcactatatgaaggcctacgtagggctgaaagttagcagatttctgatctagtaaactggtttaactgcagcttatttgtttgtactgcagagtgagatgtcattaaaggttgcagtttgtttcagtgtgaacttttgcttcaactaatatggtgttacatccacaaatatatatgctgaaaatgtatacttaagtcttggtttagtactcgaaacatggctttagttgcagactgcaggtactcatggatgan

SEQ ID NO: 759 - DNA, 500 bp, Zea mays
  misc_feature (374)..(374): n is a, c, g, or t
  misc_feature (377)..(377): n is a, c, g, or t
  misc_feature (425)..(425): n is a, c, g, or t
  misc_feature (458)..(458): n is a, c, g, or t
  Probeset Number=SeqID_15162
tcaaataagtaaagtcttgcttgtccctcacaccataacatgactgatgaactactaaaacacctgcgaggtctgtcagcgtagcctcctcgacaccttctgcttctgctaactccggtgcaaggtacgccgctgccatcccaatccctacccccaggcaagctttgttgattgctttctggttgttgatttctgagctagctatttagaagtcaaaaatttggtgaaatctgattaaccaaactacctggttagaaatcaaattggatgaaatctaattaattttgatatgtgtctcctgagttcaaggatgtcttctacaataattcagccaagaacaagaagcgctaattggaatccaaattgtttgatgnggngatatgatctggaacttggaccatcttttatgctttatgggggctaanaagcataaagacctgtccgaggcaattgtatcncaacataatcagtttgatggggctccaggagtttgtatcatc

SEQ ID NO: 760 - DNA, 570 bp, Zea mays
  Peptide Sequence Number=SeqID_12901
  Probeset Number=SeqID_15163
aacacctcccctgcgttgctttaggcacacactcgtcgttcccatgttgtgcgctcctctttgaccaccaacacctaattcctcaccttgagtcctcgacctttaccgcaacctcctagatgagcgctgggacgggtacgacatggccgcatgggcaccgcagtcggggtgtgggcgaggccacattgcgacgacaattgtgtggggaaaatggtgggctggtaataacaacaaaggaggctccgtcatccttaggatccataattgtcgcaccatcttcactgcacattagctacaaggtgcaagcaagaataaagatatggcttcgttgacacttgttcttaaagtttggcatggatgtcaaggatcattctgcttgtttcaacaatcataggagtgagcataacttgtcagataccctcccgcattaagcttgtgacacacttctaaaattgtttaacaacacttgtacttatatgcggaagatgtaaacattattgtttgtcttggctttccaaaaccctaaatgttatgctttgaacaatggatgtgaatgaagtaccatttacc

SEQ ID NO: 761 - DNA, 599 bp, Zea mays
  Probeset Number=SeqID_15164
agctcaccctcgtgcctgctctctagtccatgcaacctcgatgtggctcaatgacctatgcccatgcccgatgtggtcaaccatcatcgtgacaccatcaggttcctggtgccctatgtcaattgccccaagtcgtgaaattgagttcccctacatagacaatctcctcttgttggtgttgatttcctgcaacgacgtcgcatagaatgctttcaaccctcgacggaccatgcccmggsttccatgttccatgtcagaaccctaagacgatctttgtgagtccctacgcttgatcccctacacccagctggtcgtgcctgcccttactcgccaagccagcgtccagaggtggaataagtaatatttgcaagctacccctagcgattacgattaatagtgtagctagcccctaccttaatttctatytgtaaaaatattatttggtataaagctactagcctcataaaaatgtgatcaagcatttttaactgctatttcccatcaattttatatccccgtaatttatttgaattatgtttattataaacattttatatgtagttttctgaacaagaaatttgaaagaaatgaaaaccctg

SEQ ID NO: 762 - DNA, 633 bp, Zea mays
  misc_feature (208)..(208): n is a, c, g, or t
  misc_feature (239)..(239): n is a, c, g, or t
  misc_feature (633)..(633): n is a, c, g, or t
  Peptide Sequence Number=SeqID_12902
  Probeset Number=SeqID_15165
agctgacaacggcatacgtgcggttcggcaacagagcaagaagagaaccagtgtgctagtgctacagctacggcctagctacctactacggcgcagctagcaacggcggccatgaccgacgggcgcgaggagagcaccagcagcaggtggcccgagctggccgccctgcgcgcgmtggcgcgcgacgcggcggcccggrccgggaggnaagacgkcggggtggcgcgggcgggascggnaaggaccaccgccacgggccacggcaagacggccaaggtcatgcacctgctgctctggggacccaagtkaggtgaagcgctgctgctgctgcacctgcctctgcctcgtggcccgcgcgcggcgtcctcgcttccttctccgcccgctgcccgcacgggttgtacttgtacatgtaccactgctagactagtacttctgctgtgcctgtaccatagtactgtgtattgtattgtacgtgctagtagtaaaccgctgccttcttcctcctcttctcttctctcccccaccactmtgctgttttgctcctcctmgtcgtcatcgtcgtcctcacgtccgctgtgagttgtgacctgtatgtaattaagccatcatccaacacgtctaatccccctn

SEQ ID NO: 763 - DNA, 644 bp, Zea mays
  Probeset Number=SeqID_15166
agcattaatgtgaaatatacagtgggccaacatctcctcgttaactagcacgaatgcattgatatcggtaaaaataaataaatctagataaattaaaatgaaccatcgttaatttcacacgtcatgtgtatgcatgggctgacgtgtaccctagcggaggcgtgttctatgctaagtgtgtgagtcacttgacaaatgtttttttcaattggaactaattactatgttctttagttctagttatatggactgatactaaaggatcctttaataccgattggtggatccaccagcctgctcaagggtccaaaagtgtaaaaattaagaaaaataagaacctagaatatcacaagtcacatgatttttttacggaatatgcacgcacactattacaaaatagttttatgcctgcggtaatgtctactttttacagacagtttcagttatcaaacgccagtaatatcttttcagacagttacttaagaaaacttcagtacaaatcattttctactggcggtttcttaagaaaaccacgagtacaaatccataatttgtacaggcggatttactaaggaatacgcatgttgaaattgatttctactggcggtttttgtaagaaaccaccactacaaatcattttatct

SEQ ID NO: 764 - DNA, 1132 bp, Zea mays
  misc_feature (1132)..(1132): n is a, c, g, or t
  Peptide Sequence Number=SeqID_12903
  Probeset Number=SeqID_15167
agctcaccgccacctccacgctcgaagctcctcccgaaccggccgcatcgtcgccatggcagccgccgcttctgcaagctccgtgaaggaagtgctgccgtctcccctgacctccgcctccgagccccctccccttttcgatggcaccaccaggttgtacgtggcctatctttgcccgttcgcgcagcgcgcttggattgctagaaactacaagggtctgcaggacaagattaagatagttgccatcgatctcgctgacaggccagcgtggtacaaggagaaggtttatccagaaaacaaggtgccttctctagagcacgacaaccaggtgaaaggagagagcttggatttggttaagtacatcgacaacaacttcgaaggtccatcgttgctccccgaggatcatgcaaagcagcagttcgctgaggagctgctcggatacactgacgcattcaacaaagcattttactcatgtttagtcgacagggaagatgtgtctgaggaagccgttgctgccttggacaaaatagaagacgccctggggaaattcaacgacggcccgttcttccttggccagttcagtctggtggacgttgcgtatgtaccgttcatcgagaggtttcagatactctattccaatataaagaactatgacatcacaaagggcagacccagccttcagaaattcatcgaggaagtgaacaagatcgatgcgtacacacagactaaactggacccgcagtttttgcttgagcaaacaaagaagcggcttgggattgcttaaagcctgtgaccaaggacgagactttcgccagaagcaccagcgtagtagatcggagctcgttttagtaggttgtgtgcttggatattacgtctggtcttcaataaggcatggccttctttaatggctgtgcttctgaaaataaataaactagttgtccaggtattatcgttgctttggtgacgtgtcgatgtcactgtatatatatgaatgggtgggaaagaatgatgatgtgcagtgtgttctgtgcaaatattgccgagatgaaggatcagtatccatgtagacattcatatattgctcatattgtgacacggcgcatgaaagacatggtttcggcccctaccacgn

SEQ ID NO: 765 - DNA, 1083 bp, Zea mays
  misc_feature (1083)..(1083): n is a, c, g, or t
  Peptide Sequence Number=SeqID_12904
  Probeset Number=SeqID_15168
aactttctatctgaagttcaataattctctcgtcaactcagctcccgccagacaatagccaccacctccgacgccgcctcctcgtcctctttcgcctgaaccctagcctcgcatcggcccccgccaccgctcttcgtcggcatctgcggtgcggctgaacggccgcgatggacaggcacggctcggctcggctggccacccccgaggatgtcttcacggatttccgcgcccgccgtgacggcattctcaaggcactcaccaccgatgtggagaagttctacaagttgtgcgacccagagtataaggataccttgtgcctgtatggactacctaacaaaacctgggaagtgaacgttcctgctgcagaaattcctccagaactaccagagccagcagagggaataaacattactcgcgattcaatgccaaaggaagattggctctcgttcgtagctgtccgcagtgatgcatggttggttgctgtgggcatttcactttggggctctccacggatttgataaagacgccaggagacaactccacataatgatcaataatcatcccactgtatatgaagttgtgatagggagtggggagaagcaaccaaaagcccacaacacaaattacgaaaccaagtcaagttctatcaaggaacctagttctagcagcaagctagcagagcagcctctgccaaagaaggagcgacagatcatcaaagaagatggaggcgacaaggatgaagctttcctgtgcggtacatgtggagggatgtactcggaaaatggagtattctggatcggctgcgacatttgcgacaagtggtaccatggtgactgtgtccgcatcactcctgcggaggcaaagcacatcgatcagtacagttgtcccgcttgcagcaacaagaggaacatagagtgagtgagcatgggtcgtctgcgcccctggttgatgtagttagggtagtaagcactaatactgggctacgtttggcgcactaatcgtagtcgttgttactcgtgcttagtatgagtactaagtaggctcgcagaagctactgctcttatagtgcactagtggattctn

SEQ ID NO: 766 - DNA, 647 bp, Zea mays
  misc_feature (1)..(46): n is a, c, g, or t
  misc_feature (647)..(647): n is a, c, g, or t
  Peptide Sequence Number=SeqID_13042
  Probeset Number=SeqID_15169
nnnnnnnnnnnnnnnnnnnnnnnnnnnnnnnnnnnnnnnnnnnnnnagttgtagcctcgtcccacaccgtgaggaggataggagagagagaagagggccggccaccacggggactcatcacaactagtcggcatgtggtcagagtggttcaccagcgcatgaggaagaagcatagcttcacaacgaagagctcctgggggaaaagattcatcgccagcgatggtgatgatgccggagttcggcgcctggccgcgacctgtgctccgcgtcggtcgaccctacctccatcggcgagcgaggtcacgagttatctgaagagcaagttggtacctggaatctcaagtgccaggtcaagaacaggtaccacaggatgaggcgcatggaggatattgtgacgagttcgtgagaggactaggtcgtcgtctcccagtcaactttgggttgctggaccgttgtctccttatatgtaattatttatttattttgtatagaactcctattatatagtaaagatgtgacattcgatcatgtgccatgattcatcatatgtgtgagacttggtcccagcacacctggtgattatttcgcgcctgggttttggacccctaaaacccgggtgtgacagatatgaagtgatgtgattggtn

SEQ ID NO: 767 - DNA, 756 bp, Zea mays
  Probeset Number=SeqID_15170
aagtctgttgaggtcgtccgtctctaaaagctctgcactgttggtccgtctccaaaatatggctacggggatggctaagctgaggcctgacttctgtgatctagactcagtcacggaccccgccgaagcgcatcgattcgccgaccgcctgtttgttcccctcgtcgccgcagcacgccgccggccgacggtctggctgctccgatgggctctcccacacggccgcggaggacgaccggccggtgtcactctcctcttgaatcctgatgctgctgttcctgttgccactcgcgtcagctggtacggacagttgccggcctattctgacagctccatcggtgttgaagccaggtcacagaaagaaccacgatatttgggcccttgaattgagttcaagcatgatggaggattgtgaccgtttgattttaatgttgctggattcttggatacaaattgtgtggtatacgaagattggactacctgaatggacaatagaatttgaagtgtagccaactttattttgatcgttcctatatagaacattgttggaagccttcttctccgccgaaggtcctcaaggcaagaacaccttcgataagataatacgaaggctcgccgaaactatcatgaacctcagctttgttcctcgagactaagactttgtgtacaagcaatgttgcggaatgccgaagctcaatagcttcggctcggaccaagcaaagaaataaatgactaaatagaccttattagctttgt

SEQ ID NO: 768 - DNA, 1279 bp, Zea mays
  misc_feature (1279)..(1279): n is a, c, g, or t
  Peptide Sequence Number=SeqID_13043
  Probeset Number=SeqID_15171
gatgagtgcatacagactaatcacctagtagataggataggaaatgggtatggattacgtattagttgctgttctgtttgcgagcgtttcgatcaaaggctaccgccgggatcgaggggcttaccgctcgtcggagagacgctggagttcttcaccgcgtcaccgaccctcgagctgttgcccttcttcaagcgacgtttggagaggtaatgaaataatatatactatagattaagggatcgagaaggaaataaataatacaaaacggaaaggtccaatttcgacatgaaagtttcatactttcatgtaaacatagcatgatatggaacaacatttggaaaaacaaatctagccatgccatgtcctaggtaaagaattccaaacccgaaatacaaaagaaaaaaagagtggatcctgcagatacgggccgatcttccggacgagcgtcgtcggcgaggacctggtcgtgtcgctggacccggagctgagcaggcgcgcgctgcaggaggaggagcgggccttccagatatggtacccgccgtccttcctgcgcgtcctgggcgccgacagcatcgtcagcgcgctgggccctctccaccgccacatcagggcgctcgtgctccgcctcttcggccccgagagcctccgcctggtgttgctgcgtgacgtgcagcggagcgcgcgcaccgagctgcggtcctggctccggcggccgggcccgggcgtcgatgtccgggcggccacctcaagggtatgtcgtccgtgtgtgcatagtctctcggcgttcaacccatggagatggaagggtcgtactgtcgaatcagctggcggctccaaggatttcatggcctttggagctggtctgcggctatgcgttggtgccgactttgccaagcttcagatggctatcttcctccactgtttagtcaccaagtacagatggagagagcgattagcggaggcacaatgatgttctacgcaggactagggtttccagacggttttcatatcaagcttcttcccaaagattgaagtgtgataactgacaaagctataagagcattattcgtgtgctcgctagctagcataccaacccaactgtcagctcaattgctgtttctaaatgctgccaatgcgttgcgtgctagctagattttgtgttgtaaatcaagccaaacaattgtaggggcttgctagtctgatgtttatgactatactgtagttgtgattgtagactaaattgtacttggaacatttgcgttgtgttgcttcatccttn

SEQ ID NO: 769 - DNA, 1314 bp, Zea mays
  misc_feature (1)..(41): n is a, c, g, or t
  misc_feature (1314)..(1314): n is a, c, g, or t
  Peptide Sequence Number=SeqID_13044
  Probeset Number=SeqID_15172
nnnnnnnnnnnnnnnnnnnnnnnnnnnnnnnnnnnnnnnnngcggtccgcaactcctctaaacccttcctctccctccggcgccggcgccgacatggccgtccactacctcctccgccgcggggtctccggtggctcactgctccaccctatccgcggtctcttcctcgcctccaaggagcttgggaggcgtccgttgggctctgcggcggcgggagacgcagcggccgagctgaggggcgcgcgggaggacgtcaggcagctgctcaaggccacctcctgccatcccatcctggttcgattaggttggcatgatgctggtacatatgacaagaacattaccgagtggcccaagtgtggtggagctaatggtagcttgagattcgaagtcgagttgaagcatggggccaatgctggtcttgtgaatgctctgaagctgatccaacctatcaaggacaagttttcaggtgttacctatgcagatctgtttcagcttgccagcgccacagccattgaggaagcaggtggccccaaaattcctatgatctatggaagggttgatgttattgcccccgaacaatgcccaccagaggggaggcttcctgctgctggcccaccttcacccgcggaacatttgcgtgaagtattctacagaatgggcctgaacgacaaggaaatcgttgcactgtcaggagctcatacacttggacgtgcaagaccagagcgtagtggctggggtaaatcagaaacaaagtacactaaagatgggcctggtgcacctgggggacaatcttggacatctcaatggctcaagtttgacaacagctatttcaaggcatcgaagaaaggcgagatgaagacctcctagttctgcctactgatgctgtgctgtttgaggattcctcattcaagatctatgctacaaaatatgccaaggatcaggacacatttttcgaggactacgctgaagctcatgccaaattgagcaatcttggggcaaagtttgacccgccaaagggtatctcactcgagtagttgtggatggaggtgactgaacaggaaggggtcatgtttctttgcgtgaccattttcgaaggttggcaaggaaaagttattgtagttgaatgatagctccacaaattggattcaccgattaaaggattttttttcttagcgtgccctgtttttttagtagtgtcctacactatgaataaagcaacacctgtcattttaagatttgttacactaactaactgaaagcttccgaatcctaagtggtttcggtgattaatgacgacataagaccgttataacn

SEQ ID NO: 770 - DNA, 843 bp, Zea mays
  misc_feature (842)..(843): n is a, c, g, or t
  Peptide Sequence Number=SeqID_13045
  Probeset Number=SeqID_15173
attcacacgctttggaactagaacaactgctgttggaaacctcctggtgaaatctcaccctattaataccatgctgatgagccaatagcagaagcatcacacactaatcaacaagcaggaccagctagctagctcctcccactgctatcacccgggccccggccagccatctcgctgaaagagaaaagcgcagccatgaagactactagctcgggcattgcagtcgtcctcctggtggcgatgctggcagtccagtccgcggtggccgacatctcgtgctccgacgtgctcaacgacctgtcgccgtgcctgcccttcctgcagggcaaggcagccaaacccagcgagagcaacaaccagtgctgcgacggcgtgaggaccctgtacgcggcggcggacaccaggcccgacaggcaggccacgtgccggtgcctcaaggcggcctacgttcaggtccacgctgtgctctccgcggcgcaggagctgcccggcgactgcggcctctcgctgtcctacaacatcacccccgacatcgactgcgacaagttccaaagcgaagaaagtcttgcttcaccttcatcaaacaggaccaaaaatgatcgaatgaagggatactgttcccttaccagaatccatacgacgggatggtgatgttcagtgccctgctagcagtaggctgcatctgcactgagtgactagaataaaggatttggtgatgtttgtgctgattggtgtgttcgcctgtaatcgtgtgatgccgtcgttggcttcttatatccgtgtctaatctcgcaagtgctcgtgtttgcaactataccatttataatgtcaacttatcatgnn

SEQ ID NO: 771 - DNA, 761 bp, Zea mays
  misc_feature (761)..(761): n is a, c, g, or t
  Peptide Sequence Number=SeqID_13046
  Probeset Number=SeqID_15174
aatgaaggaacagtgcaagtaaattaagctgcggtgcggacttgagatccagtgacttcacccggccggcgtccgcgcgccaagcaagcaaagcaaaacaacaaccacagcaggccgcccggccggccatggcggcgtggatgcggtcgctcttctcgccgctcaagaagctctggatccgcatgcattccgcgcacagcaagagaaggggcatctacatcctgtacgaggacgtcaagtcgtgcccctgcgaggacgtgcacatcctctggtccatcctcgtcgactcgtcccactcccgcccgccgccgatgcgcctagaccatcactgactcgctcgctcgctcgctcgtccctccctccctccctccggccgccgcgcccaccccgtcgaccaagaccgacacaaggaaactgtcggccggtgtgtgtacatacaaaaagatgacgaccagtgccggccggtatagttcaccttcttcagccgtgatacgtggtctgtgtttgatccacggagatggtgtgcgtcgtaggtgatgagctcctccgttcatcctgcgctgccgcctcttccgtcctccagaagagcaggtgcagagcaggcgtccctctccctcaccgacactgcggagcggtttttttcttccttttcctttctccttcttcgctttgttttttggaaaagggacggcacggtctggtgatcaggggtcaatgggccgcgtgtgcatctgtctagcttgtaaatacaaaagacaaan

SEQ ID NO: 772 - DNA, 646 bp, Zea mays
  misc_feature (1)..(45): n is a, c, g, or t
  misc_feature (646)..(646): n is a, c, g, or t
  Peptide Sequence Number=SeqID_13047
  Probeset Number=SeqID_15175
nnnnnnnnnnnnnnnnnnnnnnnnnnnnnnnnnnnnnnnnnnnnnggagaagttcgtgagcgatccaaatgggcagctcaccgaaacgctgagcctgaaatcgccgagcggcgcgacgtggctcgtcgacgtcgcaaggaacgccgacgccgacgagctgctcctcgggtcaggatggggcgacttcgccagagcgcacgagctacaggaggacgacctcgtggtcttcacgcgcggcggcggcggcggcagcggcagcggctgctccttcgacgtcctggtcctggactccagcggctgcgagaaggcgccctgtttcttcgccgccaacaaggtgcacgggcgtttcagtggcggagggcgtcgacaggctgcacgccgccgcgtgttccgtggtccggaaccggaaggcctgggagcgcagctgcgcctcgctgcggcggcggcgtccacgcacggggcatctacttcgaagcagaagtgtggcgagactgataaaccaagtagagcagagagatttgacattatgaaacgcgacgggtgcggcttcaacgaaatagaggctcaggcgagggtttctccattatagaaaagctgggcatagccaacactctaaaatggacatgtcaactctattaatggattn

SEQ ID NO: 773 - DNA, 1324 bp, Zea mays
  misc_feature (1324)..(1324): n is a, c, g, or t
  Peptide Sequence Number=SeqID_13048
  Probeset Number=SeqID_15176
acaaacggagcaactgcacgctcagcctcatcctgcgacctccctctccacgaaaatggttgcaggtggttgctccgcctggccccacctgctcctcaccacactgtcgacgtcttccttcccatgccactgcctttttccttcccatgctgtcgtcgtcgctgcacacctgttaggcgtgttccgcctctcctctctatagctgggcagctgagcttctctccccttggcttcacatccgctagcgagccgtgcctccaccgtcgcctgctcggaccggtgggacccagctcccccacgtggtctcgtcccatccattagcccggatctcacgtcccgctccctctgaggacccaatcgtcttcctccttcgccgtcgccgggaactcgtctccatgcttcactttctcaaggtgagcctagggtttcttctctgccgcggaatgcatggatgaccggcgtggatggcgccccccaatctccatgccccagcgcgcgctccggcaaacgggaggcgaggccatccgcgcgcgatggcgctggacccgtgcggcgacctcgtggtgacgccgaagacggcggccaaggacaaggcgtcctgctccgtgcccatgccgcccaaggtcacccccgacgaggtgtgcgcagtggcacgcaagttcatggaccagcctatccaggagacggagcccgacgtctgggccgttctcaccgccatctccaagaaggcccgcctccggccctagatcagcgggatgcattgcaagatatatagggacactgtcttaggggagctgaaccaccacgagcctatgcctgttttcctcaaggacacaagcgagcgcgggttgcgtcgcaagaccatacagtccggctctgggaacctctgcgttcacagactacaaggcactttccctgataacacatatggtgttgatagtggtgggaacccaaatgaaatcccaaaacttacttttgaagattccaaggagtttaatattaagtattatcatccaagcaacgctaggatctggttctatggtgatgatgacccaaaagagcacacattctaagtggttgtccccactgtactcagtgctcaggaggagatgttggcaacatggaggactttgaggagttccaggactacgatgagttctagtttattttagtggcaaacccccagtcagctgcctgtgtaggcttatcttctacgtttcgtttctctgcactttaatattaatgttgaactctatagttatgtattagactctatggatgtcttggacatcttgatgtaattaaagtacctttctgctatttn

SEQ ID NO: 774 - DNA, 1062 bp, Zea mays
  misc_feature (1062)..(1062): n is a, c, g, or t
  Peptide Sequence Number=SeqID_13049
  Probeset Number=SeqID_15177
gaaactcgaaagggacaaagcagcgagcggcgccgggctccccctcccttcctcgcccctgatctacgccgatcgaaggccgggcggcgatgctttcttgcctgcacctctcggtccaacacacagattagatcagcgttgaagacgtccgctgctgctccctgtggctgcggttttgcagcataagaaatatagctacacacagctcaatgcttgtcaggatcgatggcagatagggagcatcgaacagtatttgtcacggtggggacgacatgctttgatgctcttgtcatggcggtagattctccagaagtgaagaaggctttattgcaaaaaggttatagtaatcttcttattcagatgggccgaggaacatatgttccattgaaggtctcaggagatgctacccttcaagttgatcatttcacattttcaccaagcatcgctgacaatatgagaacagcttccctagttatcagccatgcaggttcaggaagcatatttgagacactgcgactcggcaaaccactaatcgttgttgtaaatgaagatttgatggacaatcaccagagtgaattagcagaagaattggctgaaaggaagcatctcttctgtgcacgcccacaaacattgggagagaccatccgggcaatggacctagagacactggttccttatgagccaggggatgccaaaccagtcgtcaccctgatcaacagatttcttggatttccagttgactgacgaataaatgacgatgtctccgttagggcctatccggttgttcttcaatccatgtggatttgcattcggatggcttttaagtctatattggtgccaaattgttgcggaaggcttcctgctcttgaattttacaaccggatttgaatcagatgtgtttgtagcagtatttgaaggaggaactttcttcaaggattatgttgttttattgcctaatatatagtgctattgcgacttcattatgtactttgtggatgtgtactgggtttcatgtacctaaatatccttattttgactagttgtctgttacttggtcttatn

SEQ ID NO: 775 - DNA, 2227 bp, Zea mays
  misc_feature (2227)..(2227): n is a, c, g, or t
  Peptide Sequence Number=SeqID_13050
  Probeset Number=SeqID_15178
gaattcctcgttcgcaagcagtcgtccgcgtcgaatgccccatctcgcccccggcccctcctccccacctaggcagcttccgcctttagggcaaccctagccaaatccccaatcccaccggccaccaccacatattccttgtcgatgcgactcccgccgcaccctcgctagccacctcctctccgtcgtcgcagcaccgtagctaggccgtggtcgcatcgttacatcctcccaaccgaggcaccacagctactcctcctcttccccccactgttgccataagcaggcgccagaggaggcatgcactgcggcgaggcatggagacggcggttaaaccctagcgagaaagctcggggtgaggcagcggatgctgctgtaggtcctcgagggccggctccgccgcccgcgcaaggcgctcatcgacctcgtcacgcttctcgtataaataaacagcaaccccctctcaatccaaatccaccaagcccactcctctgctgccgcattccaacccattcccatcgtcttcaacaaccaacccagcgccaccagcagcgccatcagcaggagagagatcgccggagccatgacaaggggcggcggaggcgacatgaagtccttctaccgtcagcagaagacgcacgccgccgctgctgccgccgccactaccaagcccactggtggcgtctccaagaaggcggcggcgcaccaccacaagaaggccgcgctcgccaccaacgtccacccagccccagatcacggcgctggcagccgccggaggcggaggcggagcagcgagagagggcgggccgcgagttcgacatggacacgcgctacgggccatgcctcgacgtcacccgcgcccagykgtggcgccgcgccgacgaacagccctgcctctgggagggtcgcgtctaggctactggcgggatggacattccttccccgcgtttcgccgacatgctccatcagtgttcagtactagctctgtgttggagatgcggtgtcgcatccatccgttctgctcccgtctaccgcatttcgtggtagcagtggcacccgtagtagtaccatctgtgcctgtcacaagaaggagaaaccgagtaacatatttgtcctgatcaccgtaaaaaaataggcatgttctgcacaaaaacgctaatgaagacgtaccaatgggatcttggttcatcggattgtacgtcgatgatcgccgtctttgctgcagcaagccaccgggtatacctgacgcctttgtgcttgtttgtttagcatactagacttagttgcttccaagttccaactctgtcggcggttggtcttttgcatgcagcgtgcatgatctgtttgtatgaattatttcgggaaatgagactatttcaggtagttgatggtcaccttgaaaccttcagagagtaggtgcgccatcagctgtcagtaccatgtgcttgtcaacattgtttgtgttgaccatcttcatagtatgtcatgacatgagacatctaaactttccttttgagtgttacacctgtggcgtgattgaatctggagctggcaatatccccaccaaaatgaagaaacattttacccgagaatcatagtggcaaagacacatcatgtcctgtgtgttcgagcgcaagaccagcagagctgtcagctgaaacgattgcgaatggaaagacgcaggcaggaacatgtgtgttgcatccttccactggagttgcagtggcatctgcaaatctgctgattggatcagtaaagtccatcaacgttgcgtgagagtgagaatgcacttttgggctgtgattccattgcaatggcatctgtaactgataagaaagctaagatggagagtttaatatcttctgcggcctttgtggagggtggcattcaggaggcatgtggtgatgcatgcaacatttgccttgaggttttctgtgagagtgacccttctgcagtgagtagccattttgttagttgagctattttatatataaatgttatttctgtaaccaattacttggagttcggagtgtttttcttatgcaggtttggtgtatccttctcagtgacaaagtaccttttaaaatgcactgccctgtacactctgacatgcaagacaatggtatatggattggcttatttatgtatagtgagtcatattttgataggtttttggtacagacttatttagttaaaaacttatagtgacatctgtttgattttttan

SEQ ID NO: 776 - DNA, 1095 bp, Zea mays
  misc_feature (650)..(650): n is a, c, g, or t
  misc_feature (1095)..(1095): n is a, c, g, or t
  Peptide Sequence Number=SeqID_13051
  Probeset Number=SeqID_15179
gcacgagaccattacctagaacatcctaatcgaaaagacagaccccacggcaccgcacctgctcggcacgtcccgctatataaccgcttgaagttcttccgccgccacgtgctcgctgccgtcgctgcgccgcattcgcatcaccgcatcgcgccgccgaggctgcttactagacggacgaggagtggactggagtaacttgcagcaaccctatcccggcaggtcccatcgcgaaaccctagacttcgccgccggcggtcgccggagatggcctcctcgccgccgcgcgccccgcagctattccctttcgaccttaacgtcgcgcaggaggaggtagatgaggagccgattgaggttcttgaggaggatgtcgatgaggagggagccccgttggcgcagcccgaggaggttgtcgtcgaggaggtcgttgagaaattggtcgagcacgcggtgcctaccacggaggatgaacctgcggaagacgtgatcatggaggagccttcggaggaggtgatcatggaggacgaggagcctacgccgtcgccggcggaggaggtggttggggaggggaagaggaggaaaaagagggtggactatgaggtcttyrtgtccgcctgkataaggatacgaagtccaaatcctcatcctanccggttccctacttccctcaaaccacgtcctctgcaacgagcgcgccctacgcgacggcgttccctcggctacctctacctcctggacatgccaccctcctcccggcctccttcgcctcaaccctaaccccgcaccttcgaacccagatgattgttcatgagaggacgatcacaagatggataccacaaccgtgtcgtgagcaacaagacaaaccatgcagagaagaaaccaaaagggacatgcaaagacaaaaatcctgcagagaagtattaagcaacgaacagagcatacaagtgtgggggtggtgtagtgtttatctattggacgtagtgcagagctttacagttatttctagcttacttatctacaaactgaaatcttaactaaagagcttcctatttctgtatagtcatgttgatgaacgtgaataatgcaattctatgn

SEQ ID NO: 777 - DNA, 599 bp, Zea mays
  Probeset Number=SeqID_15180
gcacgagaccattacctagaacatcctaatcgaaaacgatcgagaatacccggaaggccggaacccacctgctgcgcacctgcaagcctcgagtggagctcttccacggccgcggtggagatggcggcgaatctggaggacgtgccgtcactggatctgatgcacgagctgctccgccgcatgaagtgcagctccaagcccgacaagcgcctcatcctcatcggtccacctggctctggaaagggaactcagtctcctattatcaaggatgaatattgcttgtgccatttagccactggtgacatgctgagggctgctgtggcgcaaggcaggctgtggaactggcagcatggccccataagcgttgctcgatctcctcatcgctactggatggagagcagttgggctagttgttagcggtttccctagtttctcttcctcctgtgttccccgtttcagtttgcttatagccccgaagactcttttctcccgtagtgtcggaatgccagggtctgttgcgtaactgggatccgaatgtaccctgctgtgttcatcgttacattgaatggatctgaatgaaagtgggttagattggagct

SEQ ID NO: 778 - DNA, 741 bp, Zea mays
  misc_feature (741)..(741): n is a, c, g, or t
  Peptide Sequence Number=SeqID_13052
  Probeset Number=SeqID_15181
actccaccaccaaaccgaggaagacgacgctcagccgctcaggaatcgaaggagcgacgaagctaaaggagggcgcatctaagccgaattgaagcatgagggaatcgattaatcgtccgcctacgccgagcgcggtggaggatcgggacaaggagccttctctcgtagaaatcattaacatcaagtttgtagagagtggagagaaggagaagctgacggagctcctccgcgagcggctcgttgagtgcggctggatggatgagatgaaggcattctgcagggactatgtaaggaagaaaggaagaaataatgtgagagtagatgacctcattcatgttattgttccgaaaggaagagcatcagtgcctgattcggtgaaggcagaactcctgcaacgtatccggtcctttatggctaccacacttcagtagtcatttaycgggacggttggagctacatgtaccattgtacgaacactgggaggtcgatcttgttggggaccaagggtgcaggtactatgagcatgaaaaggaacagtgtgatcttcatgatgccatcgacatgttcctcgtcagacaggcggttggcgcgatttcaggtgtagaaacacagagtaataatccccaaactagccctaaaggaaccttgtagcctgtaatgctacattgccttatcattgtatcaacagatgctttatttcacaattagaaaacagaaacacaatcttgatataaatgaccn

SEQ ID NO: 779 - DNA, 540 bp, Zea mays
  Peptide Sequence Number=SeqID_13053
  Probeset Number=SeqID_15182
aaaactggcgaagttttttgtgtggatgcatgccattcagctgcctgccaagacaagaatgagagatcgatgtgtaggcagaggcgcatgaatcgtaatttggagtaggatgcaactgaaattccggtccaacaaggtgcaggagaatcgtactcgtatgacccgacttggtagaaaacatgcaaggcgccattacaggctacaatagtgttgttttggtcgtcagggtggtgcttgtgcttcggaaggcaaggcagatcagtggcaggctcagcctgtacatgcatggctcagcgctggcaatacatatgagaatgagatggtgtctgtggacgagtttcccttttaaaatacagtaagaagttgatcgctcaactttgacatgttggccacgggtgatcccctcactccacctgacaataatccttggtgatgcaaagaccattgctaagcgttccttgcattgcatgcgaattaggctagattagagaatcatatcctgcttgttcggtcggaaacatgctaatataaacgacgaag

SEQ ID NO: 780 - DNA, 540 bp, Zea mays
  Probeset Number=SeqID_15183
cttcgtcgtttatattagcatgtttccgaccgaacaagcaggatatgattctctaatctagcctaattcgcatgcaatgcaaggaacgcttagcaatggtctttgcatcaccaaggattattgtcaggtggagtgaggggatcacccgtggccaacatgtcaaagttgagcgatcaacttcttactgtattttaaaagggaaactcgtccacagacaccatctcattctcatatgtattgccagcgctgagccatgcatgtacaggctgagcctgccactgatctgccttgccttccgaagcacaagcaccaccctgacgaccaaaacaacactattgtagcctgtaatggcgccttgcatgttttctaccaagtcgggtcatacgagtacgattctcctgcaccttgttggaccggaatttcagttgcatcctactccaaattacgattcatgcgcctctgcctacacatcgatctctcattcttgtcttggcaggcagctgaatggcatgcatccacacaaaaaacttcgccagtttt

SEQ ID NO: 781 - DNA, 1442 bp, Zea mays
  Peptide Sequence Number=SeqID_13054
  Probeset Number=SeqID_15184
gcacgagaccattacctagaacatcctaatcgaaaagcattctccttcttcttcatggtgctccctctgctctctctctgacgcgcgttgctccagctcgcccaaccgtcgagctcccccgcgcgcaatcccctctgctggccgtccctggtgccttgcttcttgctcgccgttccaactcctcctgccatggatcgtcaatccgagcttgaccaaatcggatctcgttcatggcggctcccccgagctctctctcccatgccgacgcgttctgctcacctgtgccattgcccagctcgcggcgctctcggcctgtttggccatggccaccgcgccatggagcctccctgctctcgcccctaagctcggccctccccctccattcatctggataccggtgctgctcgccgtcgagcttcctgctcgcacctatctccctcgctatttgcgccgtcgaagctcgccgtgccgtgcgctcgcccggctcgaaattcccctgccgagcaactcacctcagcccagccgcgcccatgccagcccctacgcgcagtcgcgttcgtccgctctatccactggcgcccagcctctgctctgttcctcactttgcctgctcggccgtagccgccgcgctgagctttctgctcgtgcccaactccgtggccgcgctttgctttctgcacgctggccgcagctcagagtttccctgtgcaatgtcacaaaatccgcttgttgtcgatgccgtgcttcgtgcatcgtgtgttcgatgaaaatctccagcctgtggacagcacacgcgcgagccgagtttggtttggccgattgttcggtttgcagtttgggtccgattggtgttaagagtttgtcgtggcgtggcaacgtcgtgctcatcgcggtagccgtcctggctacggagcaatctgcgccatagagttcacccagctacgatctcgccttgctccctgccgcactcacctcggcatggtccctatcgtcgtcttccaatttcagcagttctgttcagccctatgtcgacctcgctaaccacccatggttgatcctatgaggatggatcacagtttgagattgaaaaaggagcttagaaggtgtagataataaagccccagattgacgtttgccagatattcggtggaacggaagttcgtcgtcgttcttgtggattttggatcgatttggctcggtaagctgatttactatttttattaactgatctgatgaatggattggttgaattagttgtccgtaaagagtgttttattcttagcatgggtgcgtggtcgaggtattagatgtatgtcgtgatgcctcgctccatgcatcaatggagtgtttacatacgtatgaagtggttgtgtcacgctaaactcgttttaaaatgattattgtgtgaggattaatggcgtgaagaattggtttagtaatcc

SEQ ID NO: 782 - DNA, 881 bp, Zea mays
  misc_feature (881)..(881): n is a, c, g, or t
  Probeset Number=SeqID_15185
accagcatccgcctctcttctcagtgccagccgccgtgcgctcgctctctctgtccctcaaggccttcgccggcgaagagcgcctagtcacccaccagttggctgtgaagttgacaatgaaaagatggagctcctgctgtcccaactgagcggtaaggacattaccgagctcattgctgcgggcagggagaagtttgcttcagtcccatgcggcggcggcggcggtatggctgtggcagcagctggccctgctgctggcggagctgctcctgcagctgaggcgaagaaagaagagaaggtggaggagaaggaagagagcgacgatgacatgggcttcagcctcttcgactgagctgtgtgggcagtcatcacatcagagtagtttgttttgttttgacttttgagtcgtggaaccagaggaaaatcgtagtcgttgtttggactttaacctcgttttatgttggaaactagtttgaaaggctcctactgtctttaatatttggtaattcagccgtaggtcgacattgcctccagaggtttcctggctgctcactgttatgctgttacatgtcgacatcgcctcgttcatccttgcgtacgtgcgtggtaccatggaatctgttgataggaggccccagcgaattgtcagtaactactctcagaggctggctgtcggtattcgggcttgtggcatgattttttgcattgatataagcaaaccgctgcgaagttcatatcagctggattggatataaagatccgacacacacgattgattgcctccgataaagctgttcgatatttggagcactttcagacgagggaataagtttggtttagctttatgattgagtcacggatcacgaaatattttcttcacn

SEQ ID NO: 783 - DNA, 540 bp, Zea mays
  Peptide Sequence Number=SeqID_13207
  Probeset Number=SeqID_15186
acacgctacctaatgcatccttccttcctagctagctagtctccgttttccttcgtctctccctgcctcgccgtacgtctagctagttctagctcttcagatgattttgttggtgtgctttgcccgttcatggccgtacatgacttatatattggaagccgaagcaatggccggcggcggccgcggcaggcgaggaagaggtgaaagaaagctagggaatatgcctggctccctgtatgccactcgcacggctaccacacccccggtgggccgctgcggctggcgtgcgaggtgccaagcatggccctcatacatctctctctctcatttctcattaaggcggataagttggtgagcgaagtggatgcccgtcgccgacgccttgggggtgcgggaggctccgtccccgcggtacggatcgttccctacccaccttagggtttcgtctctataaatacacttgtaatacgcagtagatcttcacatcattgtaaatctcctgcgatctgtaaccactcaaaaaatagtgatattgttgcc

SEQ ID NO: 784 - DNA, 1499 bp, Zea mays
  misc_feature (1499)..(1499): n is a, c, g, or t
  Probeset Number=SeqID_15187
aagccttcgcctttttcctctcgtcttcctctctctcccccgctccaaatcccaccctctctctttctctctccacattctccctgctgtgcaccttgcagcagccttggctgtggatcggaaatggcaatcgacgatgaatcgccgctcagagtcaaccccagaggcggcgccatgggaggaggggagcgtgacggcgcggagaaccagcggtggccgccgtggctgaagccgctgctggggacgagcttcttcggccaatgcaagctgcacgcggacgcgcacaagagcgagtgcaacatgtactgcctcgactgcatgaacggcgcgctctgctcccagtgcctcgcctaccaccgcgaccaccacgccatccagatacggaggtcctcctaccacgacgtgatccgggtgtcggagatccagaaggtgctggacatcagcggcgtgcagacctacatcatcaacagcgcgcgcgtggtgttcctgaacgagcggccgcagccgaggcccggcaagggcgtcaccaacacctgcgaggtctgcgagcgcagcctcctcgacaccttccgcttctgctccctcggctgcaagatcgtcaggacctccggcgacttccgcatccggaagaagcacgccatcgtcgcaaagaagaagagggagaagaagcatgcgccgcagcagaagcagcacaggggcgcggcggactcggcggacgacgacgacgacgactcgtccaccagcaccagcggcggcagcgacaagagcagcgtggtgcagagcttcaccccgtcgaccccgccggcgacgaccgccaacagcttccgcgccgggaagcggcgcaagggcgtgccgcaccggtcgccgttcggcagcctcgtggtggagttctagacaaaaaaaaaggcgcgccgcccggtcccgatggacgcccaccaaaaaaaaaaacacagcggtacaccactgtagcatacgcacttcttctacataccatcatctataggcgctgccggatcgaccgggctacatacataagtacatagccagcccaaaaataggagcaagcaataaccagggccccacttgcacgccgcccgcgcttctggacggacgaggacgaggaggccggtgcaatgcggctcgtacggggcacggttacttccacttccatagcagttactgtgctggtaacaacggtttgggtttggtgcctcactgcctctctgaagggaaacgaggttgttatagcagttactcttgtcgtcgtcagcctcagccactactaagttttgcgagtttcacctataggtgtttgctagttttttttaccggtgcttggtatacgcgagtagaatgtacatgtacgtatactgtcagagatggggggaatggtggtaggggggtgtagctcccggtgttcatattcgtgtgttggcttgctgccctgtaataataataaaaataaaaagggataaggatgctgctcctggatggccttn

SEQ ID NO: 785 - DNA, 846 bp, Zea mays
  misc_feature (1)..(3): n is a, c, g, or t
  misc_feature (846)..(846): n is a, c, g, or t
  Peptide Sequence Number=SeqID_13208
  Probeset Number=SeqID_15188
nnnaggattggagtgttttcctcgtcttcaagcgagaagggtcttcaggacttgttttttgggcgggcgcagttgcggagatgcagaggctgggggatttcaggctccctcccttcttcaactaccctccttacttcactttgcagcctatgcgtgaaacacgggaaaagcaagtacagttatggaaaaatatgatactcgattactgtagaagtcaaaagatacatacaatatccctggaagaagatttccccatgttctccaatccaaagattgagagatctcttacctatgaagcaaaggaagtgttccttgcagctctcgtcagtgaaggtcgtgctgagtggatggacaaaggtcacaagaagtgcctagttctttggctaaggatacaggattgggccaatttcatattaaactttgtaaagaataatgggttggaagtaatgactattgaagaaatacgctctggaattgatacacgtggaactgaacttgagggaatcgatcgtggtgttctcatgcgggcgctgcggcacttaaagcaaaagggtaaagcagctatcttcaaaggcacctcggccgatgacgagggcgtaaaattttcggtatagttccttttgcaaccctcaaactggcattccaataatctcgatcagtcggtgtcctttaaaatggcttgacacatagcggtacggctgatcacatccttccctagtacagtagtaatctacttcagtgctacggctgtggttaaacttgccaactcatctctgctgtcgtgaaaatttggccaagcctgagtaaacatatgtggagtggctggtaagcatcagttgaactggn

SEQ ID NO: 786 - DNA, 2257 bp, Zea mays
  misc_feature (2256)..(2257): n is a, c, g, or t
  Peptide Sequence Number=SeqID_13209
  Probeset Number=SeqID_15189
aactttcttcctcgctctttctctctcttcgtgcgtctgcggtctgccatcggcatcgcccccaccaccacacgtccacctctcccgcaattgggaatttctcctcgccgcctcgtctctgccgggctcgctcgtacgtcgctccccacccgcaatggcggacactttcgccctcctccttctcctgatcctgtcctcgtcggtccgcgccgcccccgacgccgtggtgtcgagaatcgccttcggatcctgcgccaaccagagcgagccccagcccatttggaacgccgtcgcggggttcgacccgcaggtgttcgtctggctcggggacaacgtctacggcgacaacaagcgcccattccgggtcttcgggagggagcgcaccgtggggccctggaagaacgtgccgcgcttctacccttccaccgaggaggagctgcggaggcggtaccagctcgccagggcgcagcccgggtacgccaggctcagggagagggctcaggttcttggaacatgggatgaccatgattatggattgaatgatgcaggaaaagaacttagtgggaaagtgattgctcaaaggcttatgttagatttcttggatgaacctgaagacagtaaacggaggaaacaagctggtgtttatgcctcatacatgtttggccctgaaggaaaacgtgtgaaggtaatcttgctggataccagatatcacagagacccgctattaagtgatggaactattctgggagatccccagtggcagtggctagagagggagcttcatggtccacaatcagagatcaccatcattggatcttcgatccaggtagtgtctaatctttcagccactactgggcctttgttctatgtggagtcctgggcacgcttcccgagggagagagaaaggctgttcagattgattgatagtagtaagagacctggagtgctatttattagtggggatgtccatttcggagaaatcaccagattcgattgtggagctcaatacccatcatatgatgttacttcgagtggtcttacccagtctgtcgagaactctgtgccagaagtgtttcaacctcttatgagacttctggcaatactaacaccaactaccatgcgagttttgagcccaaattgccaatataaatcatgtacaataggccaaccaaattttggagcgattgaaattgattggaacgctgtacctccgcggattaaacttgaactaagagatgttgagggtcattctgttcacagcgtagagttccctatatctgaactgcagccctcggaagcgcatgcaatcaaaagacaaacccatactttccaacgtcactgtactctcgaaacagagctcccatggctaacacgataccggcttgctctgatgttgtttgtcatcatagctgtttttgcggtggttgtggtgatgctagcgatcgcctgcttgtcaaactttaccaagtccagtaagaaaagcaagaaggaatagctgtgagctgcagaggagaaacgaagattcggtccagctataagctggatttcacactgaccagggatcacctatctcaaacaatgcctttgagcaggcaagagccagattgcaccacagtatcaagcagtacactgcgttgtgcaatttgcaaagcgcagattggatagatagatatgatagctaacaaataacttacaaccatgtgcctgcctcgtatagcttcgccttttgttttccgtcttcatgccttccgccctgtttttgttttctggtaagcattacattgactaagaaaaatcttggtggtggaagtgtcccacaagtccaaaaaaaaaaaaaaaaaagcttctcgtgccggcttctcgtgccgttttttttttttttttttccacaacatagctttttgcagagattcagtacataaggattcttcaaattaaccataccacaccataacatgggacatttgcgaaactacgggtacaggtatcaaaatgcaacgagttcaatactaaaatataagcgtagtgcaatctaatcttcttcttcgccctttctctgggtaataattgggttacttggaaactgttgatcagtgggtcagttagaatgtgaactggttgttgctgggtaagtatgtggtttgttggtatattgagtctggggacagagagtgaggtcctgatctgcttgtaacagtacctgctttggttttgtgattgctatatactgaaacccaaatccctctgttgctattnn

SEQ ID NO: 787 - DNA, 803 bp, Zea mays
  misc_feature (803)..(803): n is a, c, g, or t
  Peptide Sequence Number=SeqID_13210
  Probeset Number=SeqID_15190
aaagataagcaactccagtccaagcaggagcaagaacaacaggaagagtcgaagagaggagatcagggacaagaacagccagaaagaggagaggaggctcatcaatcgcaactaattctcgcagtcgcagagacaagcaatcatcagacatgagaacccaggcgctgttcttcctcgcactcgcacttatcggctccgtgctcgcgcagtccagcaacaggcaccaccaccactaccaccacgcccatgtccaaagcaaaggacagggagccggaggaggaggaggaggggagctggcgagccgggcgaagagcrrcggcgcgcgcgtggccgtgctgtgacagctgcggcgggtgcaccaggtcggagccgccgcggtgccagtgcctggacgcggcgccccgcgggtgccacccggcctgcagggactgcgtcaagtccagcctyagcgccgacccgccggtgtaccagtgcatggaccgcgttcccaacttctgccagcaccgctgcaccgcgcgcgcygcygccgccgcgcactgaccgaccgcgcggggcagccgagccagccgacgactggtttctgcttgcagcttggtattattgacccagcaacctttttgcccacccacccacccgctcgcccgcccgccggcgaatcatggcgtctggagcctttgaagccagccgtggattaggatttttgtttgtgtgtgtttgtgtagacgtaactgtaaagactaaagagagatgaggaatctgtaatctggtgagcgagcaaccaatccgagcttacgttgtccgtn

SEQ ID NO: 788 - DNA, 1372 bp, Zea mays
  misc_feature (1)..(288): n is a, c, g, or t
  misc_feature (1372)..(1372): n is a, c, g, or t
  Peptide Sequence Number=SeqID_13211
  Probeset Number=SeqID_15191
nnnnnnnnnnnnnnnnnnnnnnnnnnnnnnnnnnnnnnnnnnnnnnnnnnnnnnnnnnnnnnnnnnnnnnnnnnnnnnnnnnnnnnnnnnnnnnnnnnnnnnnnnnnnnnnnnnnnnnnnnnnnnnnnnnnnnnnnnnnnnnnnnnnnnnnnnnnnnnnnnnnnnnnnnnnnnnnnnnnnnnnnnnnnnnnnnnnnnnnnnnnnnnnnnnnnnnnnnnnnnnnnnnnnnnnnnnnnnnnnnnnnnnnnnnnnnnnnnnnnnnnnnnnnnnnnnnnnnnnnnnnnnnnnagttttatgtccactcaatcactggtctacgattgctgtcaaagcaagatgtactactctatatcaatgaggcaaaggtctctgggtgcgacaccaatggacaacgtgacacaacttctgaagataacatactttcaaaagtggactttcggccaagtggattgcctgaaggttgggtgaaagaactagtgtacagaaaaaccaaggaagggttgatcaggagagatccgtactacacggatcctgttagttcctacacattccacacgctgaaatctgcatcatccttcctagaaactggaaaggtatccgagcgtgcatttattcaaaggacgagtgttcatgatctgtactcttttgaaatatctgcagacatgcatgaaagtttacctaataaattaggaataaatgagaagccttatcaggagcctacaaagtcatggaggtttgtcagtatatccaaacaccaggagacaagatgcaatgtaagttgaaagaagatgatacaccagcatatctgatcaacgctaaggaccctggaaagtacattgacggcaatgggtttatgaaattattaaagccggcactatctgacgatcttcctgacataaaaactgaaggctctagagttgtggaactcaaggggaagtacaggagctttctatccagcaagtttgaccaatgtttacccgaggaattctctttttaggagatacatcctgaggttgcaatgaacatgaacaagcactcttgaaaaaagaggccattcagaaattagtgaagttcttccaagattgccttgaacagtattttggccatatattggacgctttcttgaagataatcacgaaatcttctaggctaaatacaacaatggctaccaatggtttaacaacatagctcattgcaagacttgaccattcaaatttggtggtcacaaaagtgtggagacttgaattcatataaagttaggcttaacattaatacaaacagttgtattttagtttagatttagagtatacttatgtatgcgttatttgacaatgcttatttatgatatattgaatggtacttatttatattn

SEQ ID NO: 789 - DNA, 568 bp, Zea mays
  Peptide Sequence Number=SeqID_13212
  Probeset Number=SeqID_15192
gcacgagaccattacctagaacatcctaatcaaaaaagttctcgagcacctgcagcgccgccagacactccgtagtctgtaccccaagcaccggcgcggcggcggcggctaccatggcagtcgggaagaacaagaggatctccaagggaaagaaggttggtaagaaaaagaccgtcgatcccttctctaagaaggactggtatgacatcaaggccccatcggtcttcagtgtgcgcaacattgggaagactctcgtgtccaggacacagggtaccaggattgcctctgatggtctgaagcacagagtctttgaggtttgtctagactgatcttcagggtgacgaggatcaggcttacaggaaaatcaggctccgtgctgaagatgtgcaaggcaggaatgtgctcacaaacttctgccaaatcgccagttctttttgtgtactgtgcgctagccgccgcctagctgcactgctgtatttttgtttcaggattactgctgctgttcgcacattccatctttggctcctcccggagccggaggcgcgtttttactgttagccttactctt

SEQ ID NO: 790 - DNA, 602 bp, Zea mays
  Peptide Sequence Number=SeqID_13213
  Probeset Number=SeqID_15193
ctctctttcgtcttctctgttcaaaagaaaaaaggccggggcggtcgtgcgtgcctgcctgcctcgaggcggcggctgcggctgctgcttgcctgtgcgcccgtggtgaccacgatagcacacctacgctcctgctcgccagacagcgtggcgacggcgcccgcgcttcgaggccgtatacccgtgcggggctgctcgcgttttgatggcggcgaggcagcgtcgacgcgcgcgccttcgggctgggttgcgaggttacggtgtccacgtgcccacgaggcggtggcttgctagcgcgcccgtgtggccgcgacggagcccgcgtgcccgaggagcgacggcgggctgctttgacaacacccttcctggcagtcgtatagctgtacagagaagaagatgtcggccatggctgctggccgtgcttcttacgcagggcgcaggtgagttaaggctctgcggcgacgttctcatgtacgtcatgtgaagtcacgacgatggctgcgtgccagatttgttttcttctttttctattgcgttccttcgaaaacttcttactgctacggaagttagaaagatgttcaaaggaaatgcgaaaacttatt

SEQ ID NO: 791 - DNA, 562 bp, Zea mays
  Probeset Number=SeqID_15194
atcaatcatagactcatcacttagcctcgcagcagcaccgccgccatccaagccacagtagcccgccgccagctaagctcgcagccataagcatccatgaccagctcgtcgaagattgactcttgcccaaactctagcgacaactccggcgaggaatttatctccgtccgttcatcttccggggcaacccagaacattgtcgtgaccagttcggcgagagctttgtcaccgcgcttccggttagtcgatcagatctctggttcatcgtcaaaaactgagatgaccggtagcaacatgagattgaagtacttgattggaagaggcgaggtgacgatgatcagaagcccaacttttagatcagcatttggacaacatgttatcgcgggtataaggcaagttggcccttgatcactcttctttacctaataatgttcctgttaatcattgtgacatactcaggataatttgatggaacctaataggttactctagtttgtttaccccacaccttgcaaataaatgaactattgggtagacttgctattgctctacctattttggg

SEQ ID NO: 792 - DNA, 567 bp, Zea mays
  Peptide Sequence Number=SeqID_13214
  Probeset Number=SeqID_15195
aatatcccctagcattctccagatgtgttctctctctctctctctctctctctctcttccctttttatcagatcggtgttttgaaaaaagtgatttgtgcatttgaccctgctgcggcaccacattcttcatgagtgctggattgctttctcggggaaatctagagagggagtgtcgcacaaccggctccattgccggaggttgtgctcacgccatcagttttagagtccggaggagggaggaaaagcagggtagcccagaatctctgttggcgtcgcctgtttcattgtgttcatgatgatcctttcagtaataggcctttttaggtagtaaaggaaacgtttgtgctctggtttctgcaagaggcttacacaaacctgttttgacaagagccgagcagcgatgcttccattttggaccacgacctagctaaaggctaatgggttccaagtgtctgaagtaccgaagacatggctagctcctcgttttttgtcatgtcaaaaaatcgtgtatgattgcaacaatattggcaaaatatcgttgtactttatattttgatatactatg

SEQ ID NO: 793 - DNA, 1371 bp, Zea mays
  misc_feature (1371)..(1371): n is a, c, g, or t
  Probeset Number=SeqID_15196
gagaccattacctagaacatcctaatcgaaaaactccaagtttcattccaaaccctcccccctctctcgacgcctcagctcctcccccttctctctcaactcctgctagctctctctcacacacactagccagccagcaagcaagctataggctcctcgcttccaagcgagaattccggcggcgctcctcaattttcacactccctaaccaaatcaggcgcacacctatacgcggccataccctcctccgccgatcccttctatatacgacgacgaggagatacacaccagccgcagccggcttctcgtcgtgcaccccaggagagatcgggagaatggagctgttcccagcgcacccggacttgcagctgcatatcagccctcccccagccacgaaaccaacggagctagggttctggaagagggctctagacaccaccccgactgcaactacaacggccgcggcggcggcggcggcggcggccaccacggccccctccctcgccttcgcgtcctmmggcgccgacagccgtggggtaccacgcatcggcaggcgcgcaccaccaccatcaggtgccgacgacgagctcccactcccaactggtgggcctcccgttcttgcaccacacccagcccatcctcctcccggagggcggcggcggcggcctccgccgggacctggcctccgcgaggcccatccggggcatccccgtgtacaacgcctcgcagccgctcctccccttcctgcagagccacccgcagcaccaccaccaccacccgcattgccacgacgcgatcgtcggcgcggccgggccgaggttgtcccccaaggccgcgctccggctcgcggggaagcggggcgcgcgcgcgccccggatgcggtggacgacgtcgctgcacgcgcggttcgtccacgccgtcgagctgctcgggggccacgagagagctacgcccaagtcagttcttgagctaatggacgtgaaggatctgaccttggcccatgtcaagtcgcacttgcaggtgaggggggaacaatcgagcagctgtatagttagcatgacatgaattatatctgtccttgtactgtgtgtgtgtgtagtcggtttgcattatattgttcttgcacggccttgttctatatatatgctagctactcctacgtatgaatcctctagctcgttaacataaacacctgcttaactcttctttgtagtggtatttctttcttgtatcctaaacaaaagagcaagactagagtagtagctatatagacctcaatatgcaaagagagagagaaatgcagtgcgttttgtacgtactctacacacactctcatttcttgcacgataaagttgacctttaattttgtcn

SEQ ID NO: 794 - DNA, 791 bp, Zea mays
  Peptide Sequence Number=SeqID_13215
  Probeset Number=SeqID_15197
aaaaggccaaaatcatcgctgcgccgccagtggacgcgttcgactccggccgccgcccctgctcctcctgcccacccgcaccggccattgccctcgcctgctctgccacccgcaccttccaccgcccccgcgtgctcctccgcaggtctggccgttgcacccacctgctccccaccaccgccgccccacccacttatccaccgttgccggtcgtcgccccacctgctcccccactgacaccggtcgaggtataatctcaccctgggtgaagcttcacccgactgctccgatcacaccgaaccaaacccatccgagcgcatatacccagcaaaaaagtggacacattttttacagcctaggttttccgctgcgccccctgttttcgaaatcctttccctagcgatcataactgacgccccgaatcgccgcgcggcgggggaggagattcatcacgttttctgctagggttttgtatttggactagacagagcggaaatctggtggtggtgattctgtaaccagaagatcagaaactacggaggagtggggttttgtgattggttaccgataggggttttgattcatcggcacccaaattgctgttgattttttcctgcagtttctctcaatgtatttatggtcatggtagtactggattatggatacatttttttcaagtgattcataatctgcatcactcctttttaaaaaagatcatcaatgaggagtgatgatatgatgatttttttatttatctgttaacatcagtaacatcataatagttttttttc

SEQ ID NO: 795 - DNA, 1163 bp, Zea mays
  misc_feature (1)..(1): n is a, c, g, or t
  misc_feature (1163)..(1163): n is a, c, g, or t
  Probeset Number=SeqID_15198
naaaacttgaaacagccgactcgctcggatttgagaggaaaagaaagcgatggagaacatgagcagcgactgcggtggctccaagcggagggatccgattcggcttctcctgggctgacgaggtcgagcgtgaggagctggagcaggaggaggaggagcggcggcggtgggacacggagagggagcagatcaaggcggacccgttcggcggagcgcggccgctgggggtggagcaccggcggtcggaaatggagagggagaaggtcaaggcggacccgttcggcgcggcgcggccgcgggaggtggtgttggccgagaagggcgtcgactggcgcgcgcgcgactgcgagctggatctccgcctccgaaccgccccgcgcccgcgccgcagccagaagcacgcggccgctacggccacgagcaaggggaccgtckcggcgcacggggcgacgcccgcgcgtggtgctcctgcggraccaggatgccgygggcgccggacgaacgccgcaccckwgggggcakygcgctgccttctccacgccgttgccgccgacggttagccacagcgcttggggcggaagcaagaggaagtgtgccggggaagggcctgggccgtcgcggcgagtccagacggtggacaaccagaggaaggtcttcggcgagctcaacgtgggagagggctgcggctcctcgwtcagaacctccaacaataagagctgtgactccggtggaagtcaagccgagggaatcaaatcaaatatgcccgcggttgcggacggtgagaacagatgttgcagggtgacgaccacgatggtaaccgcaaccgaggttgctcaatctgctgttgcccagaagagaaagggagggaagaggaggaacggaaaaagatccaagaagactccgaaccagcaacaaacaccgggtcatgttcttggttgtaatcaggaattcaggataccacagttctcccagattcaacaacgataatggcttcaccctattttgtaggcggtgatcgaaaatgagtaattccacctattatatttccaaattcttcccttctcaactttttgagcaattggaatctaagctatttttttagaatgtgacattgcacgtctttctaaggtttatatataagtctatctcaaattcaaagggtn

SEQ ID NO: 796 - DNA, 660 bp, Zea mays
  misc_feature (1)..(1): n is a, c, g, or t
  misc_feature (623)..(660): n is a, c, g, or t
  Peptide Sequence Number=SeqID_13216
  Probeset Number=SeqID_15199
naacctcaaattaagtactgagttattacataaatcggagtttttgagtagcaaataaagttcacaaaataaagtgcagcggataatcgatgtcgtcggtaatgaggaaatgggcaaggcctagcccactactcctcatgctcctctcctgccggagcaacatcccactcgaccgtccaacccggtggcagggtggtaggccaagtcacaccatcaaccaattccagcatggtaccttggaacaattagccgcactcgcatgtgcagaagtggacgcggaagctggccctagtgtagattgctgcagcgcctggaacccttcggagctcttgccgacggccaatctcgactatagaggaagtgtagcctctcctgtgcccgaacaaatcgaagtgaaggcatggaagcaagccggaaggggtcccgggaagccggcatcgccgtgacgaggaagagcgcgggctagagaccggccacggtgtcgcggggaggaacacggcggggtggcgagcgaggcatgtctgcgcggacatggaggcaacatgagaggggggcggctcaaccgacggcttcacagggaggacgacgatagggctaggggcggcgcaagtggagacgatgcnnnnnnnnnnnnnnnnnnnnnnnnnnnnnnnnnnnnnn

SEQ ID NO: 797 - DNA, 1414 bp, Zea mays
  misc_feature (1)..(2): n is a, c, g, or t
  misc_feature (1414)..(1414): n is a, c, g, or t
  Probeset Number=SeqID_15200
nnagctgcagtcatcgcggcgcccgcgcccgctccgggccgcgccacgatgctccaagcccaacgacgccgagccctcgccgtccccaccgtccaccgcggccgccggcggcgtccggcgccaggtgctctcgcccgagggccgcgcgaagctggacccgcggccggaccgcgacttctacgcgctcccgcgcctggtgacgcacgtggacgacggcttcatcgccacgctcacgggcctctaccgggagcgcctccgcgccgggtgggacgtgctggacctcatgagctcctgggtcagcccacctgccgccggaggtccggttccggcgcgtcgtcggccacgggctgaacgcgcaggagctcgccaggaacccgcgcctggacctcttcttcgtcaaggacctcaacaaggagcagcggctggagctggagagcggcaccttcgatgccgtgctctgcaccgtcagcgtgcagtacctgcagtcccctgaaaaggttttcgcggagatcttccgggtgctgaagccggggggcgtgtgcatcgtcagcttcagcaaccggatgttctacgagaaggccatcagcgcgtggcgggacgggaccgcgtacagccgcgtgcagctcgtcacgcagtacttccagtgcgtggaggggttcacgcagcccgaggtgatcaggaagctgccgtcggccggcgggtcgccgtcctcaccgctggacgccgtgctgaggctgttcggcgtggcaggctccgacccgttctacgcagttatctcgtacaggaacttcaagccaatgtgacaccctgattgacagaacccgtgcagcattgcgatatgcagtgcatacgatctatagaatcactactggtgcaaagctagtttgtacttgtacatgtaactwgagcgttagctgtctacctcagcggcggacagatggaagttcgttcaaaacatcaaccgaccagaaacatgctascgatccttcttattacagtaaaaccactcttttttctaaaaaaaaaaaaaaaaaacggcacgagaagcttttttttttttttttttgacaccaaacaaaacacattcaccgttaagatgggatgggacagacaaatgcgaacggtcccactcaccgtgtgaggaatcaagagagaaccaagaaaacatatactagaccactgagacgagccatagatttaggaccactgaacggcgatgaaaaggttaaaatgcaagcgacaacagtttaaggggcttcccaaagaagagtgctgctgctgccaactaagtgtggatgttgccatcaagaacctcagaagctagacgttggatctttttgattgaattgtacttctgaactatttgcccgtaatactattacagtactggtttaccgtgtcttgaattgaagcn

SEQ ID NO: 798 - DNA, 792 bp, Zea mays
  misc_feature (792)..(792): n is a, c, g, or t
  Peptide Sequence Number=SeqID_13217
  Probeset Number=SeqID_15201
aatctcctttctcctcctccctgccactctgctccacgcgcgccactaggaggaccgcccatggagccgcctcgccccgcgccagggacgcctgactgtgccgcgcgaccccgagccggccccacgcccccacgcaccgcgcasttcgacgcctgcaggacctgcgccgcgccctgcgcaccgcgccgcgcacgctcaacgcccgagccatgccttgtgtcgagcagccgtgcaccggaccggccaagcgcacgcccaggccaccagcccgaccgcgacacccgccagaccgaagcccaagcgacgcccacgccgttcttttcttcaccgagttatgaagcttcaatgccgcgactgtttttcttcactttgccattacagccgccgccattaatggcatttctgctgcaattaaatcctcagccgcgaacccctcgccctcgcctataaaattggacgccgagccctctccctctccctgcccgagctccctctctcactccctcctcattctctcgctcgccgccgtgtagctcgtcgccggaccgtccgcgcccgtctgtcgttcaacggagctccgcccgtgcctacgtgctgtctatcgttcgccgtccactttgcccatcacgtccgctctctcgccgagctccttgcgcagcggagttggctagaggtagaagaaggtgaaaaaaaatcacaagtcatctctccaattatatgtttaatcatgaatagaccttgcgacagttttcctattttaaaatatttatttgatacccaaataaaatatan

SEQ ID NO: 799 - DNA, 627 bp, Zea mays
  misc_feature (1)..(1): n is a, c, g, or t
  Probeset Number=SeqID_15202
ngtgcggtaaaagtacatggcgacacccgcgggcagaacactaaccaccacccgcccgcggatccaaagcaaccaatgcatcatcatcgtgtacatcaagaatcgatcgtagggccggtaaaattaaataacaacaccaaaggaaaaaaaaaagatgaaactgaaatggagcgagcagcaacgtcgaggcacggggagggggtgacaacatcggcgtgaggacaggaggaagagtcggagtctagtttttaaagcaggacggcgaggcccgcgcccgccaacgccaccaccgtggcgaagccgaccgcgcgcgcgcttgcacccgagtcctagttcgtcggcgtgcccgtgggcgagagcgagggcgccggggacgccgcagcggcctagacgaatccggcctcgggctgatcctcagcctcttctcctccgccgccgccatctcagcggtcgtcgccgcgggctcggtctcctcgcccacgatggcggtgtctgccagcacgacgccgtcggggttgggttgtcctcgtccccgtggcggcgcatcgggcgcctgcatcatcctgtggcggggacgcggggtgcgatgctactgcgcgcgcggtatcgtcggtcccacgagaatct

SEQ ID NO: 800 - DNA, 1059 bp, Zea mays
  misc_feature (1059)..(1059): n is a, c, g, or t
  Peptide Sequence Number=SeqID_13369
  Probeset Number=SeqID_15203
acactcttgccctctagctctagcagcagcagccaaagccatggaggcgagcggcatgaagctccgccggacgttcctcctcaccctactgctggtgctctccaccgccgtgacgcccatcctctcgctgcctgcagacaacgtggtagcctgcgactgcgacaagcccaaggcgcccaagccgtcgcactcgcgcccgcccaagacgaccaagccctcccacccgtcgccgaaacccgagaacccgaagccacccaagggccccgcgtacccggcggcggggcacccaccgcctaagagcccctcctacccaccggtcgtaggcccacccgtcacgcgcccgccggtcgtcggaccgccagtgacctaccckycgattaccggttctccgacgacgccgccggtcatcggcccaccggtcacgcgcccgccggtcgtcggaccaccggtgacctacccgccgatcaccggccctccgtcgacgccgcttccggtcaccggcccgcccgtgacctacccacccggcggaggcgggggcagctcgacgccgtgcccgccgccaccgccactgccgacgtgcccggcggactcgctgaagctgggcgcgtgcgtggacctgctgggcgggctggtgcacgtcggcctcggcgaccccgtggtgaaccagtgctgcccggtgctggaggggctggtggagctggaggcggccgtgtgcctgtgcaccaccatcaagctcaggctcctcaacgtcaacctgtacctgcccctggcgctccagctcctcctcacctgcggcaagacgccgccgccgggctacacctgcaccgtctgactgacgtcctcgatcggttagctagcgcctagcggcatagtagcagcagcccatgcattatccgtccatgcacatgcatgtacgtagctatgccttatgctatgcatgcatctctctgcaagtggttgctgtctgctgcatggtggaagactcgagagctactagctagctagtagagagtagagacgtcgtgttgttgttgcatgcaatgcatatgcgtgccttcn

SEQ ID NO: 801 - DNA, 1145 bp, Zea mays
  misc_feature (1145)..(1145): n is a, c, g, or t
  Peptide Sequence Number=SeqID_13370
  Probeset Number=SeqID_15204
atttccatcccattcatctccgccagaggagggaggcgagccgcgtttttcatttcgaaatcaaaccacgacgatgccgcaggcgatggcggacgccgcgacgctctccgccctcgctctctttgcctcccgcctctcctgtcgcaggttcggggacgaggacctccgggtgctggaggccgcgctgtccgccggcgccgacgtccccgcgctgctcgccacgcgctcggcggcccggcgcctgctgcgatcgagcgcggcggaggcactcgcgttcaccgcggcggggtgcatcgctggatggtggggatgagagacggagcctcgccgtcgccgacttcttctcacgcgccttcgcgcttgtaggcgatgtcgagagctgccttgccatgagatacgaggcactgttgcttcgagatgctaaatactgcaacgaccttcacttgcaagtgtcccgtcaggagtggctaacttttgcaacggattgtcttgataatggcttctacaccattgcctccaaggcttttgcaaatgctcttgtgcacattcatccaagccacacagggcacttggactctgctaattccattgaggagaaggacaagatcattgaaataacaggactccagaacttggccaagtcattatctgcacagcattgtgttcagataaagtctgctgaatacatggaaaggagagcttcaggtgttcatgaaaagtataatttgcaatcaggaaaactaaagttaacaggaagttcaatgttcaggctagggattaaaacgaggaacataaagaaattgcttcgtagccaggaaaggaacttgggggatttaaagcaatcttagtgttgcatcttccacaagaccgagaggaatgttgtaaaaagatcagttaggtgacaatttatgcaaatggagacatgaagtggagttatggatgggtctttgagtcaacattaagacaaatacgttgaagagtagttgcatcctttggtagcatactcactgtgcaagtaagttgctgtcttcaatgtctgcagactgtttttcatgtgttgaacaataataaaatagtaactccgcctgtccgccatgatcgacatatcgccttataataatatatgaaactgggatttgttgctn

SEQ ID NO: 802 - DNA, 1432 bp, Zea mays
  misc_feature (1432)..(1432): n is a, c, g, or t
  Peptide Sequence Number=SeqID_13371
  Probeset Number=SeqID_15205
gtcgcatacacgtctgccgccggccgcgcgtccatcgaacttcgaagccaagattgccaagtcatttcccccaaattcctttccccttcgatcctcccctgcaaaccaagtctcaacgaccatggacgtcttcccctgaccgcgccccactgccccagacgccgtcgcctacatccatgagacttcccgatcttcctgcggccgaggatgtcccagcgcgacgtcgactacagttgcggattctgtggataccctctaaacctttcatcttctaaccgaagcacgtctgaagtaggctcctcatataagaagtctctgaagaagggattgatttcattcatttctgttgatctaagccgatttactcaggtggacaaggtatcttgctttcccctcacctggcgcagttacaggccaaaaactaagcttctctgccgaaaatgcggagcatcgatcggctatggatacggtgagccagctgctttgtgcagttttgatccagcaagttcatcttcctccagtacatcccagaagtatttaataaagatccaagcactccaaccttcagacgggacccagtaagtcagatatggaaagagagacaatagatgccagcttagagaactccatcagttacctatctgacgactgcttgctttctatatttaacaagctagaaagcgagtcagagaggagtgtttttggtttgacctgcaagaattggttcaaggttcggaaccttggtcggaaatcactaacattccattgttcttttaaccctgcaatagacaaggagcatgccaagtgcacaggtagttagtggcagtgggctcaggtacctgaacctgcacaggttaggaagcttaactggtctggatggcctgggtaaccttgcttttgctaaaagcctctgcgttctgaatctcaggatgtatcgctatctcacagatgattctgttacagcaatagccagtgggtgcccactgcttgaggagtggggaaccttgctgttttctatgggtgtccatttacctggctggttgtactgcaataagctaagagtgctgcatgtgaaccgctgccggcacatctgtgaccacagtttgctggccatcggcaatggctgtctggttctgcatgtaaatggttgtgtcaaggtcaccaacaatggcctggctgatgaagtcatgtccattggcccttccattgagaacttgttccggctgcattgaggagaaactgtagttaggttttctaagcctggggctaaaagtttagtagccccgtcccattacggttacggctgattggttcttcggtcattatgtgcattgtgtttgctctagtgtacttgttgtaagataacgagacccaccgtactcatgtgggaaacatgggcactgaatcgtaaatatacaaatgagctgagctn

SEQ ID NO: 803 - DNA, 554 bp, Zea mays
  Peptide Sequence Number=SeqID_13372
  Probeset Number=SeqID_15206
acttcgattcgctcccacgcacacacacactcctgcggttgccactcgcgtagcagtagcaccagacagcagcgcgcacgcgacgtccgcaatggcggcgcgggcaaccgtcgtcctctgcgccgcgctcctcgtcctgctctccgccaccagctccctcgcgcagtcccccgcggccgcgccggctaaggcgccgcccaagtcctcctccaaggccacgccggccgccgcccccgcgcccaagtcctcctccaaggccagcccatcggcgccggccgccgcgccaaccaccccggcacccgcggcggcgccggccacgacaaagcccaaggcccccgcgcccgcgcccgccctgctcgcctagataagatccccggatgccaccatcacaggatttgatgaccttttcctgcttttactttttctttcggtattttgtggaaaaaaaggggttggctctgcctttcttctgcgtagtagagtagtagcagtagactagcagggcccatgtcacatcgattgattcacttgtgcggatgatttcttctgcttcc

SEQ ID NO: 804 - DNA, 758 bp, Zea mays
  misc_feature (758)..(758): n is a, c, g, or t
  Probeset Number=SeqID_15207
caggaggcgcctccggaggtggtgttcgaggacaaggaggcggtgcacgtgaggacgttgcgcgcccagcccccgcggcggagcatgtcggagaagacgggcggcggcggcgccgccgcagcgggcagtgcggcgtcgccggagctgcggcgagccaagtcggagaacggcaggcggcggcaacggcggtcgtcgtcgtcggcggcggcggcggcggtggcggagctgggggtgsmcgtackbmgaggcgttccggctggcggtcgaggcgttcatcgcgaagcagcagacctggttccaccgcgaggagtccctggtcgcccgtgccgacgccggtggggaagacggcccggcgatcgccggcgccgcggtggcggtgcagtgagcgagtgatcgagcaaaacgcaaccagtgaaccaaccctgcttgctgctgtgctgcaataagagtgtgattactgattggtgtgcgcgaaaggatcgggagaagagaacaggggggcgggggccaacagccaactcggcgaaccaaaccaaggctgcttctagctgcttttgttaatggatttttttttgcgttttggccgccgctcgtctttcctccgtcaccgtacgtccgtatctgaagtttccgagggcgttcttcttttcaacttgtgtcgtctcgtctcctctgaacgccgagggcggcgacggcaggatgtatctgaagtctccgagtgcattttccttcggtgtatcagagcacctccaacagcn

SEQ ID NO: 805 - DNA, 1539 bp, Zea mays
  misc_feature (1539)..(1539): n is a, c, g, or t
  Peptide Sequence Number=SeqID_13373
  Probeset Number=SeqID_15208
gcacgagaccattacctagaacatcctaatcgaaaactctttgccaccgtccattccccgttccatccaaaagccacacacatggacagcggaagctaggcgttgtcgtcccgtccagcactacagctacgcagctatatcctacagctcctcctccccccgcaccatccccagcagcatgtcgtcgtccagggcgcggcggggcgggagcgggctgcagttcccggtggggcggtggcggcacgtggcggtggtggacgccgggtgcggctgccggccgcgccgggccacaaccaggctgctgagccagctgccgtccttcctccgcmcgtmcccgaagccgccgcagccgccgcgcasagctcgcgctcctcctcgggcttcttcmcgtmctcggcmgsmtccacmgcctcctcstccgccaccaccttcaccaccacccactcctcccactccaactacgactcctcctacacccaccaccaccccaccaccaagcacctggcgtcggccgccgacaagccgccagcgccggcggggaggaggcggcagcagctgcagggccaccaccaccaccagggcaggaggaagaagcggtatgacaaaatgggcggcccgggcgcgggcgcggcggcggacgcggacgcagcgggagaagagggcggcgtgggcgtgggcgwrgccgtggagaaggagtctgtyygacccgcgcgccgacttccgtgagagcatgacgcagtatggtcctggagatggggctgtgcggctgggackacctgcgctgcatgctccgccgcctgctcgcgctcaacgcgccccgccaccacgccgccatcctcgccgccttckscgaggtctgcgcgcagctcaccaccgcggccccgcmgcagccggcgtaccacgctgccgcctacgactacgactaccactaccaccactactgaaaaaamcwawataaataaacacgggtggccctggctgggctccgtcttctggtcccgagatcctggcaccacccggcggccgggctccacctgctgcaggggtggacggtggtcatgtccgcctccgccgccgccgcctcctctgcccctctgccaccgggtggtgataggatctcgtgaaggagagattaaaccaccaccttattactgttagcttcaccaagtgttatcagtgtgtatgtccagtaccagtacgaccaggtgtccaccgtccaggtcgtccttgtagcgtagccgtagccgtagccgtagccgtagtgtgtgctttgcgagctcgtctttttcttgggtttcttccggtgctttgtttgctagctagctagcttctcgctgttcctacctactgtatgtctcgcaggagcaagcagcatgcatagcagtgtgtgtgtgttcgtgttcggctggcctttcgttttggatgaaggccatgtccacgaagaagttgtaggtagcagtgcgagtgatttagaagcaggtctggttcgtgtgtctaagctgctactagtaatgaagatttgagacgcgtttcttgctn

SEQ ID NO: 806 - DNA, 1358 bp, Zea mays
  misc_feature (1341)..(1358): n is a, c, g, or t
  Peptide Sequence Number=SeqID_13374
  Probeset Number=SeqID_15209
gttttcattttggtcaaacaaaccaaggaagccctctgctctgcctcgcactcgcacacaccgtgcaccaccggccggccgggtcgtctcgtctcgtctccactgtccagcctccgccccccgcacctcgccatgtgctgccgccgccaacgcggccccgacgggacgcccgtcgacggcggccgccgccgccgccggggctgcggggccgtgctcgccgtgctggccctggcggccgccgcggcggtcgcgttcctggagagcacggccggcggggtctcgtacacgggggacgggtggctgcacgagtgcgccaagtgggacgccgagggcggccggttcctggcgtccaccttcttcggcggcggcgtggcggaggtgcgcgccggcgagggcgaggagcgggtggtcgtggcggaccctgacrcrrgccggccgggtcgcgctggggctcgcggtcgacgcgcccaggcgccgcctgctcctggtgtactgcgatcgcccgccgcgcttcggatacgccgcgctcgccgcctacgacctcggatcgtggcgccgcctcttcctcacacgcctcgacgtgccaggcgagtcaacgttccccgacgacgtcgccgccgacgaggaaggcaacgcctacgtgaccgacgccagtggaaacaagatctggaaggtcagcccgagcggcgtgctgctgggcgtcatcaagaactccacgttcgtgcagcgaccagggctgcggcacaacctcgtcggcctcaacggcatcgtgtaccacccgaacggctacctcctcgtcgtccacaccttcggcggcgacctcttcaaggtcgacccgaagacggaggccgtgcacgccgtcaaggtgcaggggtcgctgggccgaggggacgggatggagctgctctccccgacgaggctggtcgtcgccggcacgccgagtagccggctggtggagagctccgacgactgggagaccgcgcgcgtcaccgggcagtacgtcgggccggtccaccgggttgggtcgtcggcgacggtgaaggacggggacgtgtacatcaaccacattgtcgggtttgggctcggcaagaagaagacgcacgtccttgcgagggcggtgttctcgccgttggccgcagcgagttgactgcggccggccggaccctccgtcgcgggatcaccaatcgctttttgcttaagcggcagttcatagttccactcagctccatgcatgagagttacaggctatatatacgtatttcggtgtgatatatagatgcttatgcttttgtattgacacgttgctcgaagctgcacgcttcttttgtttgatgcatgcannnnnnnnnnnnnnnnnn

SEQ ID NO: 807 - DNA, 903 bp, Zea mays
  misc_feature (903)..(903): n is a, c, g, or t
  Peptide Sequence Number=SeqID_13375
  Probeset Number=SeqID_15210
agcccatcttctttctcttccctctcctttctctcactcgttcgtgccaccgctccccgttcctcccccagcaccgccgcttcccaacaccggcacctccccagcgccgcccggccccagcaccgcgcggccaagcagagccgcgcccggccaccagcgccatgcctcccctagcgccgccccctcccgcctgagccgccggcgcttgctccctccctcccgtcgtgatctcccgagtaaggttaaagaaaactcaccatataggggaggtgctgccggattttttactgacaatactattttttactcaccatatggaattattagttagtaagtagttattacttatttattacttagtaagtatttaggcataagtatttattcagtagtaaatacctatgaattattgagatagtaatccgtgtttgcaatagatggacaccctagtgacactataacatggaggaagctataggtgtacatttgtgctgtgcctaataggctggcccaaagcacacaatttttggcacgacacagatctggcacggcccaacctaattgtgggcctgggccggcacggcccaatatatgggacatgcctgggcctcaagtcaagcccatgggtcggcctggcacgacccatttaactaaggcctatcgaggcccactaaatatagacttagtatttaactaaggcttgtcaaatcccacatgaccagcacaatttggagaatctagagcttcaataggccttcggagaaccaatacctagatagggatagtaaatagtgatgatgatcattgtatatgtattctgtatgactgtatagtactcagttaaacactaaacaaagaactgaatattattttctatgctagttgtagtattttttctttctn

SEQ ID NO: 808 - DNA, 1429 bp, Zea mays
  misc_feature (1)..(571): n is a, c, g, or t
  misc_feature (1354)..(1429): n is a, c, g, or t
  Probeset Number=SeqID_15211
nnnnnnnnnnnnnnnnnnnnnnnnnnnnnnnnnnnnnnnnnnnnnnnnnnnnnnnnnnnnnnnnnnnnnnnnnnnnnnnnnnnnnnnnnnnnnnnnnnnnnnnnnnnnnnnnnnnnnnnnnnnnnnnnnnnnnnnnnnnnnnnnnnnnnnnnnnnnnnnnnnnnnnnnnnnnnnnnnnnnnnnnnnnnnnnnnnnnnnnnnnnnnnnnnnnnnnnnnnnnnnnnnnnnnnnnnnnnnnnnnnnnnnnnnnnnnnnnnnnnnnnnnnnnnnnnnnnnnnnnnnnnnnnnnnnnnnnnnnnnnnnnnnnnnnnnnnnnnnnnnnnnnnnnnnnnnnnnnnnnnnnnnnnnnnnnnnnnnnnnnnnnnnnnnnnnnnnnnnnnnnnnnnnnnnnnnnnnnnnnnnnnnnnnnnnnnnnnnnnnnnnnnnnnnnnnnnnnnnnnnnnnnnnnnnnnnnnnnnnnnnnnnnnnnnnnnnnnnnnnnnnnnnnnnnnnnnnnnnnnnnnnnnnnnnnnnnnnnnnnnnnnnnnnnnnnnnnnnnnnnnnnnnnnnnnnnnnnnnnnnnnnnnnnnnncgccccggccacttcctcgtcgccttcgtcggcatggacgccaaggagatgttcgcccgcgtctactcatctgagtccgccgcgtggggcaacgtgacctccgcccggcttccaggcagccatttccacgacaagctgcccggcgctctagcgcggaacgcgatctacttcgtactcgggccggaacacgggatggtcaagtatgatctggctacgggcaagctgtctctggtcgccgtaccagagacgcttacgctcgatggttggtgcttgatgactatggaggacggtgggctgggatttgcagagttgaacttgcattcgactctcacgctctggtccatggtggacgaagggagatgggccgtaagcagggccatcgacctgaccgaccgactcccagttattgccctcgcggtatccacttgtatggttgcctttgcggacattgccggtgtcatcttccttaggacgacagatgggctctacacttatgatctcaagactgagcagagcattcttgttatggataatgatttctatggcatcataccctacgcgagcttctacactccagtgttacgggtggccaccacaggcgaggggtctgcctcaacttcttgacagagacctatggtgctgatcagatgctttcttggcaatggaaagttttgttggtagtagtattagctttatagggggacaggtcattagggttgatcttgtgcttgaggctttgcctacaggcacggtactactgaaatagttagcaaaagataacannnnnnnnnnnnnnnnnnnnnnnnnnnnnnnnnnnnnnnnnnnnnnnnnnnnnnnnnnnnnnnnnnnnnnnnnnnn

SEQ ID NO: 809 - DNA, 591 bp, Zea mays
  Peptide Sequence Number=SeqID_13376
  Probeset Number=SeqID_15212
aacacatagagcgctgaggacgttggtcatcagtcatcacctatctaactagctagctagcttgaacaagagcgtacgtagcaagaaacgagctccgctgcgagagaaagctaagggacctagctagctatcatgtcttggacctaccgtgagaacgcgctgttcgagcgcgctctggccacctacgaccgggacacgcccaggcggtgggagctcgtggccgccgcggtgggcggcgggaagaccgccgaggacgcgaggcgccactacgcccatctcgtgctggacgtcggcgacatcgagtccggcggctacgacaaccccaaccccaggcccgcccccaccaacagcggcgggaacggcaacaacaggggcggaggcagagccaaccggccccagacatgacggcctcccgcctcccgcctcccggaaaactacacccagcatgccgtgcgtgcaatgatactatgatagcatgtatgtacgtgagccatgagatatatatgtatgttcgtgtgcggtgtgcctgtgtgtagatatataatgataataataatgtacaggcatgcaagtgtgcatgtggtgttgtgc

SEQ ID NO: 810 - DNA, 782 bp, Zea mays
  misc_feature (649)..(649): n is a, c, g, or t
  misc_feature (782)..(782): n is a, c, g, or t
  Peptide Sequence Number=SeqID_13377
  Probeset Number=SeqID_15213
gtcattccgctcgtctctctcgctcacatcaactctccaggcaaaatatcctgggcgcgatggatgcaacgccagcgagcaagaaggccacgccggccgccgccgtcgccgacgcggtcccgcccgctgcgcagcaggcggcggagcagctgtcgtcgcccgaatccgtcgccggcgtgagggcgagcggcagcgaggacgacgacgagcaggtggagaggttctacgcgctgctggacaacatccgcgccatgaggggcatggtcagcaccggcggcgcggcaccggggaggaagcgggcgcgcgacgacgagcccccgtggcggccggcgttccggatggaggacttcgagctggaggaattcgactccggctccgcggggtgcgacgggggaaagaagaagagggagagcagcatcgcgaagcggccggcggacgaggaggagcaggccgaggtagtggaggccaaatgtccccggtgtgggccgcggccgccccagtcgcacaagccgcggcgcgagggagtgcgagccgtcgacacgtgacaggaatcagaatacacagccctggtccaatttgcacgtctttcacatttacgatgatatatgatgctaattgcctattaggagcatgtgtcatatgctctctncaactctgtcacatgtataattaagactgtctgatgtcctactagtcattagtagcagcctgttgcctgtgtagttcgtatttttcttgtgatgtacaacttattagaagtaaaaaaagaagatcaaagttgn

SEQ ID NO: 811 - DNA, 926 bp, Zea mays
  misc_feature (1)..(1): n is a, c, g, or t
  misc_feature (810)..(926): n is a, c, g, or t
  Peptide Sequence Number=SeqID_13378
  Probeset Number=SeqID_15214
ncaggtcctagctccggcctccgccgccgtctctcacctccgctccccttccctgcccccatggcgaaggccgacgcccgtagccgaggccgggccgcctctcacgtccccactcccacatgggcgcagcgcacggaggccctgacccacgtcctgacccacccgtcccacgcgccgtcactccactcgcagctcttcctcgcctcccgcgtcccgtgcccgccgcggggcctcggctccaccacgtcgtacccgccgctcctctgccccggcgcctcgctcctccgctgggctctcgcctccgtgttcctcccgcgcgcggcgagcctctgcctcccgccctcgtcctggcggtcccggtgccccttccaggctccccgccgccggtcgtgccctccgcggccatcgagccgggcgcccgagcggtgggccgactccgagctcagggcctacgcgcgccggcggcgggagcggaggggcccgctgacggtgcggccgccggtggccgtgctgggagtggtgctcaccaccgtgcccaacgtcgtgatcgtcgtggccttcgtgaaggagtacttctggggcaggaccagccgcatctgaggcgtggtgtctgatgcttcttttgctcttgatgtaaaaaaaaaaaggaaatttggatccataccattaaaagatcaccactttggatccataccattactatctcacttacatgtgggtccacatgagtcaatgacatgtgagatccatggtatatatctaaagtttggatcttttaatggtatagatccatttgttccaaaaaaaaannnnnnnnnnnnnnnnnnnnnnnnnnnnnnnnnnnnnnnnnnnnnnnnnnnnnnnnnnnnnnnnnnnnnnnnnnnnnnnnnnnnnnnnnnnnnnnnnnnnnnnnnnnnnnnnnnnnn

SEQ ID NO: 812 - DNA, 926 bp, Zea mays
  misc_feature (1)..(117): n is a, c, g, or t
  misc_feature (926)..(926): n is a, c, g, or t
  Peptide Sequence Number=SeqID_13379
  Probeset Number=SeqID_15215
nnnnnnnnnnnnnnnnnnnnnnnnnnnnnnnnnnnnnnnnnnnnnnnnnnnnnnnnnnnnnnnnnnnnnnnnnnnnnnnnnnnnnnnnnnnnnnnnnnnnnnnnnnnnnnnnnnnnntttttttttggaacaaatggatctataccattaaaagatccaaactttagatatataccatggatctcacatgtcattgactcatgtggacccacatgtaagtgagatagtaatggtatggatccaaagtggtgatcttttaatggtatggatccaaatttcctttttttttttacatcaagagcaaaagaagcatcagacaccacgcctcagatgcggctggtcctgccccagaagtactccttcacgaaggccacgacgatcacgacgttgggcacggtggtgagcaccactcccagcacggccaccggcggccgcaccgtcagcgggcccctccgctcccgccgccggcgcgcgtaggccctgagctcggagtcggcccaccgctcgggcgcccggctcgatggccgcggagggcacgaccggcggcggggagcctggaaggggcaccgggaccgccaggacgagggcgggaggcagaggctcgccgcgcgcgggaggaacacggaggcgagagcccagcggaggagcgaggcgccggggcagaggagcggcgggtacgacgtggtggagccgaggccccgcggcgggcacgggacgcgggaggcgaggaagagctgcgagtggagtgacggcgcgtgggacgggtgggtcaggacgtgggtcagggcctccgtgcgctgcgcccatgtgggagtggggacgtgagaggcggcccggcctcggctacgggcgtcggccttcgccatgggggcagggaaggggagcggaggtgagagacggcggcggaggccggagctaggacctgn

SEQ ID NO: 813 - DNA, 907 bp, Zea mays
  misc_feature (907)..(907): n is a, c, g, or t
  Peptide Sequence Number=SeqID_13380
  Probeset Number=SeqID_15216
taatcgaaaaataatcgtgttctggttcccagaaaaaaaaagacagggaagggagctccgtcgcttggggagagaagactgagatcgtgattttcctgcgtcaggctttggtggggacctggtgatgttcgccagagccttctgaaccgagacatagcatcttcacgccggtctagcggtcgggagggtggaattcattgccgtggttctctgccatcacaaatccgcccctcgacaagcaagctgtccgctcgggcgtctggatgattgatgcagcctggtgcatcgtggtggcatgtggagtctgctcagcgcccagtaaaccagggggcctggacgacgactccatggacgaactgtgcagctgcggcaatggagggccaccgctccctctcctcctcagtctgcgcccacccaccgctatgggatctggtcgcgcctcctctggtgcacagccgccctattgtcgccgccgcggggctctactggcggccatcgtcacccatcggccatgccgtagcgagctcgttgccggtactctttcgagggacttattggtgtcggttctgggggcttctccaaaggcgtgaagagcacatcgtaaggatcaaagttgcctgcaggaccctggaagtctcaatgatgcaaatcttcgccaagcacggttggagctttagaaatagaataactagtggctagttattccaatcccaactgcgcttgggtctttttgccgcttgtggcttcttttattttctggcagtactactgttttttggacggccgtcatctttgatgtaggccgggaacctttttcccattatctaaaaaaaatagcatggctctttgtgtttgctaagtttacaaatagagtgtttgatttgatgaataaactagtctattatcn

SEQ ID NO: 814 - DNA, 806 bp, Zea mays
  misc_feature (1)..(204): n is a, c, g, or t
  misc_feature (805)..(806): n is a, c, g, or t
  Peptide Sequence Number=SeqID_13381
  Probeset Number=SeqID_15217
nnnnnnnnnnnnnnnnnnnnnnnnnnnnnnnnnnnnnnnnnnnnnnnnnnnnnnnnnnnnnnnnnnnnnnnnnnnnnnnnnnnnnnnnnnnnnnnnnnnnnnnnnnnnnnnnnnnnnnnnnnnnnnnnnnnnnnnnnnnnnnnnnnnnnnnnnnnnnnnnnnnnnnnnnnnnnnnnnnnnnnnnnnnnnnnnnnnnnnnnnnnncttcgcaccatggagcttcgcctgtgatgccattccgggcatatggaatggctggggagcttcggggagcctcctcgttgctgatcggggacgctccagggaagattggtggccggagcaccttgaattgttcaccgccactggtgctccaccatggatcatcccactcgcgtgggcagcctcatcggcacctccatctccgcagcgaggttacgagtcacccgaagaccaagttggtgaagtacctgggaatctcaagtctaaggaagatgactggcgcatcgttagactcaaaactcatcaacgtcatctgcgaagtcttggtcatcaccctctgatcaaaatattagcaagagtgagctcacttatggtcggggctcagcaagtgggggaaataatgcgagttagcaaggtcaagaacaggtaccgcaggatgaggcgcatggaggatgctctggcgagttcgtgagaggtctaggtcgtcgtctcccagtcaactttggtttgctggaccgttgtctccttatattgtaactatttattttgtacagaactcctattatatagtaaagatgtgacattcgatcctgtgccatgattnn

SEQ ID NO: 815 - DNA, 792 bp, Zea mays
  Probeset Number=SeqID_15218
atccatccgcctcgtcgccgctgccccatccagcctcctcttcgatccgctcctcattgcctggtcgtgatcaagatgccccttggaaggatggctagggcaaggacacgcacagatcttggtggtgacagctcactctcctccaactatccactacggtcccttctcagttgagccgcagatgatggtggaacaaaactacactctgcttctgtgaacaattcatgtagtggttaaggacacaatggaagcacttgtggctgagcctaaagtagaagggaaataatctaagacccctacagaagcagttggtcaagtattggcttcatcaaaatttcttcaaaatgtcggtcttgtatctgccacaaagagaaacaacaatggtggtgatcctacacacataagagaacttgaggcaaagaagcaaagcacattagaagttagagctcagttagatgtcctcgagaaaaaggtagaagaatcagaagaagcaagggctaaggggttagaaaaattaatgatctgcaaaaaggagcagatgagaccaatactctccatcgtctctttagcctcaataagcagtaggtccaagcatttttgtgtggccttagtatgtcatattgctactgtatggtcctgattttgtcgtgtccttttgctactttccgttctattgtgctgaacttgccaacatgctactgtcctttttgtgctgaactcgccaacatgatgcagttttgaaaactttgatgatttggttactgatgaatgaaatctatgataatatgttgg

SEQ ID NO: 816 - DNA, 1583 bp, Zea mays
  misc_feature (1583)..(1583): n is a, c, g, or t
aaatcggcattcacgactcacgagcttcaatcagttaccagtctctagctctcctcgtgctgcttgcttctggaccatcgatggaggcctacgcggcaacggcatcgccacccacgacgacagccatgtgtgtggacaagctcagccaccagctcttctccctgctcgagagcaggctcctcggcgggtggtgcccgtccgtccccgggacgccggcgcgggcgctcctcgacggcggccgcgtgcgggtgctcgccatcgacggctgcggcgcgggcgcagaggacgcgctcctggccgccgcggcgctcgcgaggctcgaggccaagctgcgcgaccgcacgggggaccccgacgcgcgcgtcgcggacttcttcgacgtggccgccggcgccggcgcgggaggcgtcctcgccgcgatgctgctcctgaggggcgccgacggccggccgcggtactccggcgcaggaggcgctggcgttcttcgccgggagcgtcgggaccaaaggttggtgcggccggcgcgggcggtgggcgaagctcttccgccgcggttcccgaggcggcgaccgcacgctccgccgcgtgttcggggacgccacgctcagggacaccgtcgcgccgctgctcgtgccgtgctacgacctcgccacggccgcgcccttcgtgttctcgcgcgccgacgccgtcgagagcgacaccttcgacttccgcctgcgcgacgtctgcgccgccgcctgcgccgcgggcggcgcggtcgcgccagtcaggtcggtggacggcctcacggccgtcgccgcggcgtccgggggcgtggcggccatgtgcaacccggccggggccgccatcacgcacgcgctccacaacaagcaggagttccccctcgccaccggcgtcgacgacctcctcgtgctctccatcggcgccggcgcctccgtcgccaacggttcgagcacgccgatgcccgcacgctctccgtcgccgcgggagctggcgcgcgtaaccgccgagggcgtcgcggacatggtggacgaatcattgggcatggcgttcgggcgcgcgcgcggaagcaactacgtgcgcatccaggccggtaaggcgctggtcccgatccgcgccgacgaagcggccgtggccgccgaagcgatgctagcgcagcggaacgtggagtcggtgctgttccgcgagcggaggctgtcggagtggacgaacgccgagaaggtggacgcgctggccgcggagctggtcaaggagcaggagcggcggaggcgcagcccgcttccgaacgtggctatcaaacaggtcggcacaccgccgcggctgtcgtccgcgaccactgcttcgtcgggcactgggacggccaggacggcgtcgacgatgccgtcgccggcgtcatgggagtcacgcaggtagtagttgtgttgattttaggcggtaattgacgtgtgtacatgcatatatgaaatgcaaagctaggagtggggtgtgttgtttttcttctttgaacggacgctcaatcctgcgtgcaactcttcacgtttctagcaaaacgcataaaaaagcgctggctgtcatcctacctn

SEQ ID NO: 817 - DNA, 1583 bp, Zea mays; identical to SEQ ID NO: 816
  misc_feature (1583)..(1583): n is a, c, g, or t
  Peptide Sequence Number=SeqID_13530
  Peptide Sequence Number=SeqID_13530
  Probeset Number=SeqID_15219
  Probeset Number=SeqID_15220

SEQ ID NO: 818 - DNA, 1018 bp, Zea mays
  misc_feature (1)..(1): n is a, c, g, or t
  misc_feature (1018)..(1018): n is a, c, g, or t
  Peptide Sequence Number=SeqID_13531
  Probeset Number=SeqID_15221
naaatccattcactaccgccggcgccggatccaataggaggaggaggaagatgactgtgggcatgatcaacgcaaacccggtggtgcacgagcggccggagcgcgcctcgcacccccacgccgccgatgtgctcgaccctctcgatgtctttgatacggtgcgggacatcaaggacccggagcacccgtactccctggagcagctcagcgtgctgtcggaggagtccgtctccgttgacgagacgctcggacgcatccagataaccttcactccaactgtgcagcactgcagtatggccacagtcattggcctgtgcctccgacggtggcactcgccccggcggccgcgccggccagcgcgacgaagagaagcacgagcaaggagccggtgctggcgcgagcactgccggtcatcgccgcggccatggtcgtgtgtgcgggagggcgtcgtcgaatgacggtgagcgagcttcactgatgctggggagggtctccatcggcgacgtcgtgcgcgcggtggtggccgagcacagggatgagctgaaccggctcaatgactacatccagggaggctactaggacggcgtgtgcagcgacgaccccctccgatcccgccagtcagtgagccgcgtcagacgcatccccgtgccgtcgatcaccgggatgtgtctgacgcggctcaatgactacatccagggaggctactaggacggcgtgtgcagcgacgaccccctccgatcccgccagtcagtgagccccgcctttgaaatccaataactcggaacaatgatgatgacgaaataggccgtgttttcttggacaatgatgttaagttcggcaaggttttcctttctctttttttattctactgcgtggtctatgtgtatattgccaaaggcatgcgtgagccatgcgcccggtgctggggcgcagagaccatctgatggtggaaacaccggaaataagagcgtgccgctgtgtgtttcctttgaaggaataaaaatggtgttcgtgttgn

SEQ ID NO: 819 - DNA, 1061 bp, Zea mays
  misc_feature (1)..(19): n is a, c, g, or t
  misc_feature (1058)..(1061): n is a, c, g, or t
  Peptide Sequence Number=SeqID_13532
  Probeset Number=SeqID_15222
nnnnnnnnnnnnnnnnnnntcccagtcgcccacgccccaccgacccgcccccagcctcggagctccgtcggctgtgccccggccgtccgtctctggccagagctccgccacacccagtaccaccgccagccgatcagagctccgcctccggccagtggctcaggccgcccgcccgcctggcaggacgcctcgccgagctctttcccggcagctgctcgcccgcgccgatcttttcttcggcagccgcgcgcccgcgccaagctcctccccgcggatccgcctctgctcagtctgagctccggccagccgcgagctccgtcgaggcgtcgacgccgaggcccagctccgcccgtgagtgcctgtgccggattcagcaaacagaaatttgctctgctggttatatagatggaggtgccaatgaacaccacgcaatctggtcctcacttccctgtgcagcatcggtccctctcgttagacatcaagggaaataaaacagatattgttatcaataaatatgaagatacctttctggtgattgtgacacaaatcggctgcatgggaaccatactagctgccaagaaagatgaaagtgttttctccaacccaacctacaatgtgtctgttctttttgggaagagagatgagccactcctactagcttgcgcacgtcaacttattgagcacataagtggcagtggctcagcccggtcattggtgatttctctgggtctgaaagatcattctcagggaacactgaaggatattactgtagctgtgatcgacaatcgcctttggtgatgattgaatagctgatgagctgggcttgggattggctcgatggttggcatattcagcccatcgataaagatactgtttagccatcgtttataccatgcactaaattctggtagttttgtagttagaccttctatctacttggattaacaaaaggtgggtttaagctgctgtcaaaatttgagtgtcaattttcacgctaaacaaaaggcactgtacactggtaaaacacttctgaggcgaatcatgcttttcgaggctannnn

SEQ ID NO: 820 - DNA, 583 bp, Zea mays
  Peptide Sequence Number=SeqID_13533
  Probeset Number=SeqID_15223
aatccaactgagacagatcctttactttcgcgtgagatagctgccaggaactgctttcagccatcgagggcaagtsagcaaccaggaattttgggcaccgccaccgtcccgcacttcgccaccgcgccactgccaccgccgtcctggacttcgccgctgtgccgccagcaccgtcttggacttccccgccgcgcagccgccttgctggacttcgcaacctcgctcgtcgacatcaccagtagccgtatcctcgtcctctgtatcagttcgataaggttgctcgtgcctacaaatttacagatattatgagaaattcaagagttaacattgcttatcaaattttcgggaacctttaataatctttgtatcatgctcgtcacatgtgatttatttgttcttttctagaacctgtaactacgatctgttacatatgagttacttagagataagacaatattaagggtttgttcggttagctctcagtccatgtggattgagtgggattggatgtgttttaatctcaaacaagtcaaacttcttctcaattttttccaatcacattcaatccatgtgtatttttttc

SEQ ID NO: 821 - DNA, 814 bp, Zea mays
  misc_feature (1)..(1): n is a, c, g, or t
  Probeset Number=SeqID_15224
naataaaataaataacatgagcatgtatataaattaaaattacaccaaagttgattaatgcaccaacaacatctagttttaggagatgttgttgcacagtayaatgtaacatgcgttctgtgacttttttttttcttccccacactgcatggmgcatgcagcctcaagtttttttttgggtgtgtggctgaatggacggcggtcattgctccaagcggaaaayaggcgagcgggtcaatagcggccactttttttaataaaaaaaatctcaaccgcacgctctrttttgtttactggaaaaacggatcagcgtgctactccttccgcacgcaatcgtccaggccatgcaaggcattagaaatttggaggaccggccgtgcatgtggtccatggaaccgcccattccgcgctaaaaatggctagctgcggcagcagctgcagactgcgctcccgccgcagagcgaataggtctcacaagtttttttttcaccgcagtaaatttcataccacttttctttaatttttttcgaggaacgaatgaagaacaatagattcatcctacttaaaaaatgcataccacgtttgcgtagagggcaaatcgaagacggtcgcgtaggacagttcggctaggccggtgacctgccgacttgacggagagttgatgcagatctgatctcgcagcaacgtcgaggtagagcgtgctgataacgtgttgagaactacgttaccacggatcaccagatccgctcccttccctcccgtcagcagtagaggcgcaagaagttgtagagtacccgtctcccttcccataagc

SEQ ID NO: 822 - DNA, 774 bp, Zea mays
  misc_feature (774)..(774): n is a, c, g, or t
  Peptide Sequence Number=SeqID_13534
  Probeset Number=SeqID_15225
gcacgagaccattacctagaacatcctaatcgaaaaaaaaacccttcttcctctcccaccctgacggcgcccatcgctccctctacctgtcctagccacgatcccctcgcctccttgttttctcccctgcgcacgcctgcaagccagcgctgctagccgcgccccggtgccctgctccctcacgtggtcgttccccaggtgctagctgctcacctcccgcgcctgcgccttgggctctgccccatcgggccgcctgtgagccgccgtgcgggctagccagtggagccccgcgctggctcccgtggagctacctgcacacggcacaccctctactgcgctccatggccgaggcgccagctgacgagctcgtccaggacgatgcggccagcgcccctctctctacagcgactgcgatccattttcgagcttcgaggaatcgacggtcaagctttggcgaccaagtgatcgaactcttcgagttctacgaggctgaagaccctgagcatctatttggtgaaggttgcctttggtgcaatctatgctcaggtaaagaaggcgtcgaggcggatctccagaagttccaggacttcgacgagttcaaggattaggctagcgacctccccccattcagctgcctgtggtgggttaatttatgttggctatgtttctattctgtgtacattgattatattatgtaaatgactctagtctttcatattattacttactctttattgttattcgaagcattgtgctatgatgagtcatttatgn

SEQ ID NO: 823 - DNA, 907 bp, Zea mays
  misc_feature (907)..(907): n is a, c, g, or t
  Probeset Number=SeqID_15226
gcacgagaccattacctagaacatcctaatcgrraaatatattttttatcttaaacccctactcaatcttatcctcttctcattcttctttctccctcccgtgtcttccaccacgaccgaagccacgcgccgccgcacgcctccgccggcacgtccccccccccgcccgcccccaccgctcccgccgtctgtccgcttcttccgtccgtccgcttctctctccctccctctcccaccccgcgagaccgccggcgaatttgttgcagtgcactgaagccaaccgctgcgggacaggaggaggaggaggagctgtttcaacaattatccctcgcgcgcccaggccagccccgcccccgcccactctcctgatctccatcttggcgccaacagtggttcacataggtttgctcttgagaattaagttgttaatgaagctactttccgttgccctgatgagctaggatggaaaccacagaggacacctatcatatcatcagatggaagcatcttacacgcaagacagcaagctttctggtatggagctgaatggtactctggattatcaattgttaagtctacaggctctgaaaacaatggacttaagcaacaaccacttgcatgattcaatcccttaccagttgccatcaaaccttacctatctgaatctggcaaaaaataacttctctgttaaaacaatctaactgcaaggaaccattgggtgcagcaatctcagccacaactcgttatttcagaaaattggtgaattttctttcagaattgtatattgtgtaaggcctactgtatatttcagaaaattggaagcctcaattcactttcagaactgtaaggcctacttaatcgttgttttcgtatgcaaacttgacttgaatattgtgttgttgaaatn

SEQ ID NO: 824 - DNA, 1454 bp, Zea mays
  misc_feature (1454)..(1454): n is a, c, g, or t
  Peptide Sequence Number=SeqID_13535
  Probeset Number=SeqID_15227
aagtcacatcagcgcgtccgccttcacctatcatcatcgtctcaatctccggccggtctcagccgggcacccaaactgagatggcgtccgtccggtggtcccgccgtgggccctgatcgcctccttcctcgtcgtcgcggcagtgggagcccagccgatggacccgaagaaccccatctcgtcggaccccaacgtgatccccgtatacatgagccccggctcgccccccacctacgtgagctgttacaacagcacccatgggcagcaagggtcggaacccacgtgctccatcctcgcgcgccagtgtccccgcggttgccgggacacctgctacgtccactgcccgtcctgcaagctcgtctgcctgtgcgagctgaccggctcggagtgctacgacccgcgcttcgtgggaggcgacggcaacaagttcctgttccacggccggcgcgacgccgacttctgtctggtgtcggacgccaacctgcacatcaacgcgcacttcatcggcaagcgcaacgacgcgcgcgccgccgcgccggcgcgggacttcacgtgggtgcaggcgctgggcatccggttcggcgggcaccggctgtacctgggcgtccggaggacggccgtctgggacgacgccgaggaccggctggccatcaccttcgacggggtgcccgtggcgctggacgccgtggccggcgccagctggagccccgcggcggcgcccgcgctgtccgtgttccgcacgggccccgccaacggcgtggtggtgcgcctggacgggcggttccgggccgtggccaacgccgtgccggtgaccgcggaggactcgagggtccacggctacggcctgcgccccggggacggcagcctcgcgcacctcaacgtggcgttcaggttctacgccctcagcgccgacgtgcacggcgtgctgggccagacctaccgcccgggctacgtcagcgccgccggggtggacgcgggcgccagggtccccgtcatgggcggcgccggaaggttccaggtgtacggcggcatcttcgacaccagctgcgaggtcgggcggttcgctggcgaggaccacgggcccgtgggcggcgtcatcaccgtggaggagccgaccgacgcgctctgcggcagcggcaaggccagcactggcctggtctgcaagaagtgacgactgacgaggccggcggcgtgaggtcccgctccgcttgtgtagtgtttttgcttgtgtgtacgtgcgtgctgacgtatatcggtatatatagctgctgctgctgctgcgaagtatagtagcaatggttctatgtatggcggggcggccgaataaaagactgtgacgcgtctcttgtgctatagtcgtgtggacaacactggaaaaaatgccgtgttggtctggtcacgtaagaagtgtgtattattattattattattattattattattattattactan

SEQ ID NO: 825 - DNA, 582 bp, Zea mays
  Peptide Sequence Number=SeqID_13536
  Probeset Number=SeqID_15228
atctacctcgagttctactcacataccactgcatgggtgttggggttcttgtattcctgctagtgatgaccctctcccacagccaccaagtctactctgtccagagcatcaagcgccagtggtgaccacgctcacaattcttcaccccaccatagccagaacgttctagggagttgctggcctatatgaagcttgttccgtaatcatctcagagttcccagaagaagatgaaattcaagaagtagtttctgaaaaggagtctgcttcagtgcctagtgcctgctcatcaagtgatgggagccatctaactggggtttaatagagggatttagacctctgtctctgcaacaaaggtaatgaggagtactctaggtgttcgtgaggctagagggcgcttccagttctagaggaggactagctaggtttatgtataagctttggagggttcctaccttcctgctattgtaataagttatgcactttgagtatatcaggacttgtaataaatataactcttcctatgtaataaccttcagttttaaatgaaaagaatattttgtaaagtcttccgctcttatctcc

SEQ ID NO: 826 - DNA, 1297 bp, Zea mays
  misc_feature (1297)..(1297): n is a, c, g, or t
acacaagcagcaacatcactgatcgccgtgcaggcctggtacgtaccacacacacacacacacatacagaagaagaacgtaccttgcgctacaaccccgtcgccgccgactacgccgatcgtgtccacgggaaccaagcaaagcaaagcaagcgacgcatcggaagaagccggagaccgaccgaccgaccgagctacctagctacagctcatcagcccatggtgaagacggcgacggcgacggcggcggcgaggcacggcggcgctcataagaggacgtacaagggcgtgcggatgcggagctggggctcctgggtgtcggaggtgcgggcgccgggccagaagacgaggatmtggytsggctcccactccaccgccgaggccgcggcgcgcgchtacgacgccgcgctgctctgcctcaggggctcggcggccgcgccggacctcaacttcccgccccgccgcccgctcgccgacggcctccacccgctgccccccgccgccatgtcgcccaaggccatccagcgcgtggccgccgccgccgcggcctgctgcgctcctcagagtaacggcattggcagtgcctgctgcgccgcgccctgcgctcctccgagtaatggcattggcagcgcctgcggccacgccgagaccgccccggcgttgagcggcagcccgccctccagcgacagcgacgtctcctccccggaggcggggtccaccgccagcagcgacggcgagctggcccgctacggcgacggcgacggcgacggcggcgtcagcgtggactacggctcgctcgccgacatcgacgccttcttccagtcgcccaagtgcatggacgacgaccactactactacgcagcgctcatggacccctgcggcgccttcttcgcgccggcgccatcggttgcggcggacgacgacgcagcagccgccgccggatgctgggaggacggcgacggcattgcgctctggagcttcagcttccccgctctggactgctgagctgaagcggcgcagattccgctactactgacgattgacgactaatcgccggtcaagcgatggaaaccgctttatttgcttcatcgacggcacaggtttccgcatacatgataaatttacccaatttaattcgatgtatgtaaacattcttaataagctgattgttaagcgttgtagtggtggggagctctcatggctgaagctgcatgttttaaggtagctttttccatggagttaacctctttgctattgcttgtctatgagtaaacaaaaaaaaaaacagttttattgcn

SEQ ID NO: 827 - DNA, 1297 bp, Zea mays; identical to SEQ ID NO: 826
  misc_feature (1297)..(1297): n is a, c, g, or t
  Peptide Sequence Number=SeqID_13537
  Probeset Number=SeqID_15229
  Probeset Number=SeqID_15230

SEQ ID NO: 828 - DNA, 1547 bp, Zea mays
  misc_feature (1543)..(1547): n is a, c, g, or t
  Peptide Sequence Number=SeqID_13538
  Probeset Number=SeqID_15231
cctcccttcccaccatgattaccacccacctctccccagccctcaagcamcggtttcccgtccccgctccactccacctaccacacccaccaccacctcccgctccccctcccccgccggcactgccatctcgctaagcccgccgccgccgcctcgccagacctcctcgcgagcgtcgagtccgtggcctccgcggcctccgtgctggccgccatcgtgctggtccacgagtcgggccacttcctcgccgcggcgtcacggggcatccacgtctcccagttctccatcggcttcggcccggcgctggcccgcttccgcctcggcgccgtcgagtgcacgctccgcgccgtcccgctcggcggctacgtgggcttccccgacgacgacccggagtccggcttcgcgcccgacgaccccgacctcctccgcaaccgccccgtcccggacctcctgctcgtcgtctccgccggcgtcgccgccaacctcgccttcgccttcctcgtcgtctacgcgcaggcgctcaccgtcggcgtgcccgtccaggcgcggctccccggggtgctggtgcccgaggtcctcccgggctccgccgcggcgcgcgcgggcctcctccctggggacgtcatcctcgccgcccccggtgccgcgccggacccgtccgtgcccgtcctcgtcgacctcatgaaggcgagccccggcaggaaggtgcccctcaccgtctccagagccgggcccgggaagctggagccggacccgcggcccgtcgagctcaccgtcgtgccggacaccagcgccgacggcacgggccgcatcggcgtgcagctctcccccaacgtccgggtcacgcgcgtgcgccccgagaacctggccgacgccaccgtcctasccgcgcgcgagttcgcgctcctgaccgtgaccgtgttcgacgggctcaggcagacactgctcaacttctctcagtcggccgacaaggtgtctggccctgtcgccatcatcgcggtgggagcggaggtcgccaggtccagcgcggacggcctgtttcagtttgcggcggtgatcaacctcaaccttgcggccataaacttgttacccttaccagcgttggacggtggcacgctggcattgatccttctcgaggcagctcgtggtggccgcaagattccgcgagaagttgaacaggggatcatgtcatcagggatattggtggtgctcatggttggcatgttcctcatcgtgcgtgacacactcaaccttgatttcatcaaggagatgttgtgatgatgcttcggatggaaattaactgatcgcagctgtagtaaaattgccggtatcagaacatggttggcttgggaaattaaggttagttgttgtgattctttttttttcacccttttatggaactgctctagcactccaggctttgctacactgatcgtaggtccttgtattgcaattttcggaatgaagtttgtgatcgaggcaccaaaaaaaaaaccctgagttgttcaaatgtaaattaccaattccaatgcataggtagttnnnnn

SEQ ID NO: 829 - DNA, 646 bp, Zea mays
  Peptide Sequence Number=SeqID_13539
  Probeset Number=SeqID_15232
aagcacacaaagaaacacacacacacaacactaccttttcatcagtgcaatggcatccaacaagtccattgcgctccttgtcctagccttagcactcatgttaacggtttcagtgcatggacaattatcgtcttcgtcgccgacgcctgcaccctctcctgctcctgcagccccaacaccgacaccatcaccatcccctgcatcagcaccagcgccgactcctgctccggcaccatcccaaaaccgatgcccccctggcttccctgacctaaaatccttacttgaaggcattaagaggtaccttgcgcaggctatttatattttctacgttccatctcgacagaacccaggcaacagcagcaacaaatgcctgtgctttccggcctctacaagtattatttccatcttcagtggaccctacgaatgcgttcctgctcctttaaagtgagcatgcacaaatgtgcgcatgcatgtatggctttagagcctgatatatatacatactatactatgaataagtgcatgcatgtccggtcttctgtatgtggaggttcattggttccatgcatagctgcagtctgtgcatgttgatgttgtkgtacatgtgttctcaaaatatatatcaatatactacatacttatgatg

SEQ ID NO: 830 - DNA, 812 bp, Zea mays
  misc_feature (812)..(812): n is a, c, g, or t
  Probeset Number=SeqID_15233
gggattcttcaccgccgacaatattttgacgttaaataatctggacgggggcgagccgtctcctctctcccccaccctctgcaatctggagctcaatttctggatctcgaatcgtctcctccgctcctctccactctcgagctcgacttctctgagccgctagctacccagcgccaacatgatgtcaccgtcggtcagccctgtcgcgcgcaacgtcggcgtctctccgccgtcggcccttttgaggggagctcggttcagcaagaccccgactccaggggccgtcgtgcagatcagcttcccagatactttctgggcgaccagcatgaagggagcccatatcaggttttccccaatgactccggcatccgtcgtccagatccaatgcagcggcggcgtccaaggcatgccgtgggtgggccacgtgatgaggaccgtccttgtgggcccatgtggctccaagtcaccgtgtttttattcctgactgtcaacagcggcatggcgatgtacctgtcgtggggagacgctggggacatctcgttcgttgtttccacatatataaacttgctcggcctctcctacctaataatgcggttccgaattccaagaggagggagcagctcaaggtgtacgtctggatgcccgccgtgtcgcttgcgatcgcatttgcataccagaccatcggcagcactgctaagtcgacactgcaattgacactgctgctgtgggcgatacccgcgggcacaggaatctctgtgtttatcatcttttgtggcaggtaaatctgagtcgatacaagttgtttcggctgn

SEQ ID NO: 831 - DNA, 739 bp, Zea mays
  misc_feature (739)..(739): n is a, c, g, or t
  Peptide Sequence Number=SeqID_13540
  Probeset Number=SeqID_15234
caccaccacagcacaggcccactgccaccgctaccgctaaccatggcctcctcagcgtccctacagcggttcctcctgccctccccgcacgcggcggcgacggcggcctcgccgtcctcccggctgcgccgcacagggcgcgcccgcgcggccgtctccgtgcctccgccggcggcggcgggggagcaggtcccgacggagcggctggagccgagggtcgaggagcgggcgggcgggtactgggtcctcaaggagaagtaccgggcggggctgaacccgcaggagaaggtgaagctggagaaggagcccatggcgctgttcatggagggcggcatccaggacctggccagggtccccatggagcagatcgacgccgccaagctcaccaaggacgacgtcgacgtccgcttcaagtggctcggcctcttccaccgccgcaagcaccagtgtacgtccactcccactctgcaacagggctagtttacttgcatgcagctcctaatgcggccgagccgcttgccactcgttcggtctcggacgactcctgttcttcagttctgtgacgtgctgtgtctgctacagatgtgctgtgctctctgagacataatgtctgccaatcgtttcttacggccggcttagagctcgcgtctgaatgttcgacgcttccgcctgatcgttttcgcgcgttcacgtttaccttttgggctggttctggaatctgcatcttggtattgttttn

SEQ ID NO: 832 - DNA, 1352 bp, Zea mays
  misc_feature (1)..(1): n is a, c, g, or t
  misc_feature (1352)..(1352): n is a, c, g, or t
  Peptide Sequence Number=SeqID_13541
  Probeset Number=SeqID_15235
ngcacagagtggtaagcatggcgagcaccacagacaaccgtggcctcctcgtcgtggccgccgccaccgtcgtcctcgccgtggccgcggccccggcgcatacaccggggggcaatactgctacccctccgccgccgttccggacggtgtacgcgttcggcgactcgttcacggacacggggaacacgcggtcgacgacggggccctactcgttcggctacgtgtccagcccgccctacggcgccaccttcttccaccgctcgaccaaccgctactccgacggccgcctggtggtggacttcctggccgaggcgctggcgctgccgtcctacctcccgccctacctcgccgtgtccgtctccaacgccaacgccacggcggccggagccggcgtcaacttcgcggtggccggcgccacggccatcgagcacgacttcttcgcgcggaacaacctcagcatcgacgtcacgccgcagtccatcatgacgcagtctgggctggttcgacgcgcacctgctccgctcctcctcctccgccgccgccgccgccgacgcgctcttctgggtgggcgagatcggcgccaacgactacgcctacacagtggtcgcccgcgacaccatccctcccaagctcgtccgcaccatggccgtccagagggtcaccgccttcgtcgagggcctgctggagcgaggcgccaagtacgtgatcgtgcaggggctgccgctgacggggtgcctgccgctggccatgacgctggcgcgcgccgacgaccgcgacgccgtgggctgcgccgcctccgtcaaccgccagagctacgcgcacaaccgccgcctcctggcggccctccgcgcgctgcgccgccgccacccgggcgccgtcgttgcgtacgccgattactacgccgcgcacctcgccgtgatgcggagccccgcgcgccacggcttcrmcgagcccttccgcacctgctgcggctccggcggcggcgcctacaactttgacctmttcgccacctgcggvtcgccgcaggtcaccacggcctgcgcgcgccccgccgagtacgtcaactgggacggcgtccacatgacggaggccatgtacaaggtcgtcgccggcatgttcttcagtggcgacggctactgccgcccagcgttcaaggacctgctggccatgaaagcccgccaggggaagccgtgattttgagacaatcagaatgcacgttccaattacaataagtagagctgcatgcgtgacgaatccatgtcatcttcatcgtgaacccttaaccatttatcaggcatttataattggatccacatacgtatgatgatgatgagcacaaaggatttaacttn

SEQ ID NO: 833 - DNA, 1710 bp, Zea mays
  misc_feature (1710)..(1710): n is a, c, g, or t
  Peptide Sequence Number=SeqID_13542
  Probeset Number=SeqID_15236
ttggaaaatttgcagtttctatgtagcagatgtacatcctccacgtttggaaaactgaaggttcttaagctaattgatcttgacgtttttgaaggattttgtgaggcagtgcatggatgtgcagtagcatttcctcagcttgagttattggaaattgacagctgtaaaaatctagcagctctaccagaagcatcgtattgtggtggagatcatacagtggcgcgctctgcatttccagaactgaagaaactcgtattgcgatgtttgcgtagctttgagagatgggaggctgctgcccttgaaactgaagaaggacatgcaatattccctctggttgagtgtgtgcatatcaatagatgcccgaagttaaaaactctacctagggcaccaaagctaaaaagtctgtttatacatggagtaaatgaacatctctctctaggaggggggatcagatgtatgacgtcgttgtccactttgtttctgggtggcgtcaagctggattgtaaggagagatgggaccggccgtcgtatgtgactgtggtaagtatgcgactaaggagctgtagtgtgttcttccaaccacatgcactagcactgtgggtttgctttgggcagctgcaagatttggaaatttatgaatgcgatgatcttgtctactggccggagaaagtattccaaagcttgatttccttgcggaggctagagatttacagttgcaagaacctaattggatacgcagaggcggtggcgaatggtcctgaccaggcaacttcaggaatgagccagttgcttttgccccatctagagtctctagagatattggggtgtgaaagtctggtagaggtattcaatcttccctcgtccctcagggtaatagatatttggggttgctccaaactacggttcatgtcagggcagctggatgcactcaataacttagtaattgtcgacagcccggagttgcgatcactagaaacatgcatcgtagatctcccgtcactggaaagcctcgatctgcgtggttgcgaaaacctgtcatccttgcccagtgcgcgggcaggaggacgacaggaatactcatctcttggtaagcttacaattagggattgcccaggtataaaatcgctgccttcagctctgcagcagcgattggacagcggcctcgtggatctagatccccgtcttcgtcaagatccctctccacggctgcttgggcgtctctgcttacggagccgaatgtcgcgcttcgtcgctgattaaccattacggtagcatcgagcgagacggagccgaacatcaaagcacaaagaaaaatattccttattaattggttgtacaatacaatatggtacggtgccttacataatcctagtcttcttcgttccttaattggagcctcttttgtcaccattctctgaaacacaaaacatgcagttatgtgatttggaatacctgctgccgacgacatttgcctccgattcctgcagcttctggcacctagagatgtctagctttgcaggattacgttttaaggtttataccctgtgtttgttgggtgtcgtgtttatatttatgtttgtggtgtaagattgcaccctatattggaaatgctggtcttttgatgttagtttgtatgtcaggctgtgccctcccttttatggaggacaaagccagaacatcgttttcattatctaaaaaaaactcttgtgn

SEQ ID NO: 834 - DNA, 678 bp, Zea mays
  misc_feature (1)..(1): n is a, c, g, or t
  Peptide Sequence Number=SeqID_13680
  Probeset Number=SeqID_15237
nacacccaacccagcctatgtgggctcaatggacatatgtctcgtctcgtcaccttccaaaggctcccgagattttgagcacatgatatatatatgtaaatgtgaaattttgaaagattaacttttttatatataaaaaacggccgtagcagtgaatctccgccggcacggttcagcaacactttcgtcgagtacccatgccatgcccagctccacccgtcaagttttgcatgcccacaccacggcacactcgtcgtcgtgtgttcgcaggtctacaacaagactagtacaaccgccttcgttccttctggagccatgcacatccccggacgccggaggccttgtctccgctgtccgctcgcagcggcgaatatcctttccatctccggcggcagcagagcactggcccgctatctagctgctccccttggccgcccgcggccgattctgccacgcccatcccatgtgctgccccctccgaaatgggacgagctcgatctaggggttccctagttagtagtcactcactactcacagagagactctggtgaaacacatcatgtgcctagttgtgaatgcattgcagcgcttgcaccgcagcggcagcacccggcgcgccattgccggcaagctagcacaggttttcccacccagtgcccttgcttgccttcacttctc

SEQ ID NO: 835 - DNA, 1638 bp, Zea mays
  misc_feature (1638)..(1638): n is a, c, g, or t
  Probeset Number=SeqID_15238
aaactccaatccagcgttgagctcgacagctcgtgccaaactaggccgcagctggaaataccctccgctccacttacctgctgctggtgagcaccgcaagcaccaactcgcgcccaccgctccgctacaccagccgacgccatcatgtctaccgtcgccgccgcccccaccgtcgtgaaatcggctccggagctcgtcgcgccagtggggccaacacccggcggcaccctcccactgtcctccatcgacaagaccgcggcggtgcgtgtgtcggtggatttcatccaggtttttcccccggccgtaggagcaggcggggacaaagacgccgccgtggccgcgatgcgcgacggcttcgcgaaggcactggtgccgtactacccggtggccggccgcatcgcggacgccagccccggggagcccgtggtggagtgcaccgggcagggcgtctggttcgtggaggccgctgcgagctgcgcgctcgccgacgtcaactacctcgagcgccctctgctcatccccaaggaggagctcctcccgcgacctccccccgaggagaagctcgaggacctcgtcctcatggcacaggtgaccaagttcgcctgcggcgggttcgcggtcgggatctgcttcagccacctggtgttcgacgggcagggcgcggcgcagttcctcaaggcggccggcgagatggcgcgggggctgccggcgccgtcggttgcgccggtctgggaccgcgacgcgatcccggacccgcctaagctgccgcgcggccccccgccgtcgttcacggcgttcagcttcgtgacccaggtggtcgagatctcgccggagagcatcgcgcgcatcaaggacgacttcaaggacgcgacggggcagacctgctccaccttcgacgctgtcacggcggtggtgttcaagtgccgcgcgctggcgatggcgctccccgacgatgccgaggtccggctcggcttcgccgccagcacgcggcacctcctccacggcgtgctgccgtcggtggacggctactacggcaactgcgtgtaccccgtgggcatcacccggaccagcaaggcgatccgtgaggcgtcgcttccggaggtggtcggcgtgatgcgggaggccaaggaggcgcttaccacgcggttcacagactggatgcgcggcggcgccaaggacgaccactacaacgtgccgttggactacggcacggwgacggtgtcggactggagccgcgtcgggttcaacgaggtggactacggcttcggtgaaccggggtacgtcttcacgctcaacgacgacgtcaacatcgtcgcgtcggtgatctacctcaaaccgcccgcgcccaagcgcggcatccggctcatgcttcgctgcgtcgaggaacctcacsctgcggcgttcgccgaggagctcgccaaattcgcktaratggttgtttagtctkggtttatctatacttcattggtgtcggacactcggacctcatcttttacaatattatccatacttcattggtgtcaggcgctcattgattgtcatcggcattgttggatgtgcgggggacatgaaaaagctattacaagaacatttctggtatgcctaaaagtacacatattaaatcatgaccatttatcn

SEQ ID NO: 836 - DNA, 1350 bp, Zea mays
  misc_feature (1350)..(1350): n is a, c, g, or t
  Peptide Sequence Number=SeqID_13681
  Probeset Number=SeqID_15239
cagccgtggagcatcagcaatccacatcatctcccttggccgagcggttcccttgcggcgcccaggatccttcccagacgcgctcggctccctggtctgtcaccttgccggcgttcccctccacctagcatgcccgtcaggccctctcttcgccaccctgccatggagctcgtcccatgcccaacgccggccaacctcacttcccatggtcgtcccttcctccttcctccctatggtcgacggcctcaccttccatggcttccaagatctgctcaacatccattctagcgcgcacccctgcttccgtttcctggtggccgacgccccctccctggagctcgcccttgctcatccactcgtcctcgtcttcattgcgggcatcagcgcccttcgcctcctgccggtgagcagctcgccgccggtcgttgcgactccatcccgcttggtcacgtttgtctcgctgctccttccaatcagcacctagcgctgctcatcccgtcgttgatctgcgctccaagctctccttgatgttgcattcggtgggcaggagagaaattggaggaatctggcgaagaagaaaagaaccctgtctgtcgcgcccaagccgcgtcgagccccttcgtctcgccctttccctacaccttcactatccatggtcgctactctcctttccctgattaatactaggcgcagcagcagcaacatgccagatctctgtagcccaggtgagactaactgcttgtgttttgtttattccccaccaattcctatatttgattatttactgtatatgtttgtgtgtttgtggtggaggtaaatcctaggaaatttagatgagaagaaagctttagcgaggcgcttgccaagtgcttggtgaatcgcctcaatcggatgtggttgtcgatctcgcggagtcgagtcgagtttagtcgtggtacgctaattgatcacgtgatgtggaggacaagagctggatttgtctcatggtgatgctgatgaataaacctgaagattgatgatctgatcgagtgccagaataggagatgctcgccaaacaagcatcatctaacaacactaacctagtgtcatcccaggttataagtttgttctgttgtagatggtgctaagtgtcgatgggcttggccttcttatataagtatatcccatctttagctttttattgaggattgtcacttaagctaacatgtaatttaaaacttataaatgctttatacattttaaagtgtaattcttttgaatcactttcttttgtaatcactccgataattgtataatgtaaacttattgtaacatgtaatcattttgcaataaagaatttatttccgctgn

SEQ ID NO: 837 - DNA, 1736 bp, Zea mays
  misc_feature (1736)..(1736): n is a, c, g, or t
  Probeset Number=SeqID_15240
atgaaacaacccccatcaaggtggggaggaccgtaccggaaaatatcgggagcaaaaaatcagaccagattttcccccgtgaggcatgaatccagtgttccaagctcccagcggaacaaacaaggaccaatccgtccagggatcgttggagcccgatccgttcgattcgtcgaccaagggagcggcgaagccgcagtcttcattgtcgtcgctgatcttccttggtacggggtgctccggctcgttgcccgacacacggtgcctcctcaagccgtcgacgccgccctgcggcgtctgttcgatgggcgtctccctccctccggagcggaaccccaactacaggctgaacacctccctcttgatagattattgccatgacgaaacccacaagtacatcctaattgacattggcaagaccttcagagaacaagtcctccggtggtttgtccaccacaaagttccttccgttaattcaatcatcctgactcatgagcacgcggatgctgtcttaggccttgatgaagtctgggtggtacaaccaagaaatggcagaaatgacattgaacaaattcctatttttctcacacaattcaccatggacagtatcgcaagaagatttccctacttgatggagcagaagcccgaggatggcgatgaagatgcccaagccgcgaaaattgattggaagataattgaggatgatgtcgacaaaccatttgtagcatcagggctagagtttgtgccgttgccggtaatgcacggagaggggtatatttgtttaggctttttatttgggaggagagccagagttgcatatttatctgatgtttcgagatttctacctaaaactgagaatgttatttcaaagtctggtgctggacaacttgaccttcttatattagaagcaaacgctttgcatggagtgggagattctttcagcacccatttaactctgagtgagagtcttgatgctatcaagaggatccgtcctaaacaagctcttttgattggaatgaggcatttttttgagcatgaaagagaaaaccagatgttggccgaatggtcaatcagagaagggatacctacacaactggctcatgacggcctgcgtgtattcattgatttgtaataagggacagaagtaactcgaagaatattctcagaagaaaaggtttcctgctagcagtaacctcaattgtatcctctatgactgaggctgtgaagagacaacataccacttgttgtttgattgcctcttcagttcagaatgctggaattacgtgggaatccagttgaatcatgatatggatttcttctcgatgattgaggctgctaaaggtgcttttcgatacaatttcttcatggatatcttggctgtggtggtttggagtatttggaaccagagaaatgacttcatcttcaggaccattgctccttctatttcttcttggcagtgctgcttcagtggtatgctgaagatgcaaatgtttaggtttagtctctctcggaggctcagggtgacttcgtggctaattctcgatagcctgccccttcctctccccccgcttttcttctttgtttcttttgatcatgttatctcagctatctattttttattaaagaaaatcgtgttgtaagggtttaccctacaacctttccccttaaaaaacaagggaccaaaaggcacaaatattcgtgagtattaacttatataagtttgaatttacctttttgtn

SEQ ID NO: 838 - DNA, 595 bp, Zea mays
  Peptide Sequence Number=SeqID_13682
  Probeset Number=SeqID_15241
attgcaggaaacatgttcacacaaaaagactaaaataagttcacacagcatcatgcatactactgctctatttcacaccaccatcaccaggaagacgcagaagtagcaaaaatcaatccatccatccaatttaagatgattcaaagaataatttcttcctcaaaaatttcaaagcagcaacatgctcaactctgacttcctcaggcattccagaccatatcttctttgagtaggcaagtaaggtatatgacacatgggcaatagatcgagcacctttgaaatttttgaggaagaaattattctttgaatcatcttaaattggatggatggaccgatttgcagggcgcgcgtagcagtagtagcaatcaaggtcactagtatagtctgtcagtacgacgacgtcgatcagtcaatgtctcccctgacgataattattaagtcgatctattcagtagtaacttgttaagccatgtagattagtagcagctggtaatctttgtaaatgtgtgtggattatcatgcaagtgcgcgcttatcatgatcgaaccagtggtctctgcgatgtaatattgggaggggaacgggggttaatcgc

SEQ ID NO: 839 - DNA, 955 bp, Zea mays
  Probeset Number=SeqID_15242
ctggcttctctctgccttctccaagctgccgccctgtgctctctccctcctctcccttattctctctctctccccttgctctctctcctgcgctcgccagcagcagccagggagccggaccggcgccctgcgcgcccctgtcctaccgtgatgaccgcgcgcctcggccccgcgcagcaaccccacggccccacgcgaccggtgccccgcgcgctcaggccgccccgacggccgagccgcccaaccagctgtggtcgagcagcgcgcgccagagccccgccgacctccagcgacccgacccgaccgaccccaagtcgcgcgtccctagccaagtcgcccgcgtccaggcgccttgcgcccatccccgccgcgatcgaccgaacagccgtgacccgatgcccgacccgcgccaggagcagcgccatgaacggccgcgcgccccgactcgacgccaagcagccgcgacgcgccaggagcagtcccgcgtgaccgttattctccgtgtgttatggaattcaatgcgttcgtttcttcccccactcctctccattgaagccatgagaagaaaccgccgcggttaatccgtgtaatggagccgccgaccgttctcctctccccctcggcgacctctcttctcccctccctctcaataaatatgtcgagctctctctcccttcctcccctacccgagctcactctcatttcctcgcactctctcgctcgccgttcgaccgccgaagtcgtcataccgctattcgccgaccacgccgccgtttgctggagctgcgccgcgccaccatgctgtgctcagccgccgtccgctgtcgaacccgcccggcctccctagctcaacgtcgccctgcccagagaaaccgagaggaagagaaggtagaaaacaagcatattgtattctatcccctgcagcgatttgttgttttaaatttgtaaatttcag

SEQ ID NO: 840 - DNA, 1178 bp, Zea mays
  misc_feature (1)..(36): n is a, c, g, or t
  misc_feature (1178)..(1178): n is a, c, g, or t
  Peptide Sequence Number=SeqID_13683
  Probeset Number=SeqID_15243
nnnnnnnnnnnnnnnnnnnnnnnnnnnnnnnnnnnnaaagaagcgttggatcgtcttcggctagcttccggcgcgatggcggggcaggggcagcgcctgaacgtggtgccgacggtgacgacgctgggcacggtgaaggcgcggctggcgggcgccgcccgcggccacgcgctgctcaagaagaagtcggacgcgctgacggtgcagttccgcgccatcctcaggcgcatcgtgtccgccaaggacgccgtgggcgacgccatgcgcaccgcctcgctctcgctcgccgaggcgctgtacgtggccggcgcgccgctccggccacgctgcgcagcagtccgtgtccggcccggccaggctccgcgtgcgcgcgcaccaggacaacatcgccggcgtccgcctcccgcgcttcgagagcgacgcagcgtcgcctgcaggctctgcagcatcgccggcgtcgctcgccgggctcgccggcggcgggcagcaggtgtcggcctgccgcgcggcgtacgcgcgcgcgctccaggtgctggtggagctggcgtcgctgcagacgtcgttcctcgcgctggacgcgtccatcaagaccaccaaccggcgcgtcaacgcgctggagagcgtggtgaagccgcgcctggagaacaccatcgcctacatcaggggcgagctggacgagcacgagcgggaggagttcttccgcctcaagaagatccaggggtacaagcagcgcgagctcgagcgccagaaggaggccgccagccgctacgccgaggagaaggccgccggcgaggtcgcgctcaagcgcggcgtttccgtcgccactgcggagagcatgctggagaacggcgacagggacgaggaggatatcatcttttgagcctgtggagtgtggagtcctatgagtagagcgtgcagtggctgtgctacacctgcggcgccaaacagcaaccttctgtacacacagcccaataagctcgtagctgcagccggtgagccggagcccggaggctacgcgtatattccatctctgcgttaatccatgcgtgtgttttctcacttttttttgttgactgtcacagtggcgaagaacatcctcagctgaatttcattgaaagcaaccttgtttttggaaaaaagaggcaaaacctatataaaattgtggttgaccacatatn

SEQ ID NO: 841 - DNA, 1363 bp, Zea mays
  Peptide Sequence Number=SeqID_13684
  Probeset Number=SeqID_15244
atccattcatcacccatcgtgtgcttcagctactatgatataatagtgcagctaattaattaagcgcggacgacgacgtacgtaacagtatggctgctgctgctgctactgtcgtcacaccatcctcgcctcgctccatggctgttgccgccgccattgccttcttcttcgcggtgaccgcggcggcagcgtcgccggtgcccgcgatctacgtgctcggggactccctggcggacgtcgggaacaacaaccacctggtgacgctgctcaaggccgacttcccgcacaacggcatcgactacccgggccagaaggccaccggccgcttcagcaacggcaagaactccgtcgacttcctcgccgaaaacctggggctggcgacctcgccgccgtacctcgccttgtcgagcagcaaccccaactacgccaacggtgtcaacttcgcttccggtggcgccggagtctccaacctcacaaacaaggaccaatgtatcagcttcgacaagcagatcgactacttcgcgacggtgtacgcgtcgctggtgcagagcctggggcaggcgcaggccacggctcacctggccaagtccctcttcgccatcaccatcggcagcaacgacatcatccactacgccaaatccaactccgccgccaataccaagcaggccagtgccagtggcgccgccgccgacccatcgcagcagttcgtggacgcgctgatccacacgctcaccgggcagctgcagcgcctctacgccctgggcgcgcgcaaggtgctgttcctgggcacggggcccgtgggtgctgcccgtcgctgcgggagctcagccccgccaaggactgcagcgccgaggccaacggcatctccgtgcgctacaacgccggcgcggcgtccctcctcggcaccatggccgcgcgctacgcggacatgcactacgcgctcttcgactcctccgccgcgctgctccagtacatcgaccacccggcggcgcacgggttcaccgaggccaaggccgcctgctgcgggctcggggacatgaacgccaagatcgggtgcaccccgctaagcttctactgcgacaacaggaccagccacgtcttctgggacttctaccatcccacggagaccaccgcccggatgctcaccagcacggcgttcgacggctcggcgccgctcatcttccccatgaacataaggcagctcagcgccatatagctaggccaccagaattagagtgctgtccttctaccttgtatatgttgttgtgtatcacatagtggccttggacgtatgtacgtcgtcctagaagaaatcaaacgatatagcaaacatcatagaagcttgcattatattggcaatgct

SEQ ID NO: 842 - DNA, 1020 bp, Zea mays
  misc_feature (1020)..(1020): n is a, c, g, or t
  Peptide Sequence Number=SeqID_13685
  Probeset Number=SeqID_15245
gcacgagaccattacctagaacatcctaatcgaaacccatccgtgcactgcagtgtgataatggtcgcgagtttgacaaccatgcctctcagtcgttcttcctcgccagtggcgtccaattgcgtctctcgtgcccctacacctctgcccagaacggtcgtgctgagcgaatgattcgcactaccaccaacatgatccgctgcctcctcttctaggcatctctccccgccagctactgggcagaggctcttcacaccctacccacctcctcaatcgcctcccatcaaaggcggtgaaccaccccacccccacttcgccctttacggcatgaccccctcctacgaccaccttcgtgtgttcggctatgcctgctatcccaacacttccgcttctgctcctcataagctgtctccacgctccacccgctgcctcttccttggctacgctcttgaccacacggagtatcgctgtctagacctcaccacccatcgcgtcatcatctctcgtcatgtcgtcttcggcgaagatgtgtttcccctttgccggctcctccccacccaccgacctcgactccctccttgattccgatccgagtgccgggaaccaagccaaattttgtaatggtgtttaggggggagggcgtggacatcttcagtcttcacggtgaacgcgctcatcagctctggacccgctcgcggaggagcgtgttcgacgaggcgggcggcgtctcgtggtcgtggaacaccatgggcgctgggtacaccgggtgtgggagacggggctcgcgcaggagctgttcgacgaaatggcgctgagagacatgttcgggggccttgatcgacgggtatggtgtgaagcaagtgctggtgtggaccgtgcgcgtgagtacaattcctcgagagggatttgatgtgctgtaactcgatgttcaacggtgatgacaggaatgtcaggatgatttaagagaggtcaccgtttgaggaaacgctggagcggaatatgatcttgtggaccattttn

SEQ ID NO: 843 - DNA, 544 bp, Zea mays
  Peptide Sequence Number=SeqID_13686
  Probeset Number=SeqID_15246
acccctctgcggctgtcttgtgggctccagcacgcaggtccatcgtccccgctgaatcgaacgcagaaaatcacgtgggtgccgtagttctcagacgagtcgatataggcgcgggtcttagccctgcatccgggctataagaagaagtcatccgccgcaaaccccctggccatccaagtcacaagcttcatcggcgtcgtctcaattgctcatcggtcttcgtcctgctccaccatgccgcgcatctccgtggtcagaccctccacagcttgatagccgatgaacaagtgatcgaggacccaggtgttcagaaagtggaaattgctgagcaggagcccgttgaaggagaagaactggtggtctaggaggaagtctacaatgaggagtacgagcttatctaggtggcggctcccagtcagcttgatggcgccaaggaataatatttagttcgctttattgttatcatctatttttgtaagatacttccgctatgtaataatgatatttgtgacatttatctatatacattttgtcattatatgtg

SEQ ID NO: 844 - DNA, 544 bp, Zea mays
  Probeset Number=SeqID_15247
cacatataatgacaaaatgtatatagataaatgtcacaaatatcattattacatagcggaagtatcttacaaaaatagatgataacaataaagcgaactaaatattattccttggcgccatcaagctgactgggagccgccacctagataagctcgtactcctcattgtagacttcctcctagaccaccagttcttctccttcaacgggctcctgctcagcaatttccactttctgaacacctgggtcctcgatcacttgttcatcggctatcaagctgtggagggtctgaccacggagatgcgcggcatggtggagcaggacgaagaccgatgagcaattgagacgacgccgatgaagcttgtgacttggatggccagggggtttgcggcggatgacttcttcttatagcccggatgcagggctaagacccgcgcctatatcgactcgtctgagaactacggcacccacgtgattttctgcgttcgattcagcggggacgatggacctgcgtgctggagcccacaagacagccgcagaggggt

SEQ ID NO: 845 - DNA, 704 bp, Zea mays
  Peptide Sequence Number=SeqID_13687
  Probeset Number=SeqID_15248
gcacgagaccattacctagaacatcctaatcgaaaacacggtctccacggtccaaggtgacctccacggtctgcgcagccaccatccgctctgcctccatggtacggtctgagccgccaccatcgagggggagggacacgagcggatctgaggcggcctccacggtcttctacctcgctccactttctctgcccccttcgctccacttcgaaggtaaggaaacagtggtcgtcctctactacgaaactgaagtatattatccactttcttcttcttgggattttagtttctctgcggcggttgatttgggattcgcttgcactcgtttggttcttgcgaaacctagactacaggtaagctgggttcttgcattttggtcggtccttgcgaaaactagattgcaggtaagcctgacagtatgtgctctagtaattttgatttgatttgaagggcgatactcctcctccaccgccgtctgtgccgctaccatctgttgccatcgtccccgtctaagatccgaaccccagctctagtgaggatgacgaagccgaaggtcagtgatccaaagcttgacgaatactgatgaagctgctgcaaaaagctctagagaaatttgaattatctttgtaaaaatattgtaatttaggaatcaaacattgcacttgtaaatttgtccataccttgtaatatatttttacctttcc

SEQ ID NO: 846 - DNA, 1611 bp, Zea mays
  Probeset Number=SeqID_15249
agaccattacctagaacatcctaatcgaaaaatcgatcacagacattcattcacccgatccgatccatcgatggcggtcgacgactcgacgcctgctgctaagagtcgtcgactagagagaagcgtcgtctctagcatctcgaatttgccggagcacctccaacaagagatcttctcccgcgtgggcgacgtcaagtccctcttcatgttcgccgtgacaagccgcgggtggctccgccgcttcacagaccgggccttcctccgcgagctcttccccagtcacggccgccacggcgcgcgcctgctcggcgtcttcctgcaggacgcgccgttcaatcgccccgacacgtcgctgatgccggcgcagatggcgccgccgccgccggcgcagcaggcagcagcgcgcgtcgtcgtgcgcgccgaccttcctgccggcgccgggctcgccgctgggcgcccgccgtctcgtcgacgacgccgccttcgacaacgccgacctcctagccgcgcaccgcggcatcgtgctggtgcggctcgccccgcgcacccctgactwggaggcctgccactygkbccgcgtctgcaaccccgtcaccggctaccgccacgtcctcccacccctggagtggagsstcgscggtagcagattgaacggctmcgcaatcgtcacggacgccgacatgccgcagcaccatccgccggcgacggcgcgcttcaagttctcacaactgctcgtcatcacccagcaaatagagcaccattatctggtaggggtggtggacgtgtacgtgcactcgtactcggccgccacgggcagctggagcgagcccaccgcgtgcctggacagcaacgccttctcgctgatgggcgacggatcggcggtcatccaccgtggcgcggcgcactggctgtgcgtcgacgacggcggtttgcgctaccggccttcagtctacagacgcggctaccacacgtacacgctcagcgtggacgtggccaccgcacgcgtctccctgacaaggatccccgtccgtgtcggaggcaaacaactcctctacgtcaccggcgacggcgagctcgcggtcgcctccgtgtacttcatatacgtgattctttggactcaggcagccggaggcggaggcggaggcggaggcgacaccacccctgcgtgggacccgcacattgtttaccataccagtggcgccggtgcctttcccacacgtagacgggtatctgaagcaccggctggagaggtggtgcaacttcagccatggatcgttgctcgcgctgttcagggccaggggcgtcttaatcctcgatcttaacaccaaggccatggaggaagtctccatccccgacttgcacaacaaggcgacgatcttcatggctgaatatggtgctaatcggaatcagacgtggctgccctacgagatggacgtggtggagttcttcatgctccaccttggtggaggtactgtctcagagattggatctccatagatgttactatttctttcatgctattatatttttagtctcttagctatttatttttagtctcttagctatttatttttagtctcatgatattatattattgttactttttttatg

SEQ ID NO: 847 - DNA, 694 bp, Zea mays
  Peptide Sequence Number=SeqID_13688
  Probeset Number=SeqID_15250
cagagcataacatactagtgtactatcattcaactttggaaaacaaagtgatggctgtaacatactagtatactaccattcaaattttgcaaaacaaaacctgattgtgcaggctccacctctcccatcgggccaaccagaatgcgctgagaagaaattggatgtcaacagctgcaaagaacaaaataaatacgagatcctgtctggcaaccagcatatgttcacctcgcaagatccagtcttttattcgcaagaacacggcaagaaccaacaaacggatatgcgagagatcaatacctcccaccacgacagctgtccaacccgaagggggaaaagttggagccttggtctgatagcgggcactgatgacgagtttagatggagggttcaaatggagagctccaggttcgggcgaccttcagatggcggcggtccttccaaaggtggcgatgggggacctttagaggtcggacacggatgggatgacggtggttcgacacggccagacatagactcgaggtcggcacggcgcgatgagagttcgtcgatgggagttcggcgccgttggaacttgctctcagttgcaagaggatccaacaagggtgaacagtgatgtcaacagggttctcgcgctagatgacaatagctctgttaatctttttcgattaggatgttctaggtaatggtctcgtgc

SEQ ID NO: 848 - DNA, 1529 bp, Zea mays
  misc_feature (1529)..(1529): n is a, c, g, or t
  Probeset Number=SeqID_15251
gcacgagaccattacctagaacatcctaatcgaaaaaggagcagtgagaactgcatgcaagaggcacaaagcagcagctagcagttcattcaggttagtcatcagaggtgacatcgctctggaactggaagacaagcagcaggaagacagagagatcaatggcagcgcaaggtgctggagcatcagcttctcccctgtccggcttccacgtggcgctgctcctcctcctcactatcttggcttccatccttgcaagggcggcgtcggtgggcgtgtgctacggcacgagcggcgacaacctgccgccggcgagcgcggtggtgggcatgctgcgcgacaacggcttcacggtggtgcggctctactggcccgacggcgacgcgctggcggcgctgggcgggagcgggatccgggtggtggtgggcgcgcccaacgaggccctgccggcgctggcgtccggcgcggccgcggccgcggcgtgggtccgcgacaacgtgcaggcgcacccggcggtggcgttccgctacgtggtggtgggcaacgaggtccccctggagcaggcgccgctgctcgtgccggccatggagaacgtgcacgcggcgctggcggccgccgggctgggccacgtgaaggtcaccacggccgtctcgcagggcgccatcgccgtgcacctgcctccgtcggtgggcgagttcacggaggaggcccgctcgttcatgggctacgtggtgacgttcctggcgcggacccgcgcgccgctgctcgccaacctgtacccctacttcgtctacacgctggggctgggccacctgggcatggacttcgcgctgttcacggcgcccgggacggtggtgcaggacggggagtacgggtaccagaacctgttcgacgccacggtggacgcgctgtacgcggcggtggggaggctcggcgtcgccggcggggacggcgtcagggtggtggtgtcggagaccgggtggccgacggcgggcggcgccgcagcgtcgctggagaacgccaggacgtacaaccagaacctggtgaggcacgtgtggaagggcacgccgcggaggcccaggagggtggaggcatacgtgttcgccatgttcaacgaggacaagaaggacgccggagtggagcagaactggggcctcttctacccgaacatggagagggtttaccccatcacctttggagccggacggcgacactgacgacattatagaaggagcttggtggacgacgaccggtgcattgcatgcaatgatcgaatttgcactcgaccgatccaagaaatgaatacgtactggggtcatggtgtgtgtgttttatttgcgtgtacacagcattcaatgtacaatatatagaggaattgttgcgaccgctgagcgtttgtttgctcasacgtgtacgcggagaggggtcgatgcgtarctgggtctgggtgtacgtaaacgtcatgcgtagcagtatgcacaagcgtatgtacattccgtgactcttgtgagctatatacttgwraatttgtn

SEQ ID NO: 849 - DNA, 2400 bp, Zea mays
  misc_feature (2400)..(2400): n is a, c, g, or t
  Peptide Sequence Number=SeqID_13689
  Probeset Number=SeqID_15252
gcacgagaccattacctagaacatcctaatcgaaaagccgcttagctctaggtagaaccccacccctcaattcatccgccgccatgccagcgccaagccagatctgcgggctccgggcaggggatgcctcatcgttttttttcgttcgttctaatcggttcttcgcaagtgaagtgagatggcagtgacgactcggtaatattcaagctcaacagaccaaatcacaggtctctctgtatacgagatcgatctgtatgccgattttcccgctgaaccgagccatccaaattccttctttgggcctcgtttattttctattcgaaatattttcttggggcgaggttttttgttctctcttgcttttttctttccacttgagcgtggaacagactgttgcgatgaggataccgagctccctcttctgaaggaattgaggacactcgctggcagaatcgaaccaataaccatattgccaccactgagtaaccaaaggccccccttcaatcttctcgtttcgttgtttttcctgctccgtattttgattttggatagagagatcacctgatgcataatccgacacttgatccgagctcggcttctgccgagcgactgatgcacagacatctccgcatctgagtcctttacatcttactgtactggttttgaccctgttgggaaattttatctcttgtttccacttcctgtgttgttgaactacgtcttcgtatttttctttgtagtatcagatgatgaaacctcgaaacaatcttaggacaccttctgacacagtgtttcatcactgtgagtgagaagtaccttcttttctgatgatactgcaatcactcttagatcatgcctgtttatttacgtttttatgtattttctattctttaccattgtttgctctaggcaggtatctttacaacatcgcaatgacatgcaatccgtacgtgagccaatgatgattagcatacatctggaattaccgtcagatttacttatgacgaaaattgtctggcttgctgaggcttaaccgcaagtaatatgtattgtacatctcttttggtcatctattatccaactgaatgaaatgaaatttggggcctgatgccacgtctctgttagcgaacgcattgaccagagatgctatgattaggccaaaacaaagttgtttcaacacttcacatgttgataggaacctgggggctgctgctctatgtgtccacagagccggttaatgtgattacagtttttctgcaccaacattcgcagtagccgcttaagagcctttgctctgccaggcttgagagctagctactgctgtcaattcctgaatgtctaagcgatacatattttttgtgccgcattgttttcttgcccaagcgtttcatttgtttgcttgtcaatttttgattgcaaatgatgatgagatgaaggcttgtttctctacattcgcagttgccgcctaagagctttcgccctgcctggctggagagctactgctgcctaatccttccttggatgtctggtgcaaagcaataattaagaacaataagctgtatctgctaggtttttggtgttttgtcattatttcatttatttagctgataggttgaatcgttcccttgtacatttgcagtttaatttgacgttcgccattctttattgtgttgagcgtttgttctgactccgcccaatgatgatagaagtgaaggcttgtttctctacattcgcagttgccgcctaagagctttcgccctgccaggcttgagagctagtgctgctaattccttccttggatgtctgagggcaattttgttttgaaatctattaagcctttagctttgtgcttctgtattaaacaaaaccttgacagaagacggacagaagaaggatcagtttctacttggttttgtcctcatgcaagagtgacagaagaaaacccatttttttaaaaaaaattcaattgagtatggcaagtattaaagtggcatacccttgcatcggtagaactagtgaagcgggccaactctcccctatctaatattgttatgatcataagtttttttattaacattcctacacccatacctttgcacgggtagaattagtgaagttaactacgatacctattattgatatatgagcttagccctttgtttttttattcacattagcgcttgtattgtaatttgtgaaagaaccatccttacatttttttgattttgataccatgcattgtaacttggatatgtgaatgacagtttaagaggactgcggatttccctgttgcgtagaacgagatatacttgggtgacatgcatcatccatgttgcttttgtcaactgattaagtctgttgcgattgcaatctgcgattgcaatttgtatgctgtttgtn

SEQ ID NO: 850 - DNA, 1272 bp, Zea mays
  Probeset Number=SeqID_15253
gcacgagaccattacctagaacatcctaatcaaaaagtcgctcggcttcagctcgcccacgacgagaacgagacaaccccccgcatttcaaagcgtccttgggccgtgagcgtgaggaggcgccatggccagcgccggcgggcggcggcggtccaaggcgaagccgcgggcgagggccgggggcaaggcgaagaagaggaccaagtaccttagcctcaccgagytgytggttaaggcgcacgcgcaggtgggakygtcgccacggtccccgtgggaggacgaggakkcggtggcggcggragtgaarmcggaggaygaygcctgcggtgacgacgacgacgaccaccaccaccaccaccacgaggcgtccaccctgttcgaggccgtgccggcgccgtcgctctccgacatcctgggcccgtcgccgcccgagtcgccggccggctccggctccggggcgctgccgggcgccgaggaggaggacctcccgcgccgcgcgctgcggggcagggccagggagcgctgggtgtactgcaccggcgggccttcgccgccaccgccagcgacggcaaccggcaccgccaccgccaccgcgtcgccgtgctcgtccgccgcgagcacgggcgcgtcgccgcgctcgctgctgctcaagctggactacgacgagatcctcgcggcgtgggcgggctgcgggccgctctacatcggcgccgccgtcagcccgcgtccggtcctccgcggacgctgaggtggctgtaggaagggcggagagggtgaggcggtacagggaraagcggcggcggcggcggctcttyttcgcgaggcgggtccggtacgaggttcgccggctcaacgccgtcaagcggccgcggttcaagggccgtttcattaaggaagaggaaagggagctccggcctgcgcctgcatagcctcctgccctgccctccttctcctttgcttcttccacggctgaagcattcattgagctgtctgtctgtctgtctgtctgatgtatgcttcccaaatctactgcatatcacacacagtcatagactgacagaccacaagtccacaacatgtgacccgttcctagtcagataggcccacctgtcagccaacgttctatgtagagtttgtcttgttccttgcgcctgccacagtgccacctgggtggacgagagcgggaggcgggagcagtgtcggcgacgccgatggctcggaaatcctttggcaataaaaaagaaaaagaactgagggaataactacgaagtt

SEQ ID NO: 851 - DNA, 777 bp, Zea mays
  misc_feature (777)..(777): n is a, c, g, or t
  Peptide Sequence Number=SeqID_13701
  Probeset Number=SeqID_15254
gcacgagaccattacctagaacatcctaatcgaaaactccctcttctcctacgcgcacggggagggaagaattggttcgttggcgttggccttggcctcggatccagagcgcggaacgcgtgcggcgttcggatcgacccgctcgaaggcccggggggcgcgaggtaggggccaggatcggcggcgatggtgaaggccgtggtggtgggcgcggcggtcgtggcgtgtgcggcggtcggggtggcggtggtgctggagcgccgccggcgtaagcgagacgccgacctcctggggtccgcggaggcggagaggaggaggcgcgcggccgccgtgatcgaggaggtcgagagcagcctcgccacgcccacggcgctgctgcggagcatcgcggacgccatggtcgccgagatggagcgcggcctgcgcggggacatccacgcgcagctcaagatgctcattagctacgtcgacagcctccccaccggmsatgaacatgggctgttttatgcactggatcttggagggaccaacttccgtgtgctgcgagtccagctaggaggaaaggagaaacgtgttgtcaaacaacagtatgaggaggtttccattccaccacatttgatggtcgggacttccatggaactatttgatttcattgctgctgcattggctaaatttgtcggtactgaaggtgaagatttccatggaagtcccgaccatcaagtgtggtggtcctagaccgacaaatytaagcaatagcaacaattggttgtttgtgan

SEQ ID NO: 852 - DNA, 1013 bp, Zea mays
  misc_feature (1)..(120): n is a, c, g, or t
  misc_feature (1013)..(1013): n is a, c, g, or t
  Peptide Sequence Number=SeqID_13702
  Probeset Number=SeqID_15255
nnnnnnnnnnnnnnnnnnnnnnnnnnnnnnnnnnnnnnnnnnnnnnnnnnnnnnnnnnnnnnnnnnnnnnnnnnnnnnnnnnnnnnnnnnnnnnnnnnnnnnnnnnnnnnnnnnnnnnnnccggccgagctccctggccgccgcgccgcggactccagcgctcagtgcccagcttccagcaccgtggctttctagctccctctctcttctccatttccctcaagctcgccgtggccacagggcctctggattccatatcactggtgtcctcttctccggccggttcgagtcggccgccgtcgcttagcttcagctcgttcctggccggattccctgctcggcgtccctctctgctcgttgggtactccttcctgctcgtcgcgcccatagctgagcctagccgcgccttccctgtcctctgcacgctcgcagttcgccccaactcccgtccatagtggtcgccaatcgtcgaccctgctcggattccatctcgccagcagcccccttgttcctsgtcgtcaatccacgtcacgtccgcgacgtgctcgtcgaccccgacgatctatcttccaattacgcgctacttgtgttgagctctgaagccccctgtcgagctcttcctytggaagtcgccttcgagcacaacccctgccaagtgttcgctgggaggtgcgataattaatcacgtgatgcggaagatgactcaagtcgaccccaagcgcgggytaatccgcaggatgatgctgatggacaaacctgaagatggtcgtcaagtggacgccgtctaacaacactaacctagtgttactcaggttctaaccttgtgctgttgtgatggtgttaagtgccggtgggctcagccttcttatataagtataccccgtctttatcttcttattgaggatgatcacttgagctagcatatatttcaaacttatacttttgtaatcactccgataaaataatgtaaaatttttgtaacctgtaaaatttggtaataagatttccgctgn

SEQ ID NO: 853 - DNA, 515 bp, Zea mays
  Probeset Number=SeqID_15256
ctcttgctagcgtatcaagttcatcttcaagttttgcggtggctgcctcctagatttttttttcttctagatagatagatctcgcgtgcaagttcgccatgagagggcctctgttaagcgccgttagctccttgaacgccggttatgcatattgcggcttatatgaaagggaagacgagtaccggccagtacataaggtcgagccgaccgtccggctgggcctcagggtctttgcggtcgtcaacgctatcatgctgactattgttaacatcatcataagcgagagcctcctcgggaagatagtagctccggctgggatgatagtcatggtggggtttgtatttgcaatcacaacagacgatgcggaacctggaatcacccaagcagagtccatggtgtgatttttatccacgacacgccggacccttttcttctagattgtttttactacttgacatcagaatgttcatttttttttgttcgaattatagataagagctttgtttgtctcgtgc

SEQ ID NO: 854 - DNA, 788 bp, Zea mays
  misc_feature (788)..(788): n is a, c, g, or t
  Peptide Sequence Number=SeqID_13703
  Probeset Number=SeqID_15257
ctcaaccctcgtagtcatagagcatcagaggcgccgctcctttcggatctgggcgaggtgagctgcggcgccggacgtcgcggggaagaggatgaactggatcgggcgcaagatccacctctacaatgtcaccatcggcctctacatgctcgattggtgggagcgctacctcttcaatattttgatggtttgcctcttctggtacattctccgctatctccttgggttcttccaaaggttgcagggcatcccgccttcccgcacctcctcctgctgctgctgctggacaagatccgtctatccacgcactcctgttctgtctccgtcaagcacctgccagttccgcacgcggacgcaacggagcgcttcctgcgtcgccggcgccggcttcaccttgcgccccgcctctccgacaagcacggccgcaatactgtccacaatcagtgattcaatggactataaacgccgacaggtccaaaacatcaagcaacacacggtggcagtctcattttggcgagaaggtgctttagagtgccattccagcgaagcagcttattgggagtgtcataaacgcaaatgtctcgtacgagaccgtgcagtggtggggctgatggtccagtccaggcacgtgtgcctgatcacttgccactgacatggtggtccgtgtgtttagactgatctacggatccagccttgaatttcgtactgctcccattcatggccctgccgtgccgctgattctcggttgtcatcgtactgtgaatttgtggcccgatcgcattgcctcn

SEQ ID NO: 855 - DNA, 1849 bp, Zea mays
  misc_feature (1849)..(1849): n is a, c, g, or t
  Peptide Sequence Number=SeqID_13704
  Probeset Number=SeqID_15258
gcacgagaccattacctagaacatcctaatcgaaaacgcacggtctccgctcgcttctccagtccagtgggcaatggtgccaatggacccctcgatctcctcgtcctcctcgcctctccggctccccggctcccccaccagcccgggcgcgagctctacgcctagcccgaggcccaccctcgtcgcggccggccgccagcccgccgccgcgcccagcaccacccgcctccgcgccatctcgccgtcccagtcccagtccccgcccaccccggcgtcccccgtggagccgttcggcttcgacgcgctcaaggggaccttctccgtggacgtggcggcggccgacgcgcgcgcgctcgacgtcccgctcgccgcgcccttcaccatcgcgtcctcccgcctcgtcgcggtctccaacgtcgccgtgcgcgtcgagctccgcagcggcgctgtcgggtggggggaggcgcccgtgttgccctccgtcacggccgaggaccagccggcagcgctcgacgccgccggacgggcgtgcgcagcgctcgtcggcgccccagcggcgccccksgyygckgtgctccaggacctcgccagtgtgcttccgggacacgccttcgcctcggccagagcaggagtggagatggcgctgattgatgctgttgctaatagcattggcatacctctatggagattatttggaggagcatcagatagtttgacaactgacatcacaattccaattgtgaccccaaatgaagctgctcaattggctgcaaaatatcgtggacaagggtttcaaactctgaagctcaaggttgggaagaacttgaattcagatatagaagttctgaaagctatacgacttgtccatccagattgctcatttattttggatgcaaatgagggatacacagcaaaacaagcaattgaagttcttgatagactaaatgaaatgggagtgacccctgtgctctttgaacaaccagttcacagagatgattgggacggtctccgagatgttacctctgtggccatggagaaatacaaagtcgctgttgctgctgatgaaagctgtcgaagtttacttgatgctcaaaaaataatagatggaaatcttgcccatgttattaatatcaagctggcaaagttgggggttcttggggcccttgaaataattgatgctgcaagaaaagccaatattgctctgatgatcggcggcatggttgagactaggattgctatgggcttcgctggtcatttagctgctggccttggttgctttagtttcattgatctggacacacctcttttactgtctgaagatcctgtgtatggtggctatgaagctttcggacctctgtacaagtttacaaatgcccgtggccatggcggtttccttcacttggacaatgatgcctcgaaatgaagatggttaacgattttatctatccttctggagcttcatcgaagcattgctgtgcattccgttaatgcactggttccactggataatcatcacataaccggaatcacacaagcgactggaagcatatagccatataggaccatttggtcagcctgtagatagacattcagaaggctgttgcaagtccagtcaggcctggagcactggactatttggtcagcctgtagatagatattcagaaggctgttcccgctggctctgttgttttatccagacattctatgcaataaatacatctggttgtaaatgtcaacacatgcagccgtgttacgcctttgttgttctatgtctgttcagtataaataaggctttccttaattatgctgaagcgaacgtatgtaaagagcaaagtcaactgttggctgn

SEQ ID NO: 856 - DNA, 1778 bp, Zea mays
  Peptide Sequence Number=SeqID_13705
  Probeset Number=SeqID_15259
gcacgagaccattacctagaacatcctaatcaaaaacttcttagtctcatttgctatttctaaacttttgctttgcctgttttactcaatatgtaattctaactattttcttttccaggttcttccatcgtcaaaatgtcaaaagtgaaagtaacattttccaataagctgacggagtcagatccacttgttaatcccgtaataattatagggaaacttgaaaacttgaaacaagttccctatgatgtcatcaaagcaaagctggaacctcgagtatctgaagaggtgtatcagtcagcattaacatgtatgcagccctcaccaactgatgtctgttcattatatttgaacatggccacactggcagcgttacctaagcgctgtgcaaggcataatgcaccatcccatgctaatttcataactaagctggtgcgctcaacttgtttgggtgttgatgagtatgttgtgattgtctgtgaaaggcaagatgttttagcatcagcatgtgctgtggcaagggcttatcctatctattcacgtaaaactttgaaaccagctagcacatcgaatggtactggggtcggaaattctggtacaccaacttcagccactgtcagagtggaatttattcttgtcgatggtgggaaaggagaagatgcacaaacattatctgagaatgatctcctttgccttgaagagatttgtatcagtgtcaggactgttgctcgaattgttgatacaccatgcagtgaaatgaatgtgaaagattttacccaggaaattcaacaagttgcatctgagcttggtgttgcttgctctgtagtactaggagaggaacttaaagaaaagggctttggtggcatttatggagttgggaaagcagccattgtacctccagctttagtcacactgtcttacactccccccaatgcaacccaaacaattgcatgggtgggtaaaggaattgtttatgacactggtggtctgagcatcaaaggcaagactgctatgcctggaatgaagcgtgattgtggtggagctgctgcaattctgggagctttcagagctgctgtcaaactaggcttttcagaaaaccttcatgcggtattttgcttggcagagaatgctatcggtccaaacgccaccagacctgatgatattttgactttatactctggcaggactgtagaaatcaacaacactgatgctgagggcagattagtccttgcagatggagttgcttttgctcaaaaggacttgaaagccaatgttattttggatatggctaccttaactggagcccaggccattgcaacagggcgttatcatgcagctgtcctcacaaacagggaagaatgggaagagtactgtcttcaagcaggaagaactagtggtgacctcactttcccaataccgttttgcccggaattacacctgcctgaattttcatctgcctttgctgatatgaagaactctgtggcggatcgaggtaatgctcaatcatcatgtgcagggttatttatatttgcccagttgggtgttgatttcccaggttcatggatacatgtagacatggcaagcccttgtcactgcggagaacgtgctacagggtatggtgttgcactacttgtaacactgttcggccaatactcttcacaaccatttttacaaaatatgtcatcaatttcctttgatgaggtctttgacaagtttgagacttgcaagaagttcaaacggagctgagaacttaaatacaacaaggcaaaattaaattttgg

SEQ ID NO: 857 - DNA, 732 bp, Zea mays
  misc_feature (1)..(22): n is a, c, g, or t
  misc_feature (697)..(732): n is a, c, g, or t
  Peptide Sequence Number=SeqID_13706
  Probeset Number=SeqID_15260
nnnnnnnnnnnnnnnnnnnnnntatattggaagacaccaaacagcattcgactcgggttaccagttgttacaagatgttcataaacaaccagcatctaaacaaaacaccacagctaaaccggacctccctaacttggaacctctcctactagacctcaggaaacaggaatcgcagatcaacatagagatcaaaagacagaacaaggataacagaacgtccttcaacaccctacccaaagagctaagtaaacaggaacgaacttcaagcagcaacatccgaagccttctcacatgttggtcatcaacctcgagaaacaaataacagacactagaacaacctagcttcctagaactctttgatcctctccatcaacctggccaaatcttcctggagctccaccgccgatggctaccaccacgatggtgagtatgcagaagtagaggatggcgtggacgaggatggcgagggcgctggtgcccatgttgccgaactccacaaccctgaccctcgccggcagctggaacaggaaccccggcgacagcaggatgaacagcaccaccgccacgatgatcggcccccagtccgtcgtcaccatctctctctctctctctcaccgtctcgctcgctcacaccttcgctgtgtgactatactttgctcacgtcgctttggggagtcaataaggggcccggtaaatnnnnnnnnnnnnnnnnnnnnnnnnnnnnnnnnnnnn

SEQ ID NO: 858 - DNA, 1106 bp, Zea mays
  misc_feature (1106)..(1106): n is a, c, g, or t
  Peptide Sequence Number=SeqID_13707
  Probeset Number=SeqID_15261
ccattacctagaacatcytaatcaaaaaacacagtccacacccgccgaggccacccccgtcctcccccacgcgccgctcgcgtgatgctcgaatctacgctcgcgatggttatgccccgccgctcgctgccccagccccctcccyctgcgtgcgtgcataaaaagggagagcgacgatggaaatattccgagcatggcttgaacacctggtcaatgctagatgatctgttggttgaaagactagcaagctgtccaagtggaactacgacggatcgagcaccggccaaatcccagctgacacggtgtggacacgagttctgcgctactcctgtggtcattgtttggagaagttttcctaaagcttctttatactgaagagactgctttgatatctgatgttgttgcaaattcaccacaacaaggttttcatagtgggcattgctggagtgatctcatctgagatgattttggcataactcctaaaagaggaggcgcttctgctcatgctaagaaagcaagctttgaccgtgaaacctaatggcagaaaagtccttcctcccccaagtccctagagcctagacgaatggcgctgcagctcactgttccttcttcagttcactcatgtagtcctattcatgtccattaaccagactaaagtagtgcatattttaaattgaatatttttcttcttttcggtgagaagtgaaaagtggaagacatttcagttctgcactttgtagttgaagttatcttcctgattggaagataaggaaggtttgaggagctcatttctgaagttgtagctggaagggagaagagctcatgttaatggtattttgactgctccaaaacactttcgacttgtgatattctttaacctatatgcgttgaagaatttttggagacaaagcatgcaagcacagagtctgctctggtggtaagataagtgaggtgacttctgaagaagcctacagagaatgtaaaaataagtgtgttattttcactgctttgacacagtctcaattgtgcaatgatttattatcacattgtaatttgacatatgctacatgatcctaaattatgttgtaatgaatgttctactcccn

SEQ ID NO: 859 - DNA, 577 bp, Zea mays
  Probeset Number=SeqID_15262
aggttttagcggcggcagttcctcaagcgtgcgagtggcagcgatcctgaagcgagcggctgtggtgccccaaggcgggcgacagacgacagcgcttccgaggcgagtgggcaagcgtcaccggcgctcccccaggaccaagcgacgacgacgctcctgaggagggcaggcaagcagtgacggcgctcccaaagcggacaagcgtcgacggtgcaccccaggcccgatggccacgacggttacgcgaggcacggtaggcttcattcggcagccgcggtggcggccatgggagacgcgggtagctccggcggttgcgcgaggcgcggtcgtctccggcgatgacagacacgcacgacgtgggtgtctcggacgtcattcgatgaccaactcctccgatccggtagcctcggcactggcctccagcgatgacctcttctaattctttgtttatacgtgcggctgttggttgaacctatactaagatttttttgttaattattatgtacggtttaggtatttatgcaactttctgtaacgatttatgctttgcgcgatatcaatcatccaacttttgtgt

SEQ ID NO: 860 - DNA, 577 bp, Zea mays
  Peptide Sequence Number=SeqID_13708
  Probeset Number=SeqID_15263
acacaaaagttggatgattgatatcgcgcaaagcataaatcgttacagaaagttgcataaatacctaaaccgtacataataattaacaaaaaaatcttagtataggttcaaccaacagccgcacgtataaacaaagaattagaagaggtcatcgctggaggccagtgccgaggctaccggatcggaggagttggtcatcgaatgacgtccgagacacccacgtcgtgcgtgtctgtcatcgccggagacgaccgcgcctcgcgcaaccgccggagctacccgcgtctcccatggccgccaccgcggctgccgaatgaagcctaccgtgcctcgcgtaaccgtcgtggccatcgggcctggggtgcaccgtcgacgcttgtccgctttgggagcgccgtcactgcttgcctgccctcctcaggagcgtcgtcgtcgcttggtcctgggggagcgccggtgacgcttgcccactcgcctcggaagcgctgtcgtctgtcgcccgccttggggcaccacagccgctcgcttcaggatcgctgccactcgcacgcttgaggaactgccgccgctaaaacct

SEQ ID NO: 861 - DNA, 687 bp, Zea mays
  misc_feature (687)..(687): n is a, c, g, or t
  Probeset Number=SeqID_15264
ccgcaattaaccctcactaaagggaacaaaagctggagctccaccgcggtggcggccgctctagaactagtggatcccccgggctgcaggaattcgcacgagaccattacctagaacatcctaatcgaaaaggacacgactcgccgcacccatcccaatccgccgccgctgccatggccgacgagattgacacgaggccggctcccgcgggctcccgcggccgtcctgcgcacgctaccgaggacgacgacagggaggagggcgagatcgccaccgacgccccctcgcccgccctccccgccgcgcacccgctcgagcactcgtggaccttctggttcgacaacccgcacggcaagaacaagatggtgctcgcgcgcgtcggcgagggcggatgcagcgccgaggagtgcgagcggatggtcgccggcgtcgacgccgacggcgacggctgcgtcgggttcgaggacttcaagaagatgatgtgcccccagccgcaagccgaagccggcgccgccgggcgggacaaggacaaggccgaggccaaggaggagtgataaaaaaattctagtatttgctggggtggcaggatccaacggacatggaactgaaatctagctgtaggggacggagggatactgttaaacctctacgggttttacaaaaaaaaatcaaagatatttgaattgn

SEQ ID NO: 862 - DNA, 532 bp, Zea mays
  Peptide Sequence Number=SeqID_13709
  Probeset Number=SeqID_15265
ccaaaaatgaagaaaaatgtcatatcttaggatcaaccaaatgaggtgcttatttgtgaagacctagtcgatcagaaagtatccttcgacatccaactaatggaagggcaagaaaaccaactaaaaatgttcttattcaataataagaatgtgtttgccttgtctacaaatgatctagctggctagggtcccattaactaaaagcgtaggtcatcatacctaacctagagggtgtattagccaccttaggaaggcataactacatgagggatcacattaaatgtgagcatgatgttttgggcatgcctccaccctaacatgcgtacaaggggtaggtgtacccaaatctgttgcacaagcacactttagtatgatgaccatatctattgaggcaatatcctacataccgtgggattaagaaagtactcatatttgtcactaggtagtatgaagggggctctaactttcgttaaaggataagaagaactgtactaggaaccattaataggctatccttactctgggaagaccc

SEQ ID NO: 863 - DNA, 1025 bp, Zea mays
  misc_feature (1)..(36): n is a, c, g, or t
  misc_feature (1025)..(1025): n is a, c, g, or t
  Peptide Sequence Number=SeqID_13710
  Probeset Number=SeqID_15266
nnnnnnnnnnnnnnnnnnnnnnnnnnnnnnnnnnnnaagcttgcacatctccgcctcctcgctcctcttcccgctctccgaatccaccgctctccccactttccgcgaccccgacgatgaggccccccaaaagcgctgcgaggcccccggcatccctgacgagcccgaagaccggcgctaacaaacggcagcggaaggcggcgtcggcggtgccgctgggcgacatcaccaacctcctagtcctcgctgagtccccgaccccgagcaagcccaggaggacagcacgccgggccctccccgcgacctctgacgtctccgcggtctcctccacctgctcctcctccgcctccgtcacgcccgcgcccaagccttcctccgccgctgtcttcgaggaggagcacagcgtggtcaaatcgccaaccatctccacagttcaccgcaggaccactggggctcaagagaggtgtaggaggaaccccgcctccgccaacaacaagggcaaggaaccggtcgctgccacggcgagctgccccccgcttgggaaatctgcaaggacccacagcaggaaaaaggatactcggcccatctccgcatcagttccctgtcatgaaggtagaaagaagcggcccattgcaaacacacccaacttactagaggaccttttggagaagcagagagcatactttgcagatatcgatgcctttgagctggtagaggaagaggtgtcggaatccgagctggagtaaaaaccaaagcagatatggcctttcttttttttcttgtacagaagcaaattactggaaccaccggcgaggtatggtagcaatgtgtagctagctctacttgtaacacggggggcactaatcgctcgatatttcgtatgcttgggaacttgttgctctggattatattatctaatatacttgtacactgtaggcaagtgtttgcaaactggttttgtttgctactcgcagcagttgaaactgctgggtaagatgatgtctagtagaaacatgtgttgatcn

SEQ ID NO: 864 - DNA, 718 bp, Zea mays
  Peptide Sequence Number=SeqID_13711
  Probeset Number=SeqID_15267
gcacgagaccattacctagrrcatcytaatcgaaaaacgtctctttctttcttatccttcccatgccgactcctctctgctgttccgtggagcaccagccgagtcccttcccatgccagctgcaagcatgccgtgctccctcccttgacgcctaatcttctccctatggcgaactcgcccaaccactcgcctccactacagcacgccgtgcttgcgcagccccggcagcgacaccctcctctgcgtcacgccgtcgacccgcttgatggaatgccgcagcgagctctacccgatctgcaaagcctgcacgcagtcgtcgaaatccccgcaaccgtgttggtctgcaacagcacgtcgtcgatctgcaatccctagccttatggttgaccttgccctccgtcgatgtcgcgccttgcgcatcgcttgctcgacggaagcctcactcgtgaacgacatgcgtggctcattcgatcccgccaggttgtttgatgtgtgtgatttgtagtcgttctaaatatgttttaatcgatgtcatgcatatatgtatcgttgaggttatagtggatgtgtatgcatgttaattgaagattttagggaagagaaggaagtagaaaaagaacttagatgtttctcatgttttcggattgttattaggagtgagttggatgcgtgtaaaatgattcggttatatgcataatggagtcgcgtcgtatgattg

SEQ ID NO: 865 - DNA, 528 bp, Zea mays
  Probeset Number=SeqID_15268
aatcgagtcgatacttccatacaccaagccaccatcctcgacatagagggagagaagagagggtttcgccgcgtcgtcgcttcaagcttccgtcgccatccacaattaagaaggagggccgaggaagatggctagaaggatttgccagggagtgcggagtcgtgtgtagggcttgatcgagtgcaagggacatccagggcagaggcgcacctcgccggagtccatggtttgtagtcgatctgcgtcgagtcgtggatggggctcccgtctctcttagcaatggtcacaagaaatttgaagcccaacttttggggaagaatctggattacaaggttataacaagtataaggtcaagaacaagtaccgcaagatgaggagcatacaatatgctactatgagttcggagaggtctaggtcgtcgtatcccagtcaactatgatggtggaggatcattgtcatcatatgatgtattttacttagctattkkstactaaattctattatataataaagatgtgacattgattt

SEQ ID NO: 866 - DNA, 528 bp, Zea mays
  Peptide Sequence Number=SeqID_13712
  Probeset Number=SeqID_15269
aaatcaatgtcacatctttattatataatagaatttagtaskkaatagctaagtaaaatacatcatatgatgacaatgatcctccaccatcatagttgactgggatacgacgacctagacctctccgaactcatagtagcatattgtatgctcctcatcttgcggtacttgttcttgaccttatacttgttataaccttgtaatccagattcttccccaaaagttgggcttcaaatttcttgtgaccattgctaagagagacgggagccccatccacgactcgacgcagatcgactacaaaccatggactccggcgaggtgcgcctctgccctggatgtcccttgcactcgatcaagccctacacacgactccgcactccctggcaaatccttctagccatcttcctcggccctccttcttaattgtggatggcgacggaagcttgaagcgacgacgcggcgaaaccctctcttctctccctctatgtcgaggatggtggcttggtgtatggaagtatcgactcgatt

SEQ ID NO: 867 - DNA, 837 bp, Zea mays
  misc_feature (837)..(837): n is a, c, g, or t
  Probeset Number=SeqID_15270
ctacctggggttcctcttctctctcacgctagatcaggcggagcactattcatcccccaacctttccttccggaggatggcagcgagcgcgccttggcgaagaaacctcccgctccgttgcggtgggtttggactccagcgcggaggcctggacacgacaatgtgcaaggcggaggaaggccgactcggatccgctcgatctcgccgacgacgaggcccaacaacaggacgttgcggcgctgaggaagcattcccatcgatgtactccgagcaggcgccttgtttccaaaaccatatttactttcttgttttcttttgatctctctgtctcgtgatctcaaattctcaattcccatctgtcttctccttcctggtgaacgaggaacgactcctccggtcctccctccagtcctccctgagctgatccctggctcctcctcctcctccccgagaccccgaccaactactgcgttgaattgctgatcaagaacaagagccaactctggttatcaactccagcgactcaggcagacaagaagatgagtacttcatctgaagatatcagtgttcaagtcattttccctggatcacaatatcaaacaaatgagcaggagcagccaaagcatgtctcctctgctgtggatagtaccaatccagttggtttggcatcctcggctgctcctctctctgtgtgtgttcattatttatttttcggattcctgttgcttttcagtagattccattcacaaatgctcctgcacttttttaccgactgcgattgtgattgcttatcaatttcagttctaagagattttcagtaatcaagtgttccattgn

SEQ ID NO: 868 - DNA, 1168 bp, Zea mays
  misc_feature (1)..(1): n is a, c, g, or t
  misc_feature (1168)..(1168): n is a, c, g, or t
  Peptide Sequence Number=SeqID_13713
  Probeset Number=SeqID_15271
nctagacagcgacgccgtggggagccgccgccgcgcgctccgctcctccctgcacctcatccccttcccctgctccccctcacacgacgtgcggcggtgcgaggaccggccttggcaccactcaccagcgcccccggtgcctggagcagtgcagggaggaggagcgggagaagcggcaagagcggagcaggcgcagtgcagggaggaggagcgggagaagcggcaagagcggagcaggcacgaggccgacgactgcagcggcgagggctcgtcggaggatgagcgcgagcgcgagcaggagaaggaggagaagcagaaggaccggcggccgtacatgttcttccgtcgcagcttccgtcgcgtggtccggagcgagcaggggtccctgaggggctcctttggcatcacaggatcccgggaggatcccagaccaatccctggccacggaaaccccagtcaaaattgtccctgcggatttttttttcgctctttggtgaccacgcttcccggtcctcaccgcgggggagctcggtgatttcgctccccaccacagtaggtcgggaagagcttccctgtccgctctcgcgaagcctcctcctcctccctatctccctcgcaaagccgccgcctccccgtctccctctcgaagtcgtcgctgctcactgcctcgcacttccttggactggatccgtcgtcgcccggtgatttcgctgagcacgggcactccctggcaccgcgcgctcggcgaaacaccgaagctttctcgcgtatggcggactcttcttcgtcgcgcaagcaccggatctccctcctcttcttcacgcaaggcaccagatctccctcttctctagagagcttctcaggagcctaggtgcgaggatcctgcaagccgacggctggagaaaagcgagcggcacggcgacctcgacaatgcggctggtgaagaccgagaaaggtgagtgccttagccttgtcacagatatttttctttttcatcaattatttttcaattcaacaatgcttagttcaacgatttagtttaggagtcagtcgttgtcatagattcaattcaacgatgctttttttcttctcttcacctacagactgatgactaagactcattcctgtcaaatgtcttgactagatatttattattctttcatgttcn

SEQ ID NO: 869 - DNA, 695 bp, Zea mays
  misc_feature (695)..(695): n is a, c, g, or t
  Probeset Number=SeqID_15272
cgccaagcccgcaattaaccctcactaaagggaacaaaagctggagctccaccgcggtggcggccgctctagaactagtggatcccccgggctgcaggaattcgcacgagaccattacctagaacatcctaatcaaaagtccaattttgaccaatccatcctgagcgggagaagaagaccaagagggagaagagaagggcgcagaacggaaccacgaagcaatacaaacccgagagccacccagagaggaagagagcgctgttagcaatcgggagtcatccgccggaatccaccgtcccttcggccaagcagcctgcaggggagatccatggccagattgcccaacctgaacagcagacaacggcggcgcgggggacgacgacggaacgtagccagccccgccggagccggacgacggggatgcggcggcgcgcgcgaggaccctagctccgtgctccgatctgcatcgcctcgagtcgagccgttgccgcggcggcggggaggacgacagcgcgcgggcagcgacggagcaagccggcggcgtgggagggcgagagcggcatgcggcgcagttcggtcgtgttggtcactgcatctctctctctctgatactctgattacttttgkgctgagacagtggtagcgattggattagagctgatcgattcatgatcttgcttctaaaatattgtttn

SEQ ID NO: 870 - DNA, 765 bp, Zea mays
  misc_feature (765)..(765): n is a, c, g, or t
  Peptide Sequence Number=SeqID_13714
  Probeset Number=SeqID_15273
gcacgagaccattacctagaacatcctaatcgaaaaatcgatcctgtcctgtccagcaaagggagacctgcacaagggaggactggaggagaggaggaggacctacccaacccggcctgcagctctctcgtctcttcctcctcctcgaagctccgatccgatcccccaatgtctgacagcagtcccgctcccggcgcctactactccggccctcccgccgcgccgccgcccgagtctaagcccgttgacggcggccaggtcaacgccgatgttcctggctactactcctccgcccctgctgcgaaatctggcgccggcggccagcagggcagctccgctgctcccaaggaatcgggcttcttcgccagctgctattagatgtagtagctttgtatagtttcatggaggtacttcaagcatgatgacgacgatgatcaccacaatacaagaggatgcatggagctttggatttgtggattggcggtgtgagcttttactgggctacaacaattgtttgtcctgcccctaaaacctgtcacggtgagctatcaactgggctaaataaaaaggctcgccgtgtgatcttgtctagcgacctggcctgtcagcccaaaaactgaacacacatacttgtcagcccattttttttttgtttggattcagatagatatcgctgatagtgtaattgttttcatattttttttctttagatttggattatatacgaatatttgtttggattcagatcagatataaatattgatn

SEQ ID NO: 871 - DNA, 789 bp, Zea mays
  misc_feature (789)..(789): n is a, c, g, or t
  Probeset Number=SeqID_15274
gcacgagaccattacctagaacatcctaatcgaaaaaaattcgggtccagtgttcagtgggcggcgacggcggttctctaaggtcgactccggcggaaggatttggacctcgccaccatcgttgattcgtcggatccgcggtccagaggagaaggcctgagccaagtgcatgattgacataaaggacaatgttccatgagtgggaggtgccgagctggtgaagtttcagtgcccttcttacaagggctcgcgagccggaacaagccggctcggctcggctcgctgcaaaaacgagctcaaagaaggggctcggctcggctcgttcgaggctcgcgagccgctccgagccgaggccgctccgagctcgagccggctcgggagcctcgagcttattttctagccctactctcagccaagcaactcgagtgtgtttggttggacgtacaaggagggatcgaagggggtggccacagtttctatagtgtttggataagagtcacgtgggggcgaggtaaacaccgtagtaatttttgatgacggcgtgatccaaaaaaatcgaggggacggtgtcgccctcacctcatcctattttgaccttaaatcaaacacatactaaggaatcatcgaggacatgtgagggtgctcccattgtgcggcagcaaacccctcttccagtttactgcttttttcactattattattgcttctatatgttccaagcacttgtaagcttctgataactgcgaactaatttaaaaccggtaaccgtgaactaacttcaatttcacn

SEQ ID NO: 872 - DNA, 789 bp, Zea mays
  misc_feature (1)..(1): n is a, c, g, or t
  Peptide Sequence Number=SeqID_13715
  Probeset Number=SeqID_15275
ngtgaaattgaagttagttcacggttaccggttttaaattagttcgcagttatcagaagcttacaagtgcttggaacatatagaagcaataataatagtgaaaaaagcagtaaactggaagaggggtttgctgccgcacaatgggagcaccctcacatgtcctcgatgattccttagtatgtgtttgatttaaggtcaaaataggatgaggtgagggcgacaccgtcccctcgatttttttggatcacgccgtcatcaaaaattactacggtgtttacctcgcccccacgtgactcttatccaaacactatagaaactgtggccacccccttcgatccctccttgtacgtccaaccaaacacactcgagttgcttggctgagagtagggctagaaaataagctcgaggctcccgagccggctcgagctcggagcggcctcggctcggagcggctcgcgagcctcgaacgagccgagccgagccccttctttgagctcgtttttgcagcgagccgagccgagccggcttgttccggctcgcgagcccttgtaagaagggcactgaaacttcaccagctcggcacctcccactcatggaacattgtcctttatgtcaatcatgcacttggctcaggccttctcctctggaccgcggatccgacgaatcaacgatggtggcgaggtccaaatccttccgccggagtcgaccttagagaaccgccgtcgccgcccactgaacactggacccgaatttttttcgattaggatgttctaggtaatggtctcgtgc

SEQ ID NO: 873 - DNA, 677 bp, Zea mays
  misc_feature (677)..(677): n is a, c, g, or t
  Probeset Number=SeqID_15276
gcacgagaccattacctagaacatcctaatcgaaaaatcttttcacgcccaggcttcttccccaaacccaccgtcgttcttagcgtcaagctcatcttctcccctctgatttttccgccgccttcctccgatgcttatcagccaccggtggtatatttttcctggccgccctgatctttatctacgcacgtcattctcttctccaaccggccagcactccagttcgttcggtgcctgctctgctctcagttttctccccaaccgcgcccctgatcgagctccagctcctgcgcgcccttgctccttttctccaggccgccagtgctcagttttctctctccctcagcactccacggcgcttctgccctctgctcggtgtttctctgctcgtccatcttccctgtgccaaccatggcgcttggcgcctaggtcccaagccacgcagtcctctctggcgcgcaaagcttgctctactgcgcgctacgtgctcgccatggagcttctctgtaacgccgccctgaatttggggtagaattttttcttcttttctctcaccaaattcatgcgttactctcttttctctttccccgtttgctccctcttcccaatttcaaaccagtatagcggcaggtgtccgtgtcatgtataaaccaaaacctaagtgtcatgggtgttgn

SEQ ID NO: 874 - DNA, 502 bp, Zea mays
  Peptide Sequence Number=SeqID_13716
  Probeset Number=SeqID_15277
gggtaaattggtgtttcattgcatcgtattcacayaggcagtcgcctacgggaaggggaagccaacaacgaayaggaaaacggcggaagaagaacagagctacggtacgagggatagaaggcggcggaagaattcccccagccgtttctgtttattcctcgatggctccgagctcgatcttgttgccgtccccctccgggatggscaccagcaccggccgccagctccgtcgcatgagcaggctccgcagcccgccggagccgaacctccggcccactcgccacgcgccggcgccgcaggcggtacccagggctggsggcccccgcgtaggccggcgcggggctgcgcgacgggctcggcgcccccgccgcgcaccgcgtrgccagcagcttgaaccgctgcggcagcgtcgccattgggagttgggaccgcctccctcgactctctccctgtctgctcttctgtgcgtgtcagtggtgtgtgcgtctgcgtgagtgatttt

SEQ ID NO: 875 - DNA, 705 bp, Zea mays
  misc_feature (705)..(705): n is a, c, g, or t
  Probeset Number=SeqID_15278
gcacgagaccattacctagaacatcctaatcgaaaagccggatgccaccgctcgcgcgcgagaggagaaagctcccactcccttccttcagttttggaaacaaccgtggattctgggcgagcgaggatgaggtgaaggcgtgcttggcgaaagaagccagcgtcgactccgttggacgtcgccagtgtcgaggagtacaagcagaaagcgggcttggtgtcgaagcggggccggagggtcgacaggcagcaactaactaccgtgaccatcgtcaccgttgtggtggttcttcgccctccgtgccttcttccccctgtccgatagccgacgccggtgctagatctactccccccatcctcgcttcaacgagcacctttctttaatcggttagatggtgcgcttacctcgtcctcagttgctataatgggctccaagtgatgggaggcatgaaacatgctgaagtgatacaggctcgtattttggaaccagatagctgcaaaaccaagtcaataaagcaaagtgttcaagatcaaatgctcaaaaaagctgtcagtccagagccagagaagtttgacgattaaaaaatagaggacttcttgcaatattgatatgattatgtaaaaatacatgctcatattatattagtacaatattgaaaacacaatgtaacatttgaagacagtgttgttctgtttctttggatcn

SEQ ID NO: 876 - DNA, 741 bp, Zea mays
  Peptide Sequence Number=SeqID_13717
  Probeset Number=SeqID_15279
aaaataattttttttgcatttcatgttggaatttgactattgcataaaatttgaatttgaaacatgtacccagttttgaatttgaataagaaaaataaaaacaaaacaagagaaaaatagaaaatcttgctcacgccaaaacctcttctgtgggcccaatctaatcccatcgacccactcctccaactcctagtcgtgtggcccagcatcactcacgcgacccatttcctcaagtgcgtgcgtgtaccccggacgctgttaggtgggacccacgcgtcggtcatcttcttcccaactccgtgttgaagccagcaatctggggccgaccaaatcgactgaaaccaacgccccgcaaacgctccttcgcaccagttgattcggcctcagcccgagcttcttggaaacggattctatcgaccggctatataaccctagctgtctcgcgccctgaaccgaagagctgccgcggtgcacagagagcaatggaggagagagggtcgccgcacctagaacctttcctcaccggagccgggagagtgaagattagcctgtggccgacaccgtctccatgccggtgtcaaactcgattaggagaggcgttgaggattacctctgggacgcgacgaagccgtttatcgccgcaacaacttccgatgtatgcttatccaacgccgaggactcacgcctcggaacggcctgcacggcttttcgattaggatgttctaggtaatggtctcgtgc

SEQ ID NO: 877 - DNA, 1121 bp, Zea mays
  misc_feature (1121)..(1121): n is a, c, g, or t
  Probeset Number=SeqID_15280
gcacgagaccattacctagaacatcctaatcgaaaagccgctgccgtggccgcaccccgcccgcaatcagcgcctccgccgccgcagcccttccttcgccgcagcgcttccagaaatctccatcccgaaacctctgcgcacacccgcgccgtccccgctatagaagtccacagccgtccgccggtgccatgatccccaaacctccgccctggatcgccgcgcccggctctctccgcgtccgccctctccatggagtcgtgcccccgcctgccctcgcgcgagcgacccctcccctggtgcaccgtgcccctgcgcgccctgcccttccatcagcgatatacccacgcgacgcggtgatggcggatagaagcggggcagcgcggtctctctcccgaacgcgcacaagaagaccaggtggaacatatgcaagcaggggcgatgagaagaccccatgaatccagatcccaaacgcgcatgagaagaccccatgaatccagattggggggggggtctgcatctacatggccgtgtactccgcaccactcccctcvggccccgaccgtcgtgcgctcgctgtagccgaggtcggcctcaaccacgacgacgatgcggtctcctcgccccaggctcgacctcctcgctgacctcgccctgctccacctcaactccaaacattgtctctccgatggagaattgtctgtgccttaacagttcaacaaaaggaggcgtactacttgttgaaatattggtagctaatgacaaattccttgacctatttttaaaagcttgaattggcagcatcagctttgtaagaatcctcgtccaaatccagatatcaaaactttattcactgaccatacatgttctccacccaatggagctcgtgcatcgccggtatctgtaccactagcagctgttccaaaggctggtgctgcatatccaccactcacagctcatactccgttccaacctcctccacctggtccatctttagctggttggatggcaaatgcagccgtctcttcatctgttcagtctgctgttgtagcagcagcatcaaatacttgttccacccaatcaagctgtctccatgttgaaacgcccaactctaacagactatn

SEQ ID NO: 878 - DNA, 1194 bp, Zea mays
  misc_feature (1194)..(1194): n is a, c, g, or t
  Peptide Sequence Number=SeqID_13718
  Probeset Number=SeqID_15281
gcacgagaccattacctagaacatcctaatcgaaaaaaaaacgaaagagagttagagcacggttcgttgcgggggaagcaaagcaggagaggagctgacgcggcggctggggcgagacggcggggaggcatggacgggcacggcggcggagccggtctgatatttacgggatattccttcgcgtgctctgcttctgctgggattcaagtgaaggcaccccatggccgagatagaagacgcgatgggtgcgccgctaacggtgacgacgacggagtccgagggcacgaccacagatgaggacgtgcatctttcgccgacctgcatctgcggcggcgcgggcggagctggtgggggaggccgcatcaagatcctctgcagcttcggcggccgcatcgtgccccgcccgcacgagggcgtgctcaagtacgtcggcggggagacccgcgtcctcgccgtgcctcgctccatctgctttcgcgagttgaagaaaaaggtggaggacatgttcaagacggaggtcgcggccatcaagtaccagctcctctccttcgccgaggaactcgacgtgctcgtctccgtcacctgcgacgaggacctggtccacatgctggacgagtacgaccgcctcgaggcgaakcgctcgccgaccacgtccccgcgcttccgcgtctacgtcttcacgccgcaggccaccgcaccaaccgtgccctcgtctacccgctacgctggtctgtcgcgcctccacccgcatcaccaccaccatcagcagcacctccaattccagccgtagcgctacgtggccaccgtaccagcctcgcccgacgggagcccgccgttytccgcccagccgcacggcgccgtctcggcgggcaactccccgcgcgccaacgcggtgccgcccagagaaaagaacgacgactggaattggcggtgcattccagagaaatttgcgcgaagagaagaggataaaagaacgacggcggctaggagagaggtaacggatgtagacgacgtgagtatccatggttttaattaaagaggttaccaagtaatagagtgttcttgttcgttttagcgagtggtctattccctgcttttccatatcagctaatccttcgcctacgcctccaaaacgtcgaagccgcacgtgaggatctccataatagcaaatttctcaaaataagttgacaatcn

SEQ ID NO: 879 - DNA, 1471 bp, Zea mays
  misc_feature (1471)..(1471): n is a, c, g, or t
  Peptide Sequence Number=SeqID_13719
  Probeset Number=SeqID_15282
gcacgagaccattacctagaacatcctaatcgaaaaaaaaaaaataatgctgggtccctttcaacaatctggagagagagagagagcggttcttccctttggtcccgcagctgcgatccctctccttcctcgtgggacctgggaagctcgttttccacaaccaccatgcgaactgtcctgtgtctgtgtgtgctttggctgcgtccatgaccatgaatgaaccagtggctggttggttggctggcatgcaggggaattcgcggcattcctgacgggggcgaacctgatcatggagtacgtcttctccaacgccgccgtggcgcgcagcttcacggcgtacctcggcacggcggtgggtgtggacgcgcccagcaagtggaggattcctgtgccgggcctgccccaggggttcaaccaggtggacctcgtcgccgtcggcgtcatcctcctgctctctgtctgcatctgctacagcacaaaggagagctcggtggtgaacctggtgctgacgggcgtgcacgtggtgttcatcctcttcatcatcgtcatggggttcgcgcacggcgacgcgcgcaacctgagcaggcccgccgacccggcccacagccccggcggcttcttcccgcacggcgccgcgggcgtgttcaacggcgcggccgcggtgtacctgagctacatcggctacgacgccgtgtccaccatggccgaggaggtggagcggcctgaccgcgacatccccgccggcgtctccggctccgtcgtcctcgtcaccgtgctctactgcctcatggccacctccatgtccatgctcctcccgtacgacgcgatcgacccggaggcgccgttctcgggggcgttcaaggggcgggacgggatggcgtgggtgtccaacgtcatcggcgccggcgcgagcctcggcatcctcacgtcactgatggtggccatgctggggcaggcccggtacctgtgcgtcatcggccgctccggcgtcgtgcccgcctggctcgccagggtcgacccccgcaccgccacccccatcaacgcctccgccttcctcggcctgctgacggcggcgctggcgctgttcacggagctggacgtgctcctgaacctcgtctccatcggcacgctcttcgttttytacatggtggccaacgccgtcgtgtaccgccgctacgtgggcgacccgtgccccggcgcacttgcgaccttccgttctctgctagcaaccttgttgattctgttttgtgcgctcggttctagtcttcccggcgcacttcccataggcaagctgtcaagaggattatagggtacctttgtttcactcctgagtttggtttgtggtactccttgtcttctgccatgtctttgtctgggtattcagatgttgattttgcggcatgtcctttggatcgcaaatctacttttaggacttgttagtttttggggactttgttggtggtcttcacgn

SEQ ID NO: 880 - DNA, 802 bp, Zea mays
  Peptide Sequence Number=SeqID_13720
  Probeset Number=SeqID_15283
gcacgagaccattacctagaacatcctaatcgaaaaataagagctgaaaagtaactcctacaagctagagcaacactctcaagtgatcaaaagccacacaagtaccacaatagagaaatttgagcaatcgatagcggttctagtgtagattgtggtagtgccttgcgagagtgtaattgagaagagtgtgtgttgcgttcttgtgcacttgatcttggagttttaactcccattcattgtaaagttagcagagcctccaagcttgttgaaagtcgcctagagggaggtggataggcgggatctgaaatttacaactttaaacacactacaagccggggttagcgttagaataaaatccaagtccgggagagaggggaaaacaaatcaaccaagaaaataaagcggatgacacggtgatttgttttaccgaggttcggttccaaagaacctagtcccccttgaggtggtcaaaaagaccgagtctctctcagcccattccctctctcaaaacggtcacttagaccgagtgagctttctccttaatcaaacgggtcacttagacccccacaaggaccaccacacacttggtgtctcttgctttgattacaagtgtcttgagaactataatgaggaagaagaaagccaaccaagcaacaagagcaacaaagaaacacaagaacgatcctctcacaagtcctaaagattagaattgaattggggactttgatcggatcggtggctataatttgtgtcttggagtgttgtgttttgctcttgtattgaatggacagtgttgaatgcc

SEQ ID NO: 881 - DNA, 935 bp, Zea mays
  misc_feature (935)..(935): n is a, c, g, or t
  Probeset Number=SeqID_15284
gcacgagaccattacctagaacatcctaatcgaaaaatacatacatatcacaacgtgtctctgtttggcggatggcagcccgacatagcagcccctggagtgagcatcttggcagccatgcgtgactcgtacgtgctcctgtccgggacatccatggcatgccctcacgtctccgccgtcgtcgccttgctcaagtcggtccacccggactggtcgcctgccatgatcaagtctgccattcaccacagcatcggtgaccgaccgattcggcctgccgatccaagccaactcggtgcagaggaagccggccgacgccttcgacatgggcggcggcctcatagcgccggacagggccatggaccccggcttggtgtacgacatcctgccggaggagtacacaagattggacgaccgcgccgaccgcctcaacctcccgtccatcgccgtgtccgacctcaaggactccgtcacggtctcgcgcaccgtcaccaacgtcgggccggcggaggcggcgacgtaccgggccgtggtcgaggcgccggccggcgtcacgatggacgtggagcctccggtgatcgcattccagagaggcggcgccaggaacgccacgttcacggtgacgttcgtggcgaagcagcgggtgcagggcggctacgcgttcgggagtctgacgtggctggacgacgccaagcggcactcggtgaggatccccgtcgccgttcggaccgtcgtccgggacctcgtcgccgatgtagcttgatggtcgagttcggtttctgggcacgcacatacatgtgttccgcgttgtttacttgctgtgttgtcgtctcgcggccgattcgatcgggttcttgtaataagaaagatggcgtggaaacacttgcatacaaataatgccctcttgcaaagcagttctatatattattttaacacgn

SEQ ID NO: 882 - DNA, 1841 bp, Zea mays
  Peptide Sequence Number=SeqID_13721
  Probeset Number=SeqID_15285
gcactagaaagaatgtcgtttattcgaatttattaaagttgctggtttttccgttcaatttgctcacctactattagtcgctagtgcattcataattccggtaaagtgttttaaggactaaagtcctgtaaaacagcagactagtttatcagataatttcaactagtttccaaagtgagcaattaaaatgaaattaacgcaaaatgcaatgtttaataatggaaataaacttggaagtttcttttatcaatacctagccacgatatcaggatgcctgagtataatttgctgcggaatgcattttggctggcccagcccttcgttgccagaacttctggatccaaactcaactattccgatgaccagcgaagaagggtcatggctagcagcgatgccttgcattggtgcgcccattggtgatatcattgctgcgtatatggcagacaaaattggcagaaagtacagcatgctaatcacttctccgatgtacgttgcctcctggttgttagtggctttttcaccgtcagtttttgtttttgctttggctcgcattattgccggagctgctgatggaattgcttttacggcatttcctatgtacctcggtgaaatatcagattcgaaaatcagaggaattttaggctccagtatacaagtttcaatgaccactggaatgttgttggtcaacattattggactttatttaaatataagcttaacagctataatagctttggtcttcccggttctgcattttattacattttggttcatgcctgaaagtccgtattatttacttatgactaagaatactgatgcagctcgcagaagtttgcaaatttttaatggaactgacgatgttgatcaaaaactaaaaactgtagaccaggctgtgaaagaagacttagaaaacacttcaagcatatggaacctgtttacaacaaaaagcaatagaaaagcacttttaatatgtttttgtctgcggagtattcaacagtttattggcgcctatgccattacattttacgccaagatgatcttcgatgaagccggagaaaacatatctgcgtctacagccacaatgatatttttttcagttcaactttttgttgccataattgcatcattcctctcagatagccttggtcgaagacctctcctgattatttctatcatcggttcaggaattgctttggctgtggaaggactttatttctactttgagggcaaaatcgacatgtccggttacagctttgtgccattattagccctaattagttacgttattatttataatgtcggcgtgggatgcgttccaatcatcctcctcggagaactgttcccgccaaatgtgaaagcgttcgctctctgcctttgtgacatttggtttgatattgtagtgacatttatgtcgaagttcttccaattaatgaaagacaatttcggaatgcatgtgccattctttgcgtttgcgctattttgtggtataggtttagtttttatagtattgtgtgtgcccgaaactaagggcaagactttagaagaaattcaattgatcttaaaaggcaagtcgaaaaaaaatcacgacattgaacttgaagttaatacttgactaagatattagtaaaaattctattttgtaattatttattgtgacaattgtaaattattatttttattatgttttgtaaataaatgttttttaactgctcaggatattttgtatgaaagattgcagagaaaagatattttgtatttaaattttatcataatgatattttaaaatgtaactattttcaagagaaattttaatctaaataaaaggcaacttttttttgctc

SEQ ID NO: 883 - DNA, 881 bp, Zea mays
  misc_feature (1)..(138): n is a, c, g, or t
  misc_feature (881)..(881): n is a, c, g, or t
  Peptide Sequence Number=SeqID_13722
  Probeset Number=SeqID_15286
nnnnnnnnnnnnnnnnnnnnnnnnnnnnnnnnnnnnnnnnnnnnnnnnnnnnnnnnnnnnnnnnnnnnnnnnnnnnnnnnnnnnnnnnnnnnnnnnnnnnnnnnnnnnnnnnnnnnnnnnnnnnnnnnnnnnnnnnnnagggattaacggcgaagtgccagccgccatgcacgcgccgtccccggtccgagctgtcctggcgaaggtccggccgccatgcagccgtcttccccaatccgcgccacggtggacggaacagccacctctgatgacggcagcgccagccgtttcagcacgcggtatggaggcggccgacgggacaccggcgcgtcgacatcaggcgtgcgcgtgccacggacacggatgtcagcagctgcatggatggtctacaggaagcgtgtgtgtggctgatgcgtgtgtgactgatgatgcaagtgggccggcccaggaaggcaaagacgagccgaggaagagcaaagccaatgtgcggcgtcagcatcccctacaccatcagcacctccaccgactgctccagggtgaactaaaacctagaccacgcgcgacgacggccgcctgatcgatcgaccaaccattccgccgtcgccgccggccggatcatcggtcgtcgtcatgatgatatctatcaatctacgcgtgatgatcgatggctacttgtctactgctatgtactactaaataaaatctctccccgtgtgtgtacacgtacgcttgcatgtgcatggtagcatgtacgtacgacgtcgtccatgtataagtgtgtgacgtgtgagacggacagagagagagagagacaggatcgatcgagagacggtcatgtccttttggctgtttggtttattcatatcacaacttttgagtgn

SEQ ID NO: 884 - DNA, 911 bp, Zea mays
  misc_feature (911)..(911): n is a, c, g, or t
  Probeset Number=SeqID_15287
aagagataaggctcttcttggcaacaaaacagcagaggttgacgtgccgcgtgcacgcctggacgacgatgcagctccagcatggccctcggcctgagtggcaggtgctgctcgtccccgcagtagtctcccccgccgacctagcctcccgcgccgccgccgcagcagcagcagcaggaccaggacgacgacgacggcgctggcggtgctagtagccgctgcgacaagagacggggccagaaagacgacggcgtcgggcagcagggccacggcggcggacgtggtgaggcagttctacgacggggtgaaccggcgggacctggcggcggtggagccgctcatcgcggagggctgcgtgtacgaggacctggtgttcccgcgccccttcgtggggcgggagcgggtggtcggcttcttcggcgagttcatggggaccatcagccccgacctgcagttcgtcatcgacgacatctccgccgaggactccgccgccgtcggggtcacctggcacctggagtggagggggaggccgtttcccttcagcaggggatgcagcttctaccgcttgctcagttcttcggtctcggagcagcagcagcggctgcagattgtgtatggtcgagactgcgtggagccggccgccaagcccggggatttggcactggtaatcatcaggggagtgacatggatcctcgaacgatttccgagccttgcaagaaggctctgatgaccccaaccgagacaatagccacaggatacgctacgcatggcttaatttgctctcaaaagtccagtgagatcgagctagcagacgtgtataatgttatacaatacattattctgagaaactggcgaaacgtatgtctcgtcgtgaggaaaagaaaaataaaaatataggcccaattactttn

SEQ ID NO: 885 - DNA, 585 bp, Zea mays
  Peptide Sequence Number=SeqID_13723
  Probeset Number=SeqID_15288
ctgggccgcctacatcgacggcaagctgtttccggcgtggacagggatcatgaaggcggcgacggaggaagcgagggcggagaagctgagggagacgcacgccgcggtcctcaacctggagaaggccttcgccgagatcagctctagctccagcaacgacggcgcggccttcttcggcggcgactccgtcgggtacctggacctcgcgctcgggtgctccctgccgtggttcggggcgctgcgcgccatgctcggcgtcgagatcatcgacgccgcccaggctccgctcctggtggcgtgggccgagcgatttggggagaccccggtggccaaggaggtgctgccgcagccggacgaggctgtggcctacgccaagaagattcaggcctactgggcttctgctaagaactgatgagcaccgaatcttccctttggacgatgtgaaagaagaacggggaaatgaggaaatagggtagaattggtgtaggatgtatctacaagataagagcgtatagaagtctcaacgactccgctcgctctcgagatccacaccacaatgtccaactccagcaatctcagtcgctt

SEQ ID NO: 886 - DNA, 766 bp, Zea mays
  misc_feature (766)..(766): n is a, c, g, or t
  Peptide Sequence Number=SeqID_13724
  Probeset Number=SeqID_15289
aatctgttagctatctaaggctatattggaacctctacagctattagctagctaataaattatttgcagggttgcttaatttgtcctccgccactgctcgagtcattgctccctccctccctgtttccctggcggactctgatgctgctgctctcctggaggctagcgctactcttcggctggatccccacagctggtcccctccggcagcgccccgtctcctcggctccggccgtgcctctcctcgtctgagaagcggacgaagaagaagcgagagatggcgcggcgcgggagccacaagcgcgggtgcgcttcgcggacgacgtcgtggacaaggacaatggcgtcgccgctccgcgggaggaggccgagccgtcgtgcgccgcggcggtaaggacgctcatgccggccaaccggaagggcgctgtacggcggcatgctccgcggccgctccatgctcagggtcgcctgctcctactagctagctctcctaggctcctagcctagcatagctgcatagcaccaccggcacccgcccggctgctggtccattgattaatctagacctccgatccagctcctccgcgtcgtctctactctcttatgcgcgcgtgctgtgctgccaactagtagcgctgctaattgcccggcctagctcccttgcccattgctggggaagtatcgttggtgctgtgttgcttgtactggtagtagcttgcttccttgtacattagttagtcgacattatgaatgatgatgatcagtn

SEQ ID NO: 887 - DNA, 984 bp, Zea mays
  misc_feature (984)..(984): n is a, c, g, or t
  Peptide Sequence Number=SeqID_13725
  Probeset Number=SeqID_15290
gcacgagaccattacctagaacatcctaatcgaaaagtcctcgtccccccaatcttcagcccttgttcatcaacaaaccacatggccgcgcttcctcatcgtcggcgtcgccacgggaatgcagtggcctgtgcgtcgtcgtcgccgtcgtcgtctcaacaccagcgaagccttaatggcttggcgatgagttcttcaggcacgaacaatgccttgcccatcaaaggaactaccactacacgggttcctgcagtcggtcgttcggcccctgcgaatccgtcgccgtcaggagggaacaacctcccagtgcccaagattcctctgtgggtcaagtgggtggctggcgccgtcatatttgcagtgcccatgtacaggaggttcagagctttagaagacaagatagagaagacggcggaggtggcgatcgaggtgatcgacaaggtcggaggcgacggagaaggtcgccggcgaggtcgccgacgagttccccggcaacgagagcatcaaggaagcagcctccaggatcaagaaggtccacgtggtcgaggaagacgccgwcaaggctgaggccctgatcgagaaggtcsrcsagataaagaaagaagtggattcgattgtcgatccyataatgggcaaggttsccaaggataaatckcggagaatgaaccmaaaagsatgmcagcagtcggtgaattgaaaggagcaaacattgctcggacggaaaagggaagcaacatsccgcgtctcgtttcgtttttatctcgtgcgatggcttcctcggtacaaagtacgagatgaggcataagactgttcatataatcgtgcaaaacactattttacactgtagattgtgttgtttaacgagagaatttcgaaataagagatgagatgctatgaataagctgttggaggcatcctaaaaacttgtatggtaatcaaaggaagaaattctcctcctaatgatatgagtaaaacatatggctn

SEQ ID NO: 888 - DNA, 1928 bp, Zea mays
  misc_feature (1)..(36): n is a, c, g, or t
  misc_feature (1928)..(1928): n is a, c, g, or t
  Peptide Sequence Number=SeqID_13726
  Probeset Number=SeqID_15291
nnnnnnnnnnnnnnnnnnnnnnnnnnnnnnnnnnnnacccttgccgccaccgtcctctatctgccgttccaccggcggcgttgcctcccacagtcccactgaagcctctcgcggacccttccagaacttgtcctcgacctccccgtggtccggcctcttaccggtccgcttcctcctacaccggatttaggcttattgacgataatgtgctaggagaacgaatttgggtggcatagacgttatgtctatgaagaggcattttgcgatattcaccaccgcaagcctcccatggatgacaggaacatccatcaaccctttgttccgggctgcttatctggcaaaggatggtgataaggatgtcacactggtgatcccttggctttgtctaagggaccaagagttgctttaccctaacaatattgtatttgactcgccttccgagcaagagagctatgttcgccactggatcgaggagaggattgactttaggccatccttcagcatcaaattctacccaggaaagttttctaaagaaatgagaagcatcctccctgttggagatattacagaatgcattccagatgaagttgctgacgttgctgtattggaagagcccgagcatctaaattggtaccaccatgggcgaagatggaaaaataagttccgtcgagttataggaattgtccatacaaattatctagcatatgtaaggagagaaaagaatggtcaagttattgcttgtttcctaaagtatgctaacacttgggtaactcgaatctattgccacaaggagcgagccgtggtcggcatggggtgcagcctccatcgtggagaaggttttagctggccccgtcgtcaatgagaagctggccaagatgggccaccgctcgctgcagggtgagctagacatgcccccgcgtcgcacgcttctccgtcaactctcccgcatcgcgagcaggagctgcagatgccacacgcccgcgtgctacctactcctcgccgacgccgacctgctctgcgccgctgcaccattgttccacgcccgcagaatgttgctgcgcttctccctcaactcccccgcgtcgcgagcaggagctagagatgcgcctgcctgcgcgctacctgctcctcgccgacctgcccatgcggaaggatacagagagctgatagggatccgttggatgagagttttcacatttttttcttaaattaaggattggaattggtattattaggatctattggagatgctctcacaacttgcacagaccaaaacccctttgcgatctggtctcgaccaagctcatcgagctcataatgccccgatcccatacccctcccatcacctgcagctcccactgccaatttcgtgacgacagcctaccaccatgctcccctgatgctgcccatctgctgtcctctaccaccaccctggtagcgccccggccgcttgctttcccacctatccactgcctccaccaccatgctggccttcctcccctggtcttgcttctatttccggtaattatgaaatccctccaaacccctaaatccttaaccctaaacccacagtccttcactggagaagcctcctctttgaaggctttaacccttaaagaaaaatcatctgttgtgtcactctgagtttatgatagagcttagcacactgattattttagtggattagtaattatggaagctccaaaatgactccattttaatgacgccttcctagatttgatttggctggtcattctattcggagtatctttgtgatgtggttctggggctaacagcttcagaatttggttgtagggaaggctagaggtgtttaaacctaattgctgtcctttctggtcgattttcactcctgttctacaaactggtgttggggtgttgaactgttgatgtatgcagcattgtgttgn

SEQ ID NO: 889 - DNA, 800 bp, Zea mays
  misc_feature (1)..(43): n is a, c, g, or t
  misc_feature (800)..(800): n is a, c, g, or t
  Peptide Sequence Number=SeqID_13727
  Probeset Number=SeqID_15292
nnnnnnnnnnnnnnnnnnnnnnnnnnnnnnnnnnnnnnnnnnncccaccctctgcctagcgtagcgcaccgtccgcggcgacggcggtgtccgcccgcccacccacccaccgccgcacgtttcctcctgcgcgccgcctcggatcagcccgagcccaccgcgtcggcgccgcccccacccgtctaaacaaccacggaggccgcggccggccgcgtctctctctctctctctcctcgccgaggccaccgtccgtctcatctagccggccgcggggatgaggcgatcgtcgagcggggcgcgcgtgtcggacagcggcggcggcgtgagcgggagcgaggcggcgctgccgacgtatgaccctctgtcggcggcggggcggcgggaggcggcgcggacgcaggcgctgggacgcgccgtgcactgcatccctgtcgtgcttctcgtctgcgccctcctcctctggctctccgcctcctcccacacccacctagattgagagtaccagcggggatcttaagtgaacctggcgggtagagtctggttctgttacacttgtaccactgaagagttccgagttccaaaagagaaagagaaaggtaaagcaggctagacatgatcatcagctggcaatacataggtgcggattagaatggaaagtagctcatttactagcaggcaattttttggaagtcttaaggccatactgagttggactggtttggctcagcgttacatactgtatacaacgaatgcccaatgtaacctttcccaacacaatgctgttctgatattctttctgn

SEQ ID NO: 890 - DNA, 747 bp, Zea mays
  Probeset Number=SeqID_15293
gcacgagaccattacctagaacatcctaatccgaaaaatgtcgtcgtcacggatcgagatcatgatccagcgagcgagcgagccagcacttcacttccactagcagttagtctcgggctcgttggccgtctttgccggggcagctacctaacagacgcatggcacacgcacacgtcgaccggccacggagccgcgccgtgctcgcggtcgccgtcgccgccgcggcgctcctcctttttgccgcagcgggcgccccgcgtgcggccggccagacgacgacgacgacagcggtggtggatccggacagctgggccgatcgcggcgcggcgtgcacgggcgcggtggaggcttgcggcggcggcggcatcggcgccacggccaggagggagctgggttccggcgggtacatcagctacgacgccatgagccgcgggcgcgtgccgtgctcgtaccgcggcgcgtcctactacaactgccggccgggcgcgccggccaacccttactcccgcggctgctccgccatcacccgctgcagaggctagggcagagcgagcgatgatcatccccctcccccccggccatgcatatgctctgctctggtggttttgtgttctgtagttagctgggcttttgagaggttggttgttgatcagctgacatagagcaagctgcatcttgctctatgattttgtaattggcattggaaaaaagggaacatgtgtggatcaagaacccctggtccattat

SEQ ID NO: 891 - DNA, 970 bp, Zea mays
  Peptide Sequence Number=SeqID_13728
  Probeset Number=SeqID_15294
aaaaaaactccgccgcaacaagggccaacatggcgaggcggcaaaccatttctttcccttaaaccctagccaaaaacccttctgctgctccccgcccgccgcccgccaccatgtcgatggcggtggcctccctccctccctggcgcgccgccaaccccgcctgcgcttgccccctgcgccgctcgtcgtacccggcggccgggcagcattactttccggcgcggccgaggaggcggccccgttggctgccgcggaagcggcggcgccgccacctgttcccggtcggaaggtgctggagagtttccgcgaggagtttgagatcggggggcgctccatcgccttcgagacgggaaagatggcgcgcttcgccaacggttccgtggtgatctccatggaggacacccacgtcctctcaactgtcgccgccgccaagtcctctgagcccattcgagacttcctcccactaactgttgactatcaagagaaacaatatgctcaaggtgttatccccacaacacatatgcgcagggaaggtgctcctaaggaaagagaacttctatgtgggcgtataattgatcgaccaataagaccattgtttcctcctggcttttaccatgaagttcagatcatggtaaatgttctttcatcagatggaaagcaagatccagatgtaatggctgcaaatgcctcttcagctgcactaatgctatctgatataccttggaacgggccgattggagtaatacgtgtagggaggattgatggagcttttatattaaaccctacagtggatgagctaggtttgagtgacctcaatcttgtttatgcatgttctcgggataaaactttaatgattgatgtacaagctcgtgaaataagcgagagggatcttcaggcaggaatgaaacttgcacactctgaggcaattaaatgtatcgaccctcaaataagtttggstaagcgagctggc

SEQ ID NO: 892 - DNA, 649 bp, Zea mays
  misc_feature (1)..(1): n is a, c, g, or t
  Peptide Sequence Number=SeqID_13729
  Probeset Number=SeqID_15295
nggcaaattaaattcattaatcacgctgcaaagattatgtcaaattacagtgcaacactaaccagaagagctgctgatttaactgaacaacaatacaatggcatggatcaacaccttggcctttcccaagtccttgctggagacttagctgtcgtgcacgcgatcgtgttaatcggtccattcawttgtatgtatagaagtgatgtcctcatcatcctccctctcttgaaattggattcgtcctcgactcgatctcatcttcgtcacccatatatggcttcaaatctggagttgggacgacgaggcaccccaacccacgtgttctgcggttcggcactggaaggcatgctccggcgacyaattcctctatgcccgaccaccattcgccttaacgcacgctgctccccacttcggtgccctccgtggaacgattctgcgcgcacaccgagggtctgacgctgccatacgtgaatctatcatagcgactgcttctctatgctctttctctgtttctactatggcgccgggtgggtcttgctctcggctctaggggatgatggggggggggggggggttgttcggcgtctggttttatagatcctagcgtgggcgagaccgaaagactcggggtcggggttacccattttct

SEQ ID NO: 893 - DNA, 573 bp, Zea mays
  Probeset Number=SeqID_15296
aacaaatacatagcagtggaactcatcccggcccatatcttgtcgcgagcgtcatgacgcaagtggccagatcaagcgatggtggcggcgcgattcacgacggattcacaaggcttcttccgccgtcggctgcctccatcttcaccgacgagcttttctataatgcagacgagagcgcttcatcctgcgattaaatcagcactagtgttgcacaacggtacctgttgcatttgtcgtagcagctttattgggcatatcaagatatgcaggacaaggaagtggtgttagtggtgctagtacaaagaaggatgtcaatggccctgaggatctttaagctatgcttgccgtcaccagtttttcccaaggatttgtcaataggagcagccaacccaaatcactcccactgagctctaccttttgtaattctcgtgccattccgctcccgctgtgagggtcctgtgagcccgctagagaatatgactgtaatcttctttggtgcgtctgcccttctgtttttgtgcgccagggacgtatattttgctgtaatgatactaccatagctttgcgtgccgg

SEQ ID NO: 894 - DNA, 1134 bp, Zea mays
  misc_feature (1)..(1): n is a, c, g, or t
  Peptide Sequence Number=SeqID_13730
  Probeset Number=SeqID_15297
nagtgcaacattttaacctatatttcatgacaaaacaaagttacgagatgataataaatattattgtgagactaatgcgactagaatggatcaaaacagagttacgattattgggttacgaatttctgaagttgtttagcacctaaaatagataatattattcaaatgaacaatttaaattcaagtttcatggctaaacaaaggttactcggtgatagataatattaaaacaaaattattgcaacagggatgactcaatttggggttaaaatgaattaactatgaattatacaagtttatggaattattttcatactaaaaacctatttctttattaatttctgaatatcctaagtgttctggactgggcagaatatttcttaaaagatcagggcctaaatcccaattttcccaagactcagctttccccgcacaggacggcgggttgattccacaaaaccccgagggctcattagaaaaaagacccgaccgaagggatacgggctaatctgagccgttggatttgattttaatggcccatatcagataaagggaagattgaatcggtatccaaaccgtcggatcgagatctgcggcccggatttaatattactacggtccatccgtatccatcagattatagatctacggtctacatcgattaagccgaaagggtaaactgatacagatgttcttcaacctcccggcttccagacacagccgaccgcgctaactctccaccccgacagaccgcccaccggccatggcgttcgccagcccacgacggcgcatccaggcgtgatgccccggcgaacccatggcccatcacccgccgcacctaacgccataagatgcaaggagcccggcgaaagaaacaagcgttcttaccggcaaccaatgtgtagacgacgtcggccgtagagagcaggaatacacggtcaaccacaatgtcgccgaggcaataggagcgtcccgcccccaggcacgccaggtagaagcgcgccccgacgaagcaccacgtggaaatccacgcgtagacgatgactcctacccccaggagcgacggtgagacactcctctatctctctccatcactagtttttttttaggatgttctaggtaatggtctcgtgc

SEQ ID NO: 895 - DNA, 947 bp, Zea mays
  Probeset Number=SeqID_15298
caatgagaagcctccataacaggttttatattttacaacatgcatacatatacacaatagtccaaacaagtctcaaacacatatatacacaatagtcaaaacaagtccataagtccacacgacaaaagtccaaacatcgcataaaacaagtcgtgaagtccacaagtccatacaccttgtggtggatcgtcaggacgcaagttgctcgtgttgaagatctggtcgacgaagttcgtagcattgttcggagtatgacgcgaacccgaacccactccaggtgatggaagtgctgtgtcggccatggagcatataccgacgacatttgtgactaccccataggtggatatccccacgacatctgtggcggcggcatcaacgttggcatttgaggcggcatctacggagtcatatgtggcagcatctacgatatctgtggtggaattgaagatggtctcggaccaaatccccacgacatcggtggtggcattatttggttatggggacctatcttagaaccctgtgattccaccgccgcacagtggtgccgcgccagcgtccccagacccgacactgtggatgacgaactcccctcccaaggacgtgttatgcgtagatggagacaaagcgaaacggttgcagggtttctcaccatgaggcgtgcggtagggacggcagtccacggcgacgggcggaatcacgacgacgtcagaatcacggcgagaaattcaccgagcgtcgattcacctcaacacccgcctgcccacgagaatgtccaccaatggctaacacagcccccaaacaccaccctgaggtcccaatgacggcgcctctgtgagtcaccaacgggtggccgcccaccacacttctctccacgcgacgagactattcggctagttgtgtatggccaaccttttttgattaggatgttctaggtaatggtctcgtgc

SEQ ID NO: 896 - DNA, 549 bp, Zea mays
  Peptide Sequence Number=SeqID_13731
  Probeset Number=SeqID_15299
atcttgtcctgtgctccgcctcggcctcggcctcggcctcggcctgttcaccgcaaatcagaatagaatatcagatcactcctccctgtctccatcgccagcacctacatgtggggtgaaatccaatgtcgcacgaaagcgtcgcccratkttgtctctccactcaaaaccctacgccccagccccgcggtcatgtttgtagccacctctcctccgttctccaccctccacaactgctgccacgatgtcgccgcctccggagtcccactcagtatagtgaggcrscaccaccgggcacgtcgacaacgacgccatsmcywtataccctctagcaaaaagatctacaatacggtgcagctcattggattgtaggcaccggtgtcgacgtgcggcaactgccagcttcccatcgctccgctgttgtgaggagttgctttgtcgtatggaagtcggccgtcggtactacatggtattgcttattttgatccgtgttagccaattctaattcattgatttctaacgtatctcmcawcaataaagatgattgtc

SEQ ID NO: 897 - DNA, 1251 bp, Zea mays
  misc_feature (1251)..(1251): n is a, c, g, or t
  Probeset Number=SeqID_15300
gcacgagaccattacctagaacatcctaatcgaaaaagagttcctcacctcccttgtccccatgctccctcgcccgaggaggcaatggcacccacttcttcctcctcggacacagccctcaccttggcgctggagaaccagacacgttctctgctcgcggagctcgacaagcggttcacggcgctcgactccacgtgggaagcgcgagtcgcggcgctggagccggttcacagcatcaagggcagctacggctccaccgaccccgacgcactgcacgatttggacgccaacaccatcttcctcaacaccggcgaagggcctgattcggacgccgacaacttcttcatcaacattggcgaagggcccttagggccagttgttggcgatacggtcgtaggcgcgctcggtgatgtgggcgttgtcctagatccagtggtggaggaggtacctgtcgacgcgcccaccaagtgcttgatgagagtcatcaaccgcggcgactactacaacccagacgcttcctccgccgtcgacatggcggtggtgctgctcgccgacgcgggctgcaagctcctcgtcccgccgcaccaccctctggccctcccctcgccgcactcttcgcggctcgcctctcacgcaagctctccgctagcggggacgcctcctcaccctcggcccccaccccgcgcctccttgagggcctcaccgccttcgcggcctattcgcctacgcggctccgccagatgcttctcccgaccgcccctcacgcgtcgagccacgctcgcgcgctcctctccttccctgcactccactgctcactcgagcacttatagagaaggtacaggatcaccactactccatctctatcaagtgatgctgatctgttatgtatttccaccaaatttcaaagggcactgaaagtgtttgtggtaatgagtgttcagactcaactcatgctagacccattgcctactatggtgcttggcataaaaccttggctaccacctcagcaacactgcgacatttgcatgtctgacattgttcagctatgcttctgtacttggcttgtattgagtagtgcttggattgatgtagaacaaaaatctccatggccaccacctacactaggctttatgcacagtgatgttgttcaattaaggccaacaccatggcctccatttagactgcatagtggggttgattggattacttgttatggtggatatatgcatgttaatggtgacaagattctan

SEQ ID NO: 898 - DNA, 1347 bp, Zea mays
  misc_feature (1)..(454): n is a, c, g, or t
  misc_feature (1346)..(1347): n is a, c, g, or t
  Peptide Sequence Number=SeqID_13732
  Probeset Number=SeqID_15301
nnnnnnnnnnnnnnnnnnnnnnnnnnnnnnnnnnnnnnnnnnnnnnnnnnnnnnnnnnnnnnnnnnnnnnnnnnnnnnnnnnnnnnnnnnnnnnnnnnnnnnnnnnnnnnnnnnnnnnnnnnnnnnnnnnnnnnnnnnnnnnnnnnnnnnnnnnnnnnnnnnnnnnnnnnnnnnnnnnnnnnnnnnnnnnnnnnnnnnnnnnnnnnnnnnnnnnnnnnnnnnnnnnnnnnnnnnnnnnnnnnnnnnnnnnnnnnnnnnnnnnnnnnnnnnnnnnnnnnnnnnnnnnnnnnnnnnnnnnnnnnnnnnnnnnnnnnnnnnnnnnnnnnnnnnnnnnnnnnnnnnnnnnnnnnnnnnnnnnnnnnnnnnnnnnnnnnnnnnnnnnnnnnnnnnnnnnnnnnnnnnnnnnnnnnnnnnnnnnnnnnnnnnnnnnnnnnnnnnnnnnnnnnnnnnnnnnggcaccttcgtcgagatcggccgcgtccgggccgacctcctcgaccaccccgctgccagggccagggaccccatcttctgggaggctattagggccagttcctcgtcgcgcgacgacggggaaggcggcggcgtcgccgtgcacgtcccgcccggcccgccgttccaccccaacctcaacgtggtccgcgttgctggcagcggtggcgggggaggtggcgctggcgacgagggtgcggggaaggagggctggggtggttccaatctcggcagggatttgcccacgcccaaggagatttgtaaggggctcgacaagtatgtgattgggcaggacagagccaagaaggtgaaataaatactttcatgttggtagcttttcatggttagagttggcatcctgatgcggccagctcatgcaaaatgtgctaaaacctttgatgacttcaattcttcactggagggacttttacagcatttctttagaaaagtctgaggtgaacaggacaattttgaagagctggtgggatcagacgcagatcggtaccttgattgagatcaatgatgtgcagacgctgacagctgataggatcgaggcatatattasacgaattggcggctttgatctcgtgatcggtggaagcccatgcaacaatctcgctgggagcaaccgccaccacagagatggcttggagggcgaacattcttccttgttctaccattattttaggatcttggactccgtcaagtccatcatggagcgcctgtagtttttagaaacttttgatgttctggttcgtagaattgtagccgtctttccctgtgatcaaacttgtgaatgatttgaaggtcgactggtgtaatattcatgtcactctaatttaggctactttcgnn

SEQ ID NO: 899 - DNA, 612 bp, Zea mays
  misc_feature (612)..(612): n is a, c, g, or t
  Peptide Sequence Number=SeqID_13733
  Probeset Number=SeqID_15302
aattcccccacaattaaggacaccgccgccactaatggccttgatggccgaccgaccatcttcctcccccgcgcccctccccttcgcctctccctctataaaaaccagccgaccggacctctctcctctccctttgcctaagctctctccctcttctctcttccctgcccgagctcgccatccgctagagccgcgcctcgccggagccatgccgcgccgccccatctcggccagagccgcacctcgccgtccgccgagccgcgccaccctgtcccggccgtgcccgcatcgtcggagccgttcatgcccgccccgccgagccccatcgtaccacgcccatctgtgcccacctcggccgagcccctatccgccaccgcgcctcgcctgagctcgctggaccgtccacgcccccgccctgaccgtccgccgccgcgaacgtcgcctgagccactgcgctgaacccccggccactgctcgctgttcgtcgcaatgttgaaagcaacctgaaaataattttattaatttttgaaatcacattttgaactagtttgtgaattttgtaaattattgtagtaatattggaatgttgtgatttcaagttcatgtgtatgn

SEQ ID NO: 900 - DNA, 425 bp, Zea mays
  Probeset Number=SeqID_15303
ggaccaagtagcacaatgatttaatgccaaaaaaaaaaagatccagactcctgaaacgaaagacccagtaacgctttagaccaagtagcacaatggtttaatgcaaaaaaaaaagatccagactcctgtgcggaaacaagttcaacatacttggggtacaatcaagtacatgagccagatgtcacatggcagataattctgtctcgggtacaaatcacaagccagtgagcccaccaggcatgttaagcagatccacagacagcatccattccacagtcaccagcaacgcgatgtccgccatcctctctctcgtatctgctgggctcgctgacgacgatctcactctgctcttgtcggttgttgctctgctctagtgctctggtgactgtggaatggatgctgtctgtgaaactgcgatggccgat

SEQ ID NO: 901 - DNA, 630 bp, Zea mays
  misc_feature (579)..(579): n is a, c, g, or t
  misc_feature (630)..(630): n is a, c, g, or t
  Peptide Sequence Number=SeqID_13734
  Probeset Number=SeqID_15304
gcagtgccgccgcggcgacttccactggccacactgcagtagtccttgttgccggcgcctggcggcggcgagaagttcggcgaacgatggcggactctggcagcccaaggaagcgggaggagaatgaagaggaggacgacatcgtgtgcctggatccgtccttcttcgtggaccgcagctacgagatgacgaccttcaccttcgggtcccacgagctgcgcctcctctgcctccgtgccacttccactgattttgatcttactggacagttagtgtggccaggggcaatcctgatgaacaactacctatctcaacaccctgaaattgttaagggatgttcagtaattgagctaggatctgggattggcattactggcatattgtgcagccgtttctgcaaggaggttgtcttgactgatcacaatgatgaagttctggaggcaaggttcaaattgtttaggaattcattcactgatacctcagcttcactttcatataggaattaaagaacaaagtaccattgagacttttgctttagttttagccattttgtatatataggtaaatgcatcccgtttnccacagatagaaaaggacatttggcaatctgtatggcaatagtcgctgcgn

SEQ ID NO: 902 - DNA, 725 bp, Zea mays
  misc_feature (725)..(725): n is a, c, g, or t
  Peptide Sequence Number=SeqID_13735
  Probeset Number=SeqID_15305
atcagtaagtaaacgagcaaaagaagaagagaaacaacaagaagtagtaatggcttcctctatgctctcctccgccgctgtggttacatccccggctcaggccaccatggtcgctccattcaccggcttgaagtcatccgctgcattcccggtcacccgcaagaccaacaaggacatcacttccatcgcaagcaacgggggaagagttagctgcatgaaggtgtggccaccaattggaaagaagaagtttgagactctatcttacctccctgaccttagtgacgtcgaattggctaaggaagttgactaccttctccgcaacaagtggattccttgtgttgaattcgagttagagcacggatttgtgtaccgtgagcacggaaacactcccggatactacgatggacggtactggacaatgtggaagcttccattgttcggatgcaccgactccgctcaagtgttgaaggaagttgaagaatgcaagaaggagtacccgggcgccttcattaggatcatcggattcgacaacacccgtcaagtccaatgcatcagtttcattgcctacaagcccccaagcttcaccgaagcttaatttcttttctaaaacattcttatgaattatctttgctcatttcatttcctattggctggggtccttttctctcctatgagacaatttctatcggattgtgaaatgtctgatttatgaatatgtaatttan

SEQ ID NO: 903 - DNA, 864 bp, Zea mays
  misc_feature (797)..(797): n is a, c, g, or t
  Peptide Sequence Number=SeqID_13736
  Probeset Number=SeqID_15306
aaaaacaacaatgcaactctcactggttcaagtctcttcagtgtccaacttcagatcccaatcaaacccatcttgtttacttcttcaaaagtccatctttcccgggtccaagttaaccctccatcgaatttttcgttatccgaagaaaatctcaaatggctctactcgtgcttcactgcttgagacccctatcttatgggctggtcggatttgtgtcttctacgctctcgtgaaagctggctttgctggatccaagtctaaccctatcgtttctggtttggaaactggtggtgttgatgttgaatatgatgatggtgctgatcttggtttctcaaagtggcttcagaacattaagggcaacaaaccagataaggatgcagctgataagaggaagctagtgagcaaatggcacccaacgacaaagggaacacttagaaggaactacaggataccttccaaaggcgaaggaaaccgtttgcttaaagccattgcgtctcttctctcagatgatgatcattttagagatgcaacatctcacaaggggttgtcaaatccggcgggagagtgcgcacggacaaagcgtatgttgcaacaatgtgagagctctgtttgatgagttaccgacgccacatttggtggtggagatcacaccttttccagccggaccgcttacggagaatgattaccttaaggctgagaagctggagaggatttttaggtttggccccaacatttgaacactttggcatatagagaaagtgttttacaatgtgtcaaaatttagaatttggaaatanttttacgatgtctttactccccagacgttcaaatgtttagattataagaaagtgttccttttttgtt

SEQ ID NO: 904 - DNA, 544 bp, Zea mays
  misc_feature (416)..(416): n is a, c, g, or t
  misc_feature (429)..(429): n is a, c, g, or t
  misc_feature (431)..(432): n is a, c, g, or t
  misc_feature (471)..(471): n is a, c, g, or t
  misc_feature (476)..(477): n is a, c, g, or t
  misc_feature (483)..(483): n is a, c, g, or t
  Peptide Sequence Number=SeqID_13737
  Probeset Number=SeqID_15307
acaaacgctcgcttaaggatttgctcttctttctccacgttccgcgaactggaggcagaacatattttcattgttttttgaggaagttgtatgatagctctgataagagagagagagagagagagctcactagtccccccccccccccccctggtccacgctcagagcatcttagccatttgggctactcaagttatcctcatgggagctgttgaaggctacagagtcgccggagatggtccattgggagaagcagaggacttgctttacccaggtggcagcttcgacccattgggcctcgctactgaccccgaggctttcgcagagttgaaggtgaaggagctcaagaacggaaggttggctatgttctctatgtttggattcttcgttcaagccatggtcacaggaaagggacntttggagaacctngnngaccatttggccgacccagtcaacaacaacgcttgggcnttggnnaccaanttagtccccggaaagtgagcggctgcttattatgtgaatgagagagccagagagaactagt

SEQ ID NO: 905 - DNA, 781 bp, Zea mays
  Peptide Sequence Number=SeqID_13738
  Probeset Number=SeqID_15308
ggcttaaccattattttttataagccatacactacaatttttcccatacttattgagtgatgatatagaagatcactcttgctgtaatcacatcatgtcaagaacaagatcctatattgatctaccgtattgaaaaagccaaatgctgtaaactaacatcaaaatatatccagcggcgagtcgggcagctttagcttggtcccggmggttggacscaatcttccgtattcggctgaagatgctgtaggtacaggtacagtgcccatcgtctcgtrtcgtcgmggctgcgtttcaggcccagcagaacagatagtgtgactcaagaaggccagcccaaaaaacctactgccattcgtcgagggcagcacagaagcaccagaacgactggcaggtaaggcagatggcaatttggtttttcctggtcagatcgcaggacatcttgaacgcttcagtggacggtacgacgggaccatgtctgaaatcctggatcgagagatcatcgccatccgtatctaccgtgatgatgcagatgcgtgtcggtgccaaggcaccagcttcattcattgctccatgccaaatactgtcccctccctaggccttccccgccctagaacagtgactacaggacaggaaggctactctggcctggcgtcgacgcgtcgtcctcatggtccgcccctccagctcggcacataagataacagaatcgttgcatcgcatcatgttgcaaatgtgacagccaaagctgcctgtgaccgaaccagcagcaaccattttcgat

SEQ ID NO: 906 - DNA, 573 bp, Zea mays
  Probeset Number=SeqID_15309
gcagtgtactaaactgcttaaatatctacactgtgtagcataattaatatccatatatatcataaactggataaaacgagcctagttgcatggctgttggagcgatcctatatttataaagccattcattttttgcacgcatgcagtgaaaatgaaaatgtcatccaaaatttgcgcccatgcaatggaaactcacacgatctgccataattattggatctaccataaaaataggatctgccatacatgtgcctgcgcgtgtggacataatccaacggctgggtgggggttttatgctatctctatgaactatttacactgtttatgtgatctgtttacgtcatttgtgaaaaaaaatagaaccataattatggcgtgcataccacgcggggggggggggggttagaccagggggtttgactgacgcgcgtacgtgggaatgtttgacctggtgcatggtgggactcaccaaacaacatgtacctggttgtcggtggagtctcgaggtgattgggggctttttgtaactaatggagactttttttcgattaggatgttrtaggtaatggtctc

SEQ ID NO: 907 - DNA, 749 bp, Zea mays
  Peptide Sequence Number=SeqID_13739
  Probeset Number=SeqID_15310
aaatgacatttttgttcccatagcatacacccaaaagttggatgctgatatcgtgcaaaccataaattgttatagaaagttacataaatacctacaacgtacatcataattaatgaaaaattatagtataggatcaaccaacaaccgcatgcataaaacaaaagattggaggaggtcgtcggaggaggacaccaccgatgccaccagatcggaggagttagtcaccgaaggatgcctgaatcgccatgcggaccgccggccatcgcagcccgcaacttgcgcgatcgtcgacgctgccggagacacacatacctcgtgtggctactgccgccggagacgcacgccttgcgtgaccgctggatggggccacacgtgcctcgtaccgccaccacatgagcctttggtcgctcgtggctccctgagccacggccgacgctcgcgcctcaggggtcgtcgtcgcagctcgctcctcagggaaccaccgctgccgcacgaagggtatgccgtcgctcgctcggacctccgaggccgagccgtcaccactcatgcctcgggtaaccatcgttgccatgcaaggggggctctgtcgctcgtgcatctggatggaggcgtcaaaaaatgaaacctagcggcttgggattccttttatacatgtctggacgtgatgcggttgaactggatggtaccgttgggccagagctttctctagttatttttcgattaggatgttctaggtaatggtctcgtgc

SEQ ID NO: 908 - DNA, 1057 bp, Zea mays
  misc_feature (1)..(1): n is a, c, g, or t
  Probeset Number=SeqID_15311
nataatcaatctttcaaggatggtaatgtatcaagtgtttaatcattcaactcctatcacctaatgcagcatataagtgataaagttttgtaatacaaggaaggtggcaaatacaccggggcttgcctggaaaccaacagtaggttagtgtttgttagacgagacttgcttgtcgatcatcttttatccgagcacttgcttgatttatccatctttaggttggcccgactgacgacatcgacttgcggagatgtccactctttgcatcatcttggagaataacttggctctggtccttcgcatcacgattaattaacgtaccatatcacaaatcaaaacgatatttatacgcatgacgacgattcccggtttgagcataacaccgaacacccgacaaccatcgcacgacttgtttcacttcacacgtatgagatttctcctcacatctcgcacataatcacatacatatacacacaattagcatcaaataaatcaatgttgggtacaaatactggcgatgaatacataaggagaatagtgattccttaccgaggcgaacgacgatgtgactgagactgcatagatcgaggtgaagctcgctgcgacatttcgcgaacacatcaaggcgcgacacgaaggggttccatggttgttgctgctccatggcctagggcgaggccaagcaccagggaaatggcatcggcgaggttgaggatgacatcacagtccgacatccaacgttggcgaacgcagggacgtgctcgaccatgggaggcgcttggcggccatggaaacttgctggagcagggagcgcgataaacgacgccacgacgagagttgggggcgagcgctcccatggcggggagaatggggagtagaggataggggttagggcgagctcgccatggaagcaggggtgcggccatggcagggttgctgtagagaggaaaatggagggaggggcgtcgactggacatgtgggggctggtgaagcggccatggagtgagccgagaacatcattttttgattaggatgttctaggtaatggtctcgtgc

SEQ ID NO: 909 - DNA, 734 bp, Zea mays
  Peptide Sequence Number=SeqID_13740
  Probeset Number=SeqID_15312
ttttaaaatactatcgaggrrrrrtcaacaacactctcctttattccctcttctcatgcacaactcaatgcttgtgaaaactaccttattcacgctgatctcatgaacgatttgctcgtatagtcggatactccaaggctaccttatagaatattcttcaagacattgaggcaattgcttgcaactttgaagctctccgctagtaagtccatggctaatgaatgccataccttctctgcaggcaatgaattccattacctctagaccaattattcgtcgtayaactagacctaatgctcacatgaactgaccagccacatgcccacatccctggcaactcgccattgccaaagccttcaactcattcatggacaaccctggcacttgagattccagttaccagagtagttcttcagatcctcgaaacctcgcgcgatgatgcaccagcactggatttgacgattcccgagccctccggccgcgcagcggtgatgtcggtcaacgacgagtcgattcgagcgtccaactgcactgctcgtcgattagtgcttcgccgcaacctctccatggatcggtcaactcccgcgaggcacgattggggccgatttacaacatcgacgatgatccccgatggtggtctccaatcttccctgatccctacggcgaacggctgtgctggtcgatggatttgcaggggcttttcgattasgatgttctaggtaatggtctcgtgc

SEQ ID NO: 910 - DNA, 978 bp, Zea mays
  misc_feature (978)..(978): n is a, c, g, or t
  Probeset Number=SeqID_15313
gcacgagaccattacctagaacatcctaatcaaaaaggatgtcctagaagggaccaggggtcgcactggccttgcgggtcgccgactcgccgcctggctccagaaagagcgagcagacgcgcaattggatttgcggagctggaggagatgaccgccaaggagctgaagctacacgcgagggccaacggcggtcacggggctgaggaccagttccccgtcggcatgcgcgtgctctcagtttcatcttctttcttctgcaaataatagggtttgactctgtttatctgctctaaggaatttgtttgcctttttttatcatgcactggcacacggctatttttagaacaatcttatcttccaaagcttttccaatctttagatctgtgatttaagcaatcttgtgtgtcttgcaatttttggatgtccatttcctatcttcgtggtctggttttgttcaatggatggcagtgactccagcgaaggttaagagcctcgggagactcacaaaatgctccaggtttgggcagaaactgttcctttgttttgggtcgtgcactgtcagcaattgtatcaattagtacttcagaatcacacaagaatatgattcaatatgtcgaacagtgtgctaagttggacttgcatttctgccgcaaccatttacatgcagcatccgttaattcattaacgtgcaaggggcttcgcttttagacccaaaactgaagctcagtgcgtagagcatgtagttttgagttctctatttgtttaaatagtactagtggattaagatagttcgtttgcctatttgttatatccatttgtatgcagcctgcactaattcatctagttggaaggggttttgctcttggacctgatacatctgaagatcaacatgtatttgttgtagttcagtgtcccacaagagctatgtaattggtcactcgtttgttttaatggtgctagcgacctggattaagcttn

SEQ ID NO: 911 - DNA, 978 bp, Zea mays
  misc_feature (1)..(1): n is a, c, g, or t
  Peptide Sequence Number=SeqID_13741
  Probeset Number=SeqID_15314
naagcttaatccaggtcgctagcaccattaaaacaaacgagtgaccaattacatagctcttgtgggacactgaactacaacaaatacatgttgatcttcagatgtatcaggtccaagagcaaaaccccttccaactagatgaattagtgcaggctgcatacaaatggatataacaaataggcaaacgaactatcttaatccactagtactatttaaacaaatagagaactcaaaactacatgctctacgcactgagcttcagttttgggtctaaaagcgaagccccttgcacgttaatgaattaacggatgctgcatgtaaatggttgcggcagaaatgcaagtccaacttagcacactgttcgacatattgaatcatattcttgtgtgattctgaagtactaattgatacaattgctgacagtgcacgacccaaaacaaaggaacagtttctgcccaaacctggagcattttgtgagtctcccgaggctcttaaccttcgctggagtcactgccatccattgaacaaaaccagaccacgaagataggaaatggacatccaaaaattgcaagacacacaagattgcttaaatcacagatctaaagattggaaaagctttggaagataagattgttctaaaaatagccgtgtgccagtgcatgataaaaaaaggcaaacaaattccttagagcagataaacagagtcaaaccctattatttgcagaagaaagaagatgaaactgagagcacgcgcatgccgacggggaactggtcctcagccccgtgaccgccgttggccctcgcgtgtagcttcagctccttggcggtcatctcctccagctccgcaaatccaattgcgcgtctgctcgctctttctggagccaggcggcgagtcggcgacccgcaaggccagtgcgacccctggtcccttctaggacatcctttttgattaggatgttctaggtaatggtctcgtgc

SEQ ID NO: 912 - DNA, 351 bp, Zea mays
  Probeset Number=SeqID_15315
gcattttcttttcgctcctttcactaaaaacggtgacgccggctacacggcaacacctcgctcacccaccgaagcatcgccgggccaagaacaagaactagccgacaccacacctcacctcacctttccttgctctacaactacaacataagtttctgcagcctcccccgccccctcctcagctaccttttccactggaacttcctgtggtggaagtgaatattcctcagcgagggacggcgtcttggcttccgcggccatgggcgcagcagcagcctcgaagcttctacagtggcggctgcgagagcgagggagagatcagagagataggaagggagggggaggtgctgg

SEQ ID NO: 913 - DNA, 537 bp, Zea mays
  Peptide Sequence Number=SeqID_13742
  Probeset Number=SeqID_15316
aaatcaattctccagaccctccccggcaaccgcgtccggccgtccgcttccgtttccttggataaccacgacgcccgcccgccccccggcaagcgaaagcgaagcgagccaacccagccatggagaaggcgatcgatcggcagcgggtcctcctggcgcacctcctcccctccccctccgccgcctcctcgcagcctcagcttgcggcgtcggcgtgcgcggccggggacagcgccgcctaccagaggtcctcctccttcggggacgatgtcgtcgtcgtcgctgcctacaggacgccgatatgcaaggccaagcgaggaggcttcaaggacacctacccagaggacctcctcactgttgttctcaaggctgttctggacaacactagaatcaggagtgatgtggccacgagctttttcatatgtattcttagaatcaggagttggagagcagagcgatctatatatcacaactcgttcttcccagagcaacatgtatgcaaacatcttgggggggtcgatcttcyccaattattct

SEQ ID NO: 914 - DNA, 881 bp, Zea mays
  misc_feature (1)..(1): n is a, c, g, or t
  Peptide Sequence Number=SeqID_13743
  Probeset Number=SeqID_15317
nctcgagaaacagacagaatcattttcttctagagaactacagtgcttgttcttgatgaacaacacgcatttcatactccaagaagtcaagcggtcagatgtaaggttgatggtagggtccgggtggattggaaaacggcaggaccgtttcaagaaacacatgaagggctacctgtctgcgtcatggggaccagttatatccaatttagagactgcaaaaggcatgacacctagtaaaaggctcaagacaaatgtcttcaacttcctgcatagcagtcccactcctgtgcagaatttctcttggtcgttcgatgaaacttgccagactcagatgtcccggaaagtacccagtccagttcttcgcgaagagcttcgtggggagatactcgcgcttcttactggagcataccatgcatacttggagagggtgaagaaccctttgtttttgtccttgcatctgtccctgtaaatggtcaactgctgaagcttcagcgttgtgatctctgactctctgagccttgagtgttgtgatatccaagtatgctgggacttgagattccaggtaccaacttgctcttcagatgacacgtgacctcgctcttgagcgccctgtgtcgtcgatgttggtgctctgaatttcgatccggtgactccggccaccccagcaacccgagccgcggcccttttcaccgccagtagctcaccagagccgccacgcacgggcgtgcctttccttctcccagtaccgggagatcgtctccaatccggctatggcgaacgccgcccaagcgaagggagaggagcagcgttgtggatgccggaagggagccagaggccacgcgattttatagtgcggcggtagagtccgatgtgaggaaaaa

SEQ ID NO: 915 - DNA, 698 bp, Zea mays
  Peptide Sequence Number=SeqID_13744
  Probeset Number=SeqID_15318
ataaatttttaaatcatgatcaacgctttccaatattcaacaagacgcgcgtttgccaatacagttttgaagaggtccgtcagtgaccgaaaagctgttttgccattaaaggttactgacccagcgccaaaatggaaagcaatgggagtactcaacgaggagttcaaaacgtatgaactaagtgattattcaggaaagtttcttgttatggtgttttatcccttaaacttcacctttgtttgtccaaccgaacttattgcctttagtgagaagaaagatgaatttcttaaaagaaacacacatcttgtgggtgtttcttgcgacagtcatttctctcatttggcctggaacaatcaaccaagaaaagaagggggacttggaggtctaaattttcccctaatttcggatatcaaaaaacaaatttctcgagattataacgtactgttaccagaacaagggatttctcttagaggcctcttcattatcgacgacaagggtattctccgagtaactatggtcaacgaccttccaatcggaagaaacgttgaggaagttctcagacttgttgacgccattcagtttacggacaaacatggagaagtttgtcctgccaattggaacaaagggagctctacaatcaaacccaacgtatcaggaagcaaagaatacttcaaaaaccaataaacttaaggaggttt

SEQ ID NO: 916 - DNA, 580 bp, Zea mays
  Peptide Sequence Number=SeqID_13745
  Probeset Number=SeqID_15319
taatcgacmaatwkactagctggccgtttccctcccagctcccgctgaacctactgctcgaccaccagtcccccacgccacgctcccatcgccatcacccaggaccccgtgctgcctggtgcctggactccaagaacccgccctcgaggcccaagcaccgcttctccccctctcactgtcactggtcaccacacgccacactacagagtccagatcacggccaccgcgatggctgcttagtgcgtccgcggcagctggagcctggagaatgggctgctgcttcagcaagaacccgaggacccgcccggtggccggagcctctggtcgcgtgcagggggcgtggtggactggtggtggtggctcttgagcgatcgcaagagacgctgagatgtgtttgtttaagtagcaagcagcaggagcagcagccgagagaacgagttgcgataagctttagcgttttattttattttagtttagtagcagagacgccgatccggagccgagcagccgagccgagtggcctcgcgatggagacgcgccgaataaaatactagtaatacaactcgggcgatttgctggc

SEQ ID NO: 917 - DNA, 540 bp, Zea mays
  Probeset Number=SeqID_15320
aaagacgagaacgcgactggtgatcctcgcgcccatgaccaattcgacggtgaccactgccctggaccttcgctgtgatcgtggaaagggtgtgccaaagtccgagaccgcaaggattgccgtgtaatctgcgattgctcgccgtacctctgcgccaccgtgggatccgccctcgctgcggatgtgtcattccacgtcgtaatcgtcggaaaaaaaacgatatgcaagcaggcacgacatgaagataaatgccgaagctacaattgagggagcttcggcatggtggcatgcctaagacgaaggatgacaccgacttaaagaggaaaataccacatagttcctgataatttgtattatgattatcattagttatcaaggatacaaatgtaattttgttcgggctgcatcccgtgcctataaatagatgaacagtatcctcgtactgctcacgctgaattgtaattgctctgacgatattcctgctttcttaccttctatcaagccgaaggtacgaatgtaatataaatatcgttaatgttc

SEQ ID NO: 918 - DNA, 540 bp, Zea mays
  Peptide Sequence Number=SeqID_13746
  Probeset Number=SeqID_15321
gaacattaacgatatttatattacattcgtaccttcggcttgatagaaggtaagaaagcaggaatatcgtcagagcaattacaattcagcgtgagcagtacgaggatactgttcatctatttataggcacgggatgcagcccgaacaaaattacatttgtatccttgataactaatgataatcataatacaaattatcaggaactatgtggtattttcctctttaagtcggtgtcatccttcgtcttaggcatgccaccatgccgaagctccctcaattgtagcttcggcatttatcttcatgtcgtgcctgcttgcatatcgttttttttccgacgattacgacgtggaatgacacatccgcagcgagggcggatcccacggtggcgcagaggtacggcgagcaatcgcagattacacggcaatccttgcggtctcggactttggcacaccctttccacgatcacagcgaaggtccagggcagtggtcaccgtcgaattggtcatgggcgcgaggatcaccagtcgcgttctcgtcttt

SEQ ID NO: 919 - DNA, 715 bp, Zea mays
  Peptide Sequence Number=SeqID_13747
  Probeset Number=SeqID_15322
cggagacgymggccgactgaatcttttttgcastcggayaatacaatctttgttttattaggagaaaggaaattacacgaatgcatctataaaagaatcctgataatacggattataaaccacaaagttagtatgtcaacaagayagtcggtcgcccagayaagcgacctcgctcacctggttaggaaaagccagcaaaaacatttggaccattccaccaaaccaaacaaagccgaataaatcagtccaatatgttgtccaattgacaccacaaacatcagcatggtcgcctccaccccaatatccaaccaattggaccattccaccaaaccaaacaaagccgaataaatcagtccaatatgttgtccaattgacaccacaaacatcagcatggtcgcctccaccccaatatccaaccatgacatacccacctcaattctcataccctcatacatacacacccacaccgtatgttccaaataaaatatggggcatactatcatacccttacaggatgccacgacaccccacctggggggcacaacaagcatatgtgtttgacaggttaatcccaccagtacaagaccagttgagtctccctcaatctggtcagcatgaacaactccaacaagatagctggaatacttaccaaaaaggtcgatcaattcggcatgggggcataaggagaaaactccaacatcaacaacaacaatct

SEQ ID NO: 920 - DNA, 599 bp, Zea mays
  Peptide Sequence Number=SeqID_13748
  Probeset Number=SeqID_15323
acctgattcacaacacataaatatcaacacaagacatgattttcgcccgtcctcgacttcctccagcgttgcgcatttacctagagatcttatcatctttgttaaaatatccacaaacgcaacatgcctatcatcacggattacaagctccccaattcggcggacgccttggacctgcccgccgactcaaactcgccatttttcatcgccttcctcgcctctcgcgaccccagtacagggaggccttggtgcccagatgttatagcggcattgccgtacctcgaagctactttctctgctgagggcagtcctcgtgccgctttcattgaagtcggacaacgacctgaatggagagatccccgtaatgtttaccgggctaagtggaatgtaaacaatactcctactttggctcgctacgaacgagttgacggcaaggtgaaggaggttggtcgtttagtggaagccgagattcttgattcaaaacgactcaaaaattttattactagctcatctgcctcattatgagaagtggaacattgattgagtactgtccggctgtcttggggctatgtttgagacgtcaatatatcaagtcagtt

SEQ ID NO: 921 - DNA, 789 bp, Zea mays
  misc_feature (1)..(1): n is a, c, g, or t
  Peptide Sequence Number=SeqID_13749
  Probeset Number=SeqID_15324
ngtaaaaatacagatatacagctggtgctcgtacagtactccgcaagtccgcatacatacacagccacttcatttttaaagcattttacctgtgagctcggattttttaaagtgcagaacatgttcccatcgcctcaaatccagcgccgcaccaaatccgggacaagaatttaccacctctccatccatctcgttgcctgcctgcctgcctcgggctgcgactccactggacgaccctacttcaccctggtcttccaccccaccccacgcacacgaagacagagagagccctccgggcgtcgattccgccatactgccaccattactgacgccccctcaccgcctccgggcccaacgagcaagccagggaaggggagccgaggcctcgcctacgcctaggcacgcccctccccctgcgcgacatgtcaggggaccgctcgcccacggtagaacgccggtgcagagaaggggaatgtggtggcggcgtcggcggcgacgacgaatcgagcacaggggcgttcgtcgtagatgttgtagaggaagccaagcaggggcggcgcgccgtggaatctgcggtagcggcggaggaagatgcggctagagaggagcttccgccaagccttgcagacaagggaggcgcgcacgaggcacgctgggtcatccggtgggaggcgaaggagaatctcggcggtggcgtcatcgattagatccggcggaggagacgccatgccgtgcacggcggtggatttggttttggtgcggatttagccgactggggaacggtaacgg

SEQ ID NO: 922 - DNA, 598 bp, Zea mays
  Peptide Sequence Number=SeqID_13750
  Probeset Number=SeqID_15325
aattatacttactcagaacactkgccaatcaagaaacgagagagcatagatcatatcagaacgaagaacaaaaaccaacaagtcaatatggccgacggctctgctttgtgcattattatcattactttattcataccacctctcggcgtcttcctgatctcaggctgtagcgttgacttgctaatcaacatccttctcaccattctcggatacttcccaggccacatacatgcctattacctagaatatgtgtattaccatcgtcgcggtcttgctgctggcggaacgacgtttgcgaagcccgctacgggagtttattccgagcggattcagtcgggaggtcatcatcagcagacgcaatatgggactatacggacttgatcgagcgtggcttattggaaagtggctagtcattagagatttgcagcttgagtctttgcatgtctagttaggggtgggagtttgggtaggttggcagtggtggatgatacctatttgttatggcgtcggtttgggaggttttgtcgaaagctagttactgggttacttgatattggtgcccattaagtatagctttaataccatggttttacgattt

SEQ ID NO: 923 - DNA, 845 bp, Zea mays
  Peptide Sequence Number=SeqID_13751
  Probeset Number=SeqID_15326
acgtaatgtccctgagctttgagcagctactttatgactgcgaggcattgaacaagtctggatgaaaatacacaaagatttcgcgtctcattcatctcgcgtttcggaggcttgcgctcaatgtagtaccaagttggaaatgtgtgccgcggctcgatctatgcaatcgaggcagtcccgacctccaccatcagtcttggacacacggcttcgtcatttcttcgtccaagctagccaatgttcaaagcttacaaatctcaaactatacttgatgacgaggcccccagagagcatcaactgttgtcgggtattttggtgggagaattctggtatcgagcaggtcctacagctggagcaccagactcctctacacccctgcctcgacggcggcagaccatattctgggaagagaaaccaattgcatttgtgcaatatcctcgccaagggggtaaggcatttgaagaatctctttattgcctcggacttattgtgcarcarcatcataacgtctaggaaggmtggagaatcttttctagtcgaggatcgcaccatcgccattgtccctccacgaggatcagatttcgaccctgcatgtctcctttccgagaagtgctgttctgggaaccatggacctggagttgttgttctgaggtcgagctgcgcgacaagctgatcgccttccgtgctcgaacgcccaaagctcgacgccttcgcgtggtagggcatggcaaccgtcscagattatggacggctggctacagtgccgcggggggagtcacgcattgaactggacagggctattgagttggggttctcataatttctcgtaggaagaacatcatctc

SEQ ID NO: 924 - DNA, 672 bp, Zea mays
  misc_feature (672)..(672): n is a, c, g, or t
  Probeset Number=SeqID_15327
tgaaacaagcaatgaaggtatgtagggagagggtttcagtttgactgttcatgaaataaacgaatttatgtataagggcatcaaccatacttagggcttgttcagttaatccccaaactgagaggatcggatcccctgcaacaagtcaaaactcccctccagcccccttgacttggagttcaactgaacaaggccttattggggaaacaaaaaccatttgagatttagtagttaatcagcattatgcttattgtatctttcttccttctatggtagcaaacggccaacaagttttgtcccactgctttctcaagttgcctactaatgtttcatgagatatgacttgatgccgatttacaatatgttttgcactgttaccaggaaagggatgtcaagttcttcacagagacagaggagaacaaccagatgcgaggcccaaggaccgcagtcccatatttcctatgacttcaattgtacaattttagaagtctattcgaatctgtaagggctaaagatcaatcagatgtgtttattgctttaggtccagattatagtgcaatctgatgcgtttgatttctgttttcctttaaccacatgtacaatagaccatcgggacagtcatatgttcctgtatytyttcggtgacactgccaaagttttgtttgtgatttn

SEQ ID NO: 925 - DNA, 1584 bp, Zea mays
  misc_feature (1584)..(1584): n is a, c, g, or t
  Peptide Sequence Number=SeqID_13752
  Probeset Number=SeqID_15328
cctaatcgaaaaaaaatgaagattctttttgactaaaaaaaaccaagagtcttcttgttcgatctctgatacaactatagagtttcgatgtattcaatccacgttaagactcgctctgggaatcttcgatctggcgttctgtcttctctttcagatcaggcgatgttcttcaaccatggcggtgagatttctcagattctgagaagccagaaacgtcgggagctgatgggcgtgtatatgctcttactggattcaaagcgaccctcatgctggccactgtgaatgttaataggctagcaacttacatgccttatctcaaggcgggtaatcagaacttccggatttcctactcctccctgttgattagattcagtgatgctaactctttggatgaaataaccgaaccggcttcacccacacctgaagaatgtttcaggttacgtaatcacacgagatgcttggtcctgccaactcacactcaactcccaattattcttcctataatctgttcatctatatagcaagataaaatatttaatattgattatcacacacatattgtttgtgagctaactgcggttaaaagtactgtgagtgacccaccccaagacaagagccggatgatggcaaccattaaaatggataagtattttactatttcagattaaacccttcaactttgcatatctgatttcttacttttttttttgtaatagtatatattaagcactttgatacatgttttccagtatcagtgatgtttccgtgacattgagtttattcgactcacaatctattaagtttcacaccaagcttgaggccgtacgtggcgatccacgagcggttgttgcaaccagcattcatccaaaaattgtcgtttgtttctcaatgccacatcatggacacacatctatttcaacaaggagactaatgttggggaacgatatttttacaagctgttctatagcgacactgggcatgcatcagcagctccactgctgaggggctatgccaaggtcgagcctctgactatagctgagctcaatgaattcggtgacaagaatgaagaagagctcagacaaagggttgtgctacgtttcttgctccaactgtaccaggaagcttcaatgcactgtctcagcctttacatgtgttcactgcaacaatactaatgctgttggtttcctttgctacggtgtggaaatggtcattgctgatgatactgctgtagagtctatttgtgtgttttgacggggtaatgatgacgaaactgcataacatgagagtctatgaagatgatatgtctggtgccaactcagtacctgctaaggcagcaccaaatacaggagcaggtccaagtggtgtcaacacaactaagtctccagcaaggatgttctaagatggtcaagaaagcactcaagtcatagataaaaataatgatagatttggcatgagtatttcttctttgaataatgcttaggttttttttcctttgtttttgaacaagttcatttatgtttccctcctcttttgggtaatctatgtttggttcagactatctttataaaatatgtctcagtttcn

SEQ ID NO: 926 - DNA, 644 bp, Zea mays
  Probeset Number=SeqID_15329
aatcgaaaagaagtactactagtactctagttagatccctaacagaaggcctgccctggaagggaaaaggaaaaggcaagcagggaagaagatgccagccagccagccaaagtagtactagtacttgcaccagtaccactccactgaagtagaagtactagtatagtcaggctcaggcagtggtagggcagctccctccccttctatattctcccaatcaacgcccacagagaaaaaggaggcaggaaaagcagccgcgaggtagagaaaggaagaaaacatcaactccactcagagcagtgctctcccccctctaacggtgagcgagaggatcgatggcatggtgggcagggagcatgggcggcctggatctccgcaaccacctggcgcagttcggcggcccagctgccggcggcgctgccatgggcggcgccgagcaggccccgaccacaccaaacagcagcgggagcaacaaccacgacgactcctccggcgcagcgcaggactcccccaccgccggcgcgggggacaactcccctaaccccaacgccgccatctcaggctcaggcccgtcgggaggaggcagcggcggcggggggtcgtcgtcggggcggcggccgcgagggaggcccgcggggtccaag

SEQ ID NO: 927 - DNA, 898 bp, Zea mays
  Peptide Sequence Number=SeqID_13753
  Probeset Number=SeqID_15330
ctctaagacacaagctatagctagtagctgtagctgccatggccaaggatctcgccttcgtcctcctcgtccttgccgcgctagccgccttctcgtcggcgaccaagctgacaatccacaacctctgcccgcaccccgtctggccgctcgtcacccccaacgccggcctcccctccatctctgacaatgccgcgcgcctcgacaccaacgcgattctctccctcaccttcccgtccaccttctgggcaggtcgcgtcgcggcccgcaccggctgcgacgacggcacgtcgccaccgcgcgggtgcttcacgggcgacgcgccgccgtccaccgtcgcgcagatcacggtccacgacagcgggaacctggacctcgccgcgtacagcgtcagcctcgtaaacgggttcaacgtgccgatggtgttgagtccgcaggcaggcggtgggcagtgtccggcgctcggctgcgccgtggacctcaactgcgactgccctccggacaaccgggccgccgaaggcaccgcgtgccgcgggcccgcggggtacttcaagaaccgttgcccgctcacgaggacgacgtcgaccgacgtggagcccgtgccgcagagctgctgcgcgcccggggagctcaagatcgtcctctgccagtcgtccatgctccagcgcggcgcctcggcggcggaggacaccgacatggtcatccgcactgtcgtcgccgacaactagagcacagagcttccgtgtcgcatgtccttctcgctttgccgtacttctacgccaggcacgatccgtcgtactacgtttcagttaacagtccgtgagcgttaattaaggggccagttttcatacaaatgtcgcagtttgaatgtttgtatttttctatgaaccctggaccttgg

SEQ ID NO: 928 - DNA, 1414 bp, Zea mays
  misc_feature (1414)..(1414): n is a, c, g, or t
  Peptide Sequence Number=SeqID_13754
  Probeset Number=SeqID_15331
gaatgcaagaagaagcttaaatctctcttctctgctcctgaagtctgttcatggcgatgtcgggaactttccatttgacttctgactatgtccctggttacacactttcagacagccgttgcttctttaactctgctgtttcaagaagaacacttgccatattaccttgctcttcctgtctcgatcacaagaatgggcgtctgaaatctgtccccaatagaagttcttttgtgtgccgagcaagttctggcggctataggagaaatcctgatttctcaagacttaataagcatggttaccggggaaacaacaggcaaagcggagggagagaagattttgatatcgaaaactctgatatgttgtcttcaagaaatgggcctttattcaacctgtctagttcccccaaattccaagctacctcatcccctggacctagagagaaagagatcgtggagcttttcagaaaggttcaagctcagctccgagctcgtgctgcagcaaagaaagaagaaaaaaagattgaagaagcttctaaagggcagggaaaagaaagtgaaactgttgactctcttcttaagttactaaggaagcactcgggagagcaaagcaagaggcaagttagcaaatttagcagccagggagaagtacaaggagatactgttgacaaacaagatcgcaccggaaatcttgtcacttcagggaacaaagataataatgcatcatcctttaccagaccaacatcaagcttcagaagaaagtcgccagtaccaagatctcaatcaccgccagcttattctagcgaggcaacttttgatcaatcatcaagttacagtgtaacctgggcccagaagaaggatacagtagagttgcatgatgagcctgaacatgagcctgcgtatgagcatgagcatgagcctgaaaatgagtcagaacctgggcctgtgacaactatgcttgaaccagattcagagctgaaaccaaagtcatcatcattttatcaagaggaggaggaggagagagagagagagagagagctccctagtccccccccccccccccggtgtgtgtcacctatctttcctctcgcgtctctcccctttactcagaaatggcgaaatcgaagaatcacacggcgcacaatcagtctgccaaggcgcataagaacggaatcaagaagccaaggagacaccgtcacacaccaaccagaggaatggatcctaaattcctaagaaaccagaggtatgcaaggaagcacaacgtcaagagtggcgagaatgctggtgtcgaagagtagatcttttgatcgtctgattgacagtttaagttttttttatgaatttcacttgtttagacaaaggaaccaatgttctacaatcagggattatgtctatccagattctcttatatattttgn

SEQ ID NO: 929 - DNA, 1376 bp, Zea mays
  misc_feature (1376)..(1376): n is a, c, g, or t
  Peptide Sequence Number=SeqID_13755
  Probeset Number=SeqID_15332
tcaagttaagatctatgttccaattaacattaatgatcttgacatgaacataaatagaataacaaaagaattggaacatagatataataaatgattatcccaaaaccatttaaagcaatagcaaactacccaagtgattcagggttaaaaaaggtaatgagataaacaatctagggtgacctattgggtcccatcaaaattaacctatacatgaataaatgatattaaagaatattattgggtataaaagtggtcaagggcacaacttgccttcaatgagctcctgctcagctacttctatctgctgctcaccaggatcctcagtcattggctcttctactcgccacaatacaaacaagcatagtatatagagaaaattaacatcacaccaaacatataaacaaaatacacagtaataatctacacattaaaataaaatcctaggaacaggaatcataatttttggagttatagattttaagatatgaatttccaaaggttttatgtgcttaaaataggattaagtgagagattatttttcttactgtttttatgacaaaacagaggctctaagtgatagagaataaagttacaaaaatttagaaagtggaatggctcaatttggaccaagtatggattttctattaatttatcaagttctagtaattgttttcatattaaaaatctattttcaattcatttattcaaatttaagtcagctctggactgggcctcaatttcagagaaacccaggggctattccacaactaatcccgagactcagagcgttgttgctctggacgacgggtttatttcgggtaaacgcgaggtctcttacgcaaagttacaaggccgaaggggtatcgcgagatcctagctgttggattagatacgggcgcgccagattaaatcattattcatgcgaaccggtacggaatcgcgtccgttggatccgaatcaaacggtgagggttttattactctagatctatctatgtccgtccgatccagatcgacgaaccagatcaaaacgtggtgaaagggtacgcgggacctaatctcaaccctccatcctcgcatcaacggtgagggagcgttcttctaccttgctgccaactccggcgatcgtgcctagcgatacggtggcccgccatggctgagatgcctacaacactaatcggtacacggttcctatgtatctcgggtgcgaaattgaattaagtggatggcgaactcgaagagcgatttcttaccccaggtctggcagtgcctagctcgggttacggcgcgcggtgaagtcacgacgtcggtgaaggattacggtcgccgatatcgtccgtcctccccgcaaaccccacaatatggcacagatgcttn

SEQ ID NO: 930 - DNA, 1114 bp, Zea mays
  Probeset Number=SeqID_15333
atttcatggcttgaaactcaaatttccaaagtccaaaaaggtaggcgaaaacgattgatcattcctctgtagctctcagtaaggaaaaattgggatttatatagtttcgtcttcccaccttggatcgaattttgttttcaaattcaaaatctcacctccgtttttttcagagactttgctgagaaaagtaaaaaaaaaagaaatggagcaagagataagcttggatccacaactatggcatgcttctgcaggatcaatgcttcatatccccacagtgaattcaaaggttttctacttcgctcaaggccatttcgagcatgcccacgcgcctcccgatttccacgcgccgcgcgtaccaccactcatcttatgccgcgtcgttgcggtcaagttcctcgccgacgcagaaacggatgagctctacgccaaaattaggcttctgccactgccggaaaacgacctggatctcgaaaacgataccattctggatcttactcctccaaaatcgacgtttttcgccaaaacactgacgagcaccgacgtcagtaaaggcggtggatttttcgtgctgcgtaattgggccgagatgaacttcccaccgctagacttcacggctgagtatccggtccagaccctaactgctaaagacatccgcggagagacatggaatttccgacacatctacagggggacgcctcgccgtcacctgctgaccaccggctggaacacttttgtcgaccagaagaagctcatcgccggcgattcaatcgtattcctccgctctgaatccggcaacctctgcgtcggagtccgccgcgccaaagtcggtggcgacgacacggctagaagggtaacggtagaggcagtgacggaagcagtggagcgtgcagcgagtgggctagcgttcgaggtggtttattaccctctcgctaacacgccggagttctgtgtgaacgcggctgatgtgagagcagcaatgcggatagaatggtgcagaggcatgaggtttaaaatggcatttgaagcagaggattcttctagaatgtccacaggcactgtgtctgctgttcaagccgtcgatccaatccgctggcccaactccccatggcgtctc

SEQ ID NO: 931 - DNA, 526 bp, Zea mays
  misc_feature (225)..(225): n is a, c, g, or t
  misc_feature (230)..(232): n is a, c, g, or t
  Peptide Sequence Number=SeqID_13756
  Probeset Number=SeqID_15334
atggcttcctgtctgttttgccgccgccgctttaccactccagactccactcttcttgctctcccctccccccagcccgtcgataaagccgaggcatcgggactgcggcaggtagaaggagcacccattgattccgcatctcgtgccaggctctccccaccgcactcccacgcctgataccctaccattccgccgccgaatcgacttctcctcctctgaacccgngttgnnnggcggacggagatccagccggacctggatcggtctactccgacaccgtatctccgggtaattaaaaaggtccgctggctaacttcttcatctttttgggaagataagcaagcctgcctctcagctgattgttcggaagaagtgggagggatttcacgcttcatatccctatatatcttcctcgaggccgaggaacgcactgtgagaaaaagggagtggacaggggctcggtcactcatgagctatggacagacacggctatgcggtgttggatatcgagggtatgcctcagccg

SEQ ID NO: 932 - DNA, 817 bp, Zea mays
  Probeset Number=SeqID_15335
acgactccagcactgttgagactgggtgaggaagaaagttagatcccgccattaccgtgagaggggtgagcgcaaccgaagtcgctccttggctctaccgatgtttggtggctttgggtgatcgccggagggcctggatcgtgttcgagagtggctgggcgcgggagctctctaggctggagcaattgctcgacggagcaattccgccgccgcagacccgcctctaaccgtggttgagcttctgcgcgcacagttcacgtacaaggggtcaagcagtctcattagctgcgagaagcagacgatccgaatcgagtttttaaaccttgcaagtgaccgcacttgtacccaccatagctagcatgagagacccagtctcaggacaagtgaggaggaaagtccgcgcccggcttcactcagcacacctgttgattgcgttcgcacccgggtccctaaaacccaggtgtgacatgataagaccctgaagctgttctaatggaatgcagcgtcagatcccatagacctttggattaaggtttgaataagcacaagaagggagaaatatcccttttatcccctaattgcatggaaaacagggccaatcacttggtaacggtgccaaagaatctccgaagcccttggttgtaggttttattttgatgaagtaaagatgaaggtatgtgaaacctttgtttttgagtaggtaaaacatatatcttatttttactagcatgtgtgctgaaatcgagggctaaaagggtgtgttcattgtattaaaatgttttaacctttggtttatggccaagaatataacagtttt

SEQ ID NO: 933 - DNA, 547 bp, Zea mays
  Peptide Sequence Number=SeqID_13757
  Probeset Number=SeqID_15336
ataccgatttgcagacccatggtgctgacgaagaatgcactccgcattctctacaaatagcttggcaccttgacacctagcttcacctccctcctcctggcccagtcgtcctagccatcaaaattcagttgagggttcttcagttcagccatgaagcttgagatgacagcagcggccatggtcttgatcctgctgacctcgggcgccgaggccaaggtctgctactcgcggagcaggaccttcaaggggtggtgctaccacagcatcaactgcatcgccatctgcatcaccgagggcgacaccagcgggttctgccaggccggggcctgcatgtgcacttatgagtgtctcaatggtgtcgtcgccggtggcggcggtggcggcggacagcatccatcggttggctcatcgcgtggtggtggtgctgaggctaaagcagccgtcccatcagtgtagagcttctgattctggcggggtgatggcagatggtgcactactactcttccgtgcacatgctaactcaaggtttcgagttgatgaataacac

SEQ ID NO: 934 - DNA, 492 bp, Zea mays
  misc_feature (206)..(206): n is a, c, g, or t
  misc_feature (208)..(208): n is a, c, g, or t
  misc_feature (212)..(213): n is a, c, g, or t
  misc_feature (216)..(218): n is a, c, g, or t
  misc_feature (229)..(229): n is a, c, g, or t
  misc_feature (237)..(237): n is a, c, g, or t
  misc_feature (239)..(239): n is a, c, g, or t
  misc_feature (243)..(243): n is a, c, g, or t
  misc_feature (256)..(256): n is a, c, g, or t
  misc_feature (261)..(261): n is a, c, g, or t
  misc_feature (269)..(269): n is a, c, g, or t
  misc_feature (297)..(297): n is a, c, g, or t
  misc_feature (308)..(308): n is a, c, g, or t
  misc_feature (312)..(312): n is a, c, g, or t
  misc_feature (322)..(322): n is a, c, g, or t
  misc_feature (325)..(325): n is a, c, g, or t
  misc_feature (339)..(339): n is a, c, g, or t
  misc_feature (378)..(378): n is a, c, g, or t
  misc_feature (380)..(380): n is a, c, g, or t
  misc_feature (391)..(391): n is a, c, g, or t
  misc_feature (396)..(396): n is a, c, g, or t
  misc_feature (410)..(410): n is a, c, g, or t
  misc_feature (420)..(420): n is a, c, g, or t
  misc_feature (423)..(423): n is a, c, g, or t
  Peptide Sequence Number=SeqID_13758
  Probeset Number=SeqID_15337
atacattttttccatcggaatgtctgatactatgttgggtgaatcctaatggatggttgagcattattggtgtcatattttgtccggtctatgtgtcaaccgtgaagcttttaatccaaatcctttcactctttctgcctctgtcaagtctggggcaggcaaagaagaagaccaaagaagattcgcacatctgcacatattattgngnccanntannnacatagaacgnacaatagngnaccnccaatggcagccnaaatnttttgccnccttatgctccttggcctttctgcaagngctgctacggngacnattttcccanaangctcacgagctccnatagcttcccttcttcccccgtacctcttcaccagcggngncttcggaatgngaaancccaattcttcaancctatagganccnacaggaaatcgcagctggtgatcttacctttatcacccttgttcctcccacaatcatcagccctattac

SEQ ID NO: 935 - DNA, 492 bp, Zea mays
  misc_feature (70)..(70): n is a, c, g, or t
  misc_feature (73)..(73): n is a, c, g, or t
  misc_feature (83)..(83): n is a, c, g, or t
  misc_feature (97)..(97): n is a, c, g, or t
  misc_feature (102)..(102): n is a, c, g, or t
  misc_feature (113)..(113): n is a, c, g, or t
  misc_feature (115)..(115): n is a, c, g, or t
  misc_feature (154)..(154): n is a, c, g, or t
  misc_feature (168)..(168): n is a, c, g, or t
  misc_feature (171)..(171): n is a, c, g, or t
  misc_feature (181)..(181): n is a, c, g, or t
  misc_feature (185)..(185): n is a, c, g, or t
  misc_feature (196)..(196): n is a, c, g, or t
  misc_feature (224)..(224): n is a, c, g, or t
  misc_feature (232)..(232): n is a, c, g, or t
  misc_feature (237)..(237): n is a, c, g, or t
  misc_feature (250)..(250): n is a, c, g, or t
  misc_feature (254)..(254): n is a, c, g, or t
  misc_feature (256)..(256): n is a, c, g, or t
  misc_feature (264)..(264): n is a, c, g, or t
  misc_feature (275)..(277): n is a, c, g, or t
  misc_feature (280)..(281): n is a, c, g, or t
  misc_feature (285)..(285): n is a, c, g, or t
  misc_feature (287)..(287): n is a, c, g, or t
  Peptide Sequence Number=SeqID_13759
  Probeset Number=SeqID_15338
gtaatagggctgatgattgtgggaggaacaagggtgataaaggtaagatcaccagctgcgatttcctgtnggntcctataggnttgaagaattgggntttcncattccgaagncnccgctggtgaagaggtacgggggaagaagggaagctatnggagctcgtgagcnttntgggaaaatngtcnccgtagcagcncttgcagaaaggccaaggagcataaggnggcaaaanatttnggctgccattggnggtncnctattgtncgttctatgtnnntanntggncncaataatatgtgcagatgtgcgaatcttctttggtcttcttctttgcctgccccagacttgacagaggcagaaagagtgaaaggatttggattaaaagcttcacggttgacacatagaccggacaaaatatgacaccaataatgctcaaccatccattaggattcacccaacatagtatcagacattccgatggaaaaaatgtat

SEQ ID NO: 936 - DNA, 327 bp, Zea mays
  Peptide Sequence Number=SeqID_13760
  Probeset Number=SeqID_15339
ttcttgtttgttgattaacccttaattaatccgggcgcgcctgatttatcacaagtttgtacaaaaaagcaggctcctgcaggaccatgaagacgttcgacccgtggccggtcttcttccgccgggagtggaggcgcaactggcccttcctcacggggttcgccatcaccggattcctcatcaccaagatgacggccaacttcaccgaggaggacctcaagaactccaagttcgtccaggagcacaagaggcactgactcgagacccagctttcttgtacaaagtggtgataaattggagctctgcagagctttcgttcgtatcatc

SEQ ID NO: 937 - DNA, 327 bp, Zea mays
  Peptide Sequence Number=SeqID_13761
  Probeset Number=SeqID_15340
gatgatacgaacgaaagctctgcagagctccaatttatcaccactttgtacaagaaagctgggtctcgagtcagtgcctcttgtgctcctggacgaacttggagttcttgaggtcctcctcggtgaagttggccgtcatcttggtgatgaggaatccggtgatggcgaaccccgtgaggaagggccagttgcgcctccactcccggcggaagaagaccggccacgggtcgaacgtcttcatggtcctgcaggagcctgcttttttgtacaaacttgtgataaatcaggcgcgcccggattaattaagggttaatcaacaaacaagaa

SEQ ID NO: 938 - DNA, 1643 bp, Zea mays
  misc_feature (1642)..(1643): n is a, c, g, or t
  Peptide Sequence Number=SeqID_13762
  Probeset Number=SeqID_15341
ctcgaggccggccgggctttttttctccgggcacaccatactgttcttgctacttctagatagaggaacaagagagagaaggccaccgacatcgcctcttaacccgacaagccccattgcccaggagaaccccgtgccggggagcgagccgcgcgcattccccgtcccgtgccaccggaccaggggaaggaggacacacatgtcgtcgtctctctctccagcggcggcagccgcgcccctggatctggacggcaactccgtcgcgcccctcaccatctgcatgattggtgccggcggcttcatcggctcccacctctgcgagaagctcatggccgagacgcgccatgtcgtcctcgccgtcgacgtatactgcgataagatccgccacctcgtcgaccccgcgccgccgcacctcgcggggcgcatctccttccaccgcctcaacatcaagaatgactccaggctcgagggcctcatcaagatggccgatctgaccatcaacctggcggctatctgcacgccggcggactacaacacgcgccccctcgacaccatctacagcaacttcatcgatgcactcccagtggtcaagtactgctccgagaacagcaagcgtctcatccacttctccacgtgcgaggtctatggcaagaccatcggcagcttcctccccaaagaccacccgctccgcaaggaacctgaattttatgttctgaaagaagatgagtcaccctgtatttttggtccaatcgtgaaacaacgatggtcctatgcttgcgcgaagcaacttattgagagacttatatttgctgagggtgcagaaaatggccttgaattcacaatcgtgagaccttttaattggattgggccaaggatggatttcattcctggtgtcgatggtcctagtgagggtgtaccccgggtgctggcttgcttcagtaacaatctgctccgccgagagcctttgaagcttgtcgatgggggccagtctcagagaacctttgtatacatcaaggatgccatcgaagctgttgtgctgatgattgaaaatcctgctcgagccaatggtcacatcttcaatgttgggaatcctgacaatgaggttacggttagggagttggcccaaatgatgacagaggtctatgcaaacgtctcaggagaggcgccgctggatgagcctatgatcgacgtgagttcgagtcagttctacggtgaaggatacgatgacagtgataagagaattcctgacatgactataatcaacaagcagctaggttggaacccaaagacacctctcaaggatctgctggagacaacattgacgtaccagcacaagacatacaaagaagctgtgaagaggcaaatgtcgcaggcttcagcaacaagttaagttggcgctggctggggacggctcctcgtttagagccctagtcgcagcagctgtttcgcaagtcagaatacatatacgccggtaatcgttctgtttgaggccctagacgcgcccatgttttgtctgctaccaagggatgttatcctattgtgatataactactacctgtgtttggttgctcctagttttttttcttgcaattatatgtatttatattgaaaaactatatattatttaaaatacaattaaaann

SEQ ID NO: 939 - DNA, 1110 bp, Zea mays
  Peptide Sequence Number=SeqID_13763
  Probeset Number=SeqID_15342
gggaccctcgaggccggccgggccggggcttcgtacgcaggatcggagaccacgagttctgtcgcatgctcgccgacatcctccgcgacaacggtctccactacggaggcgacaacttcgactccagggcgcgcaccgagatcgcctatcccaccctgcacgccaacgaggcagcgcagagttcatgttctaccgcaaccccatagctgacgtgctcctcaccgccgacgagctcaccgccgagctcatcaagaaggctgcgcgcttccactactgatcaacaagcttgattgctgagacttgccggacagcacatctccgggccatgaagatcgccaaagaggcaggtgcactgatctcttatgacccgaacctgagggaggcactatggacatcccgagaggaggtccgcacccagatcttgagcatctgggaccaagcagacattgtcgaggaccgtgaagtctagctcgaggtcttgacaagcatcgactcggaggaggacgatgttgtgatgcaactgaggcggactaccatgagactgctcctaatgactcttggagatcaagggtgcgagtactatgccagggatttccatggcggtgcggcttccatcaaagtacaacaagctgatacccctggcgcaggtgacgcgttcgttggtgctctgctccaaaggatcgttaacgatccatcctcgcttcaagatgagaagaacgcttgtggagtcccctaaattccctaacgcgtccggaacggtcacctcctcaaagaagggggcgatcccgtcgctgcccaccaaaagggaggtcttgcagctaataaaggaggcttggatcatcatcgtcctgtccgccatggttttcaccagcctttacttcttcggattggttcggattctcacacccccccgaacaattcatcggtctgccgcttcttactaaaccattttgagtgccctagtctccccttgtcaaacgcgcgctatctttcataatctctactggggaccagccgagcctttttttacttatgccagggggggttccaggcgatatgtgagttgtccatccatgcctgcacctgtctttttttttattgcagcggaac

SEQ ID NO: 940 - DNA, 1390 bp, Zea mays
  misc_feature (1)..(14): n is a, c, g, or t
  misc_feature (1304)..(1390): n is a, c, g, or t
  Peptide Sequence Number=SeqID_13764
  Probeset Number=SeqID_15343
nnnnnnnnnnnnnnggcttgccctgcctctctccgccccgcgtcgcctcatcgccaacaaccgacgagatccggcgcgggaaaacgagccctagatccggcggcaccctcatgcgaccttgttgagtccgggccttcctcctcccgccgctggtgtcgccatggcggggagcgacctcgagccgctgcgcgcgagcgcggcggcgctgccgtcctcgtcggacccggactcgcccgcagtgaccccgcgccggagccgcgtgcgggacctgctgcgcaacctggaccgccggctctccaaccggagccgcggcggcgcggccgcggggcacggcgacggtgaggccggggcgtcaccgaggaggcccgaggaggacagcgacgagctcggcgacggcgcgccgcccgagtgggcgctgctgctcgtaggatgccttcttgggctcgccaccggcatctgcgtcgctgtgttcaatcgcggggtacatgtcatacatgaatgggcatgggcaggcactcccactgagggtgctgcttggcttcgtctgcagaggcttgctgatacctggcataggatattgttaattccagtgactggtggagtagttgtgggcatgatgcatggattattggagatttttgagcagataaagcaatccttatcatctcaaagggagggtattgatttcatggctgcgatttttcccacaatcaaagctatccaagccgcaattactttagggacagggtgttcactggggccagaaggacccagtgttgatattggtaaatcatgcgcaaatgggtgtgcggaaatgatggagaacaatagggaacgaagaattgctcttgttgctgctggatcagctgctggaatcgcctcaggtttcaatgctgcagttgctgggtgcttttttgctatcgaaacagtattacggccacttcgagcagaaaattctccaccatttactactgctatgattatattagcatcagttatatcatcaactgtttccaatgttctgctaggggaaaaggcagcatttattgtgccgacagctgaaactctaccttattctgggcatgctttgcgttctgattatttttggtgttaataaggtagttgtttcttagttaccttcaagatatagggaagtatgtgttctcaccttatttttggctctaattttcatccatatttttgagataatttcagtctgtcatttttgtgatacatggcctgtacgttttttgtgcttttgctattttggggaacattcatgttagtgaatatctgtaataaannnnnnnnnnnnnnnnnnnnnnnnnnnnnnnnnnnnnnnnnnnnnnnnnnnnnnnnnnnnnnnnnnnnnnnnnnnnnnnnnnnnnnn

SEQ ID NO: 941 - DNA, 719 bp, Zea mays
  misc_feature (1)..(1): n is a, c, g, or t
  misc_feature (696)..(719): n is a, c, g, or t
  Peptide Sequence Number=SeqID_13765
  Probeset Number=SeqID_15344
nctgctgcccccgcgggtgccgccccggacttcccggggggtccccccacgcgtgttggtcctcggtggcattctgcccgagcaccaggagagctttgaactccggcgaggacccgcaggccgcgggcgtgcagcccacgaacggctcgatggtctacctcggcggcgagcaactcgccacctcggtcgccgccgcggcccgtgcgtcgcatctcctcctcctagccgccgccgccgccgtcaacctactcgcagttcttcaagaacgcttgcccgcgcgcctacagctacgcctacgacgactctacctccaccttcacgtgcgccaccggcatcagctacgccatcacattctgctgcagtggagcctacggaaaccccaacacgtgccgcccgtcgcgctgctctgagcttcgttcccgcgacatggccgtgtgaagtcggcggctcgagtctttgtcctcttccggcgtgacgggccagcgataaaaattcgacaaccagcagagaggctcagacgagacgagtgacgccggtgctgcttcgcctacccgagaaaaaaaaccaatgaaatataggtagcttatggcgtagggtttaggaaaactggtagcatgagttttaacctttgcatttttttccacgcttcctcgatttgttgagccacccgaaaaagggattctatattttctatcnnnnnnnnnnnnnnnnnnnnnnnn

SEQ ID NO: 942 - DNA, 2760 bp, Zea mays
  misc_feature (1)..(86): n is a, c, g, or t
  misc_feature (2460)..(2460): n is a, c, g, or t
  misc_feature (2463)..(2463): n is a, c, g, or t
  misc_feature (2465)..(2466): n is a, c, g, or t
  misc_feature (2760)..(2760): n is a, c, g, or t
  Peptide Sequence Number=SeqID_13766
  Probeset Number=SeqID_15345
nnnnnnnnnnnnnnnnnnnnnnnnnnnnnnnnnnnnnnnnnnnnnnnnnnnnnnnnnnnnnnnnnnnnnnnnnnnnnnnnnnnnnnccggagacacaccaccgggccctgcaggcgctcgcggctccgctcccagatcccgccgcgcgggcgagccccgaggagtgaccatggaggagcccacggagaccaggccagctggtgcggaggatctcgcgaacggcgcgcaagacggggaggggcctccgccggaggttgaggaggaggaagtggaggagcaccgccgcgatcggcgacggcgaagcaggaggaggcgacggcggcactagggtcggaggggtcccgcccgttcactatgcgggagctcctcggcgagctcaaggaggatggcgagacggcggctggcggcagcagcgcgagatctgcgttcggcgatgggaacagggtcggatctgatgatgccgagggctcgttctacagccaagatagcacacaacagttttcatcccaccatgatgtagcgatggacttgataaatagtgtaactggagttgatgaggaagggcattctcgccaaaggattctttcttttgctgccaaaaggtatgtaaatgcaattgaaagtaatcctgacgaccctgatgcatattataattgggctctagtcctccaggagagcgcagacaatgtggatcccaattcgagttcctctaaagatgcattgcttgaggaggcttgcaaaaagtatgctgaagctacccggctttgtccaactctttatgatgcatattataactgggctattgcgattgctgatcgggctaaaatgcgaggtcggacaaaagaagccgaagaactctggaaacaggcaatactgaattatgagaaggcagtccagcttaattggaatagcccacaggctctcaataactggggtcttgggctacaggagctgagtgcaattgttcctgcacgggataaacagaccatcataaaaaccgctatcagtaagttccgtgctgcaattcagctgcaatttgatttccatcgggcaatatacaaccttggaactgttttgtatggtttagctgaggataccgtgagatctgggaagccagatgtctctcctaatgagctttatagtcagtctgctatctatgttgctgctgctcatgctctaaagccaaattactcggtctatcggagtgctttgcgattagtccgctcaatggtataattaatttattctgtttctgataaactgtgttagtttattctgtttgatattattacttaatagttcatgtagctgggatatgatagctgcttttcagttcagttatccatgtgtgttgaactctttagcaacccatattcttgaggaaaataactgacaaccctcatggtattcaaactttttttctctgaacggtactgtgtgctggtcttttagcacatttttctgttctttagatgttctcttgtctaattcttgattatgacagtgttcctctgttcttattgcatcttataccatgcagttacctctgccatatctcaaagttgggtatttgacggctcctccagctaacaattccattgcaccacacaaagattgggagagatcacagttcattttgaatcatgagggactccagcaggttgatgcttctgaccagcctccatcacaatccccagggcatttggacaggggcagaaagcctgtcagaataaacattgcagatattgtttcagtgtcagcatgtgctgatttaaccttaccaagtggcgctggcctctgtatagaaactatttctggtcctacattcttggttgccgatagttgggaggctctcgaaagttggctagacgccatacgccttgtctacactatttttgcaagagggaagagcgacgtacttgccggtattattactggttaaatgtctttctgcaaatgcaaaactgccaccgaagagccgcaaagttttggagattcagcggcagccttatccgttgaatgccctctttggtttgtgttattatttttcccgtctgtgatgtcagtcttcctagatttagccatttagggtatatcatatatattcatttgtaactactttccactgattggcgataggtccgttttccttttgtaaaagtggccgtgtgactgtattgtgcattcacagcagatgtatcggacattcttaagtttgtgattttgtttctctgtaacaatgtatcaaggcacgatggtctatgcttaattttgcttgaaggccctctttggtttgtgttattatttttcccgtctgtgatgtcagtcttcctagatttagccatttagggtattaggtatatcatatatattcatttgtaactactttccactgattggctataggtccgttttccttttgtaaaagtgtatcaaggcacgatgatctatgcttccccnccncnnaaaaaaaaaaaaaaaaaaaaaaaaaaaaaaaaaaacctggttctccatccggtcagaccaatcaacaaagtgacgcgagcacgagcatccatcgtttccccttcttccccatcgcgtgccctcgccgcagccatcttccatgggggaccagctcacggacgagcaaatcccggagttcaaggaggccttcagcctctccgataggatggcgacggctgcatcactaccaaggagcttggaactgtgatgcgctcccttggccagaacccactgaagcagagctgcaggacatgn

SEQ ID NO: 943 - DNA, 857 bp, Zea mays
  misc_feature (1)..(97): n is a, c, g, or t
  misc_feature (698)..(857): n is a, c, g, or t
  Peptide Sequence Number=SeqID_13767
  Probeset Number=SeqID_15346
nnnnnnnnnnnnnnnnnnnnnnnnnnnnnnnnnnnnnnnnnnnnnnnnnnnnnnnnnnnnnnnnnnnnnnnnnnnnnnnnnnnnnnnnnnnnnnnnnctcgttgcccgccctcctcagttcctgcatctctcccattccacagctgccgcctgccggcatatcgcataccctagggcgcagggccactggaaatcgctgaagcgcctcggtgcgagtgctcctctccaacatctttgagccgcacgggacagcagatattaattttgagagctgtgaagcagaaaactctaatctttggaggagactttctgaatccgcatcaaaagttgagtgtgaattgtttgtatacgttccagtgccaggattcaattcaatccatcctctccgatccatgcgatccatgcattccctgtaccttctatatgaaggattgtaagcaagcatgtctgattgtaagctatgttacttgcagaatgttaaatggaaacaacacaggaagctgacgtggagaagaaaaatgaaccacatgaagctcgtgaaaaggaattcaactcataattttttctacttgcaaagtttctaatgaagagacttgtactctatttttatgttatattgtctatttgtacgtgtgaatggagatgatcttatgtgatgtgatgatgaatagattagctttgttggatattagatattnnnnnnnnnnnnnnnnnnnnnnnnnnnnnnnnnnnnnnnnnnnnnnnnnnnnnnnnnnnnnnnnnnnnnnnnnnnnnnnnnnnnnnnnnnnnnnnnnnnnnnnnnnnnnnnnnnnnnnnnnnnnnnnnnnnnnnnnnnnnnnnnnnnnnnnnnnnnnnnn

SEQ ID NO: 944 - DNA, 871 bp, Zea mays
  misc_feature (1)..(42): n is a, c, g, or t
  misc_feature (812)..(871): n is a, c, g, or t
  Probeset Number=SeqID_15347
nnnnnnnnnnnnnnnnnnnnnnnnnnnnnnnnnnnnnnnnnnaaacaacaatactgtacaggcttcacatgggagaggttctttcaacagtccctacagtcggttttaatgtcgagaaggttcagtataagaatgtggcattcactgtgtgggatgtgggtgggcaagaaaaactcaggtcactgtggaagatgtacctgagtaattctgatgcactgctttgggattgttgcagatctatgtcgttgattctctggacagagaaaggatcagagacgcgaggcaagagttccaggacctgagaggcaccatgagcaccgaccaggtcagcgaagggctggggctgcacgacctcaggaacaggatctggcacatacaggggacctgcgcgctccgcggcgagggcctctaggacgggctcgactggcttgcgtccgccctgaagcagctgcaagaatcgggccacgcgacttcggtcgctggcccttccatctgatccagcgcaagtgagctcagtgcctcagccaactgacagcaagcccacaagaatatgctccagcgcgagcgcattcctttggtgggtgtggctgcccgctggtggtggtggagttccttcggtcggtgttgccgtgttggtatcatatgagccagttgttcatccggcagggactcgcgtacttttttttctctcctgagattgtttgtaaattgttgaacggatgcaatgccggcgatgttgatcttgtgtgctggtggtgcacgtggttgttttgtctgcttttttttgcaatgacacagaggtcgtctgcggnnnnnnnnnnnnnnnnnnnnnnnnnnnnnnnnnnnnnnnnnnnnnnnnnnnnnnnnnnnn

SEQ ID NO: 945 - DNA, 534 bp, Zea mays
  Peptide Sequence Number=SeqID_13768
  Probeset Number=SeqID_15348
tgcagccgcttatcgacgactacgcgtggctccagcgcgccggcggatcccggccggcggcgttcgacaggaggctcgtggaggacggcatcgggcagacgatcctgacgctgccgctggaggaccagaggtccttgctgctggcgtggttcggcaggttcttgaagctcggcgacgattgcccgaatttgcagagggcgttcgaggtgtggtggaggaggactttcgtcaggccgtatgcatgttcttcgtcaggctgattccgacgaggatgatgttttgacgttagatcagatagaagctcgtccagaaaaaaaaaatgctggcggaagttaagcttagctgctgatcatagattgtttggaagaaaccatttctgaatcttgagtgtattgtcttggctagtccatctgacatgacacgagagttggcaagaatttgggtgtgtttttgttctcagcagcattaacaatggtggagctactcggatatagtaatgaattcttagaatggaaacagatggttacttgctca

SEQ ID NO: 946 - DNA, 438 bp, Zea mays
  Peptide Sequence Number=SeqID_13769
  Probeset Number=SeqID_15349
cccatgctttcgcccacgcgtccgagaagcaccgctcccgtggaaacaagaagtcgttctagggatccaagacggcggcgcggatgctcatcgccgatccgcccagaatactacgccgtcaagcccccaagccccatgcacccacctttccagccactcctcccgctgccaaaaagccagatctggttgagcgcactgcagattacgcggtaattgtttcatcgagactgccgcctccagcgcccggtggaccgtcgcgggtttgcagcaacgacatagaactcgtcccagagacttcacagttcagggcctctgtccctggtcgctactggattgagagtcttcactttttcattcagtgtcccgatgttcgttccgagattttttaggcttgttgtgaagtcagcttcccgtcaccacagtctgccactggcccat

SEQ ID NO: 947 - DNA, 529 bp, Zea mays
  Probeset Number=SeqID_15350
ggcacagcaagctggccacaatgctgctaatggtaaaagcaatggagctggttatcaagcgtctcgtctgggcaagatttcgcagtaaccacctggtcctattaacaatatcctcttcatccagatcttgaaagaccagacctcgagcattatgctccagatcctgttccagcagaaaccgggatttccgggaagtccgtatgattgaagccaaaccagtttttgcatttgtggagtttgagaacgacggccagtccatggtgactatgcaggctctacagggcttcaagatcaccccggagaaccccatggatatatcatactccaaaaaatgagaaccctcgcggaatccctgtacccaatacccataatattttccgttccgcctccggaatcgagccacagtatctagtctactttccggccatgtatttttggaaagcacttgcttaatttagaagttagactcttgccacttttaaaccgtgtttggtgctcagtctttatgttgcgccgcttttgtcttgtc

SEQ ID NO: 948 - DNA, 468 bp, Zea mays
  Peptide Sequence Number=SeqID_13770
  Probeset Number=SeqID_15351
ttctcttttttttaaaatttttttttttttttttttttgaaacatagacaatggggaccccaatctcattttcacccatgtaaacccaaagccatgcaccaggaagggatacaggtgagatccatagcacaaaggctcgcaattaggacaaaatatatggaccacctaacaattggggggcaaacatggggcaaatgactcatccttcccttattcgccttaggtgatgtctcagcggctggattaggacaagggtctgattaatgattattgggcaacatcactccacgggtcagtggcttcaccgtatcaaaaggtaccacgccaagaaaaagcaaaatgctcccgagtcccggcctggtttccgcccaaccaagggccaaataaaggtgcttttacttgtatatgagagcatctctgccacccacgcgtccgctgacgcgtgggtcggcccggatattctggacc

SEQ ID NO: 949 - DNA, 646 bp, Zea mays
  misc_feature (421)..(421): n is a, c, g, or t
  Probeset Number=SeqID_15352
atccaatccatgttgattatcatgttcaggttcaaactgaccatcacgccatgaggggagagtacactatgaaatactccttatcaattgcaataacatgtcctggatgatccctaactcattccacgcagtatcctacgatgcattttctccatatttgctggacctccagtggattccaatgacttatgtgccattcaagcccaacaagaagcttctctactacaaaacaatatattgagaccacctacactatttagagcacggggcgtatatagctactatgtactccctttcttctataacgaataagattcaaaggctcacagtttgtcctaaaataaataatattttacacacatatgaaagatctgtctcctaatatgtaagtttatcataggtgcttgcaagcaatagcgtngcgggtccaatatatatcctctacaaaaggaaaggagataaggatacagcttcttttgccaacgttcctaatatatctgaaaatttctaggaacttgtttattatgggacggatggagtatgttaaagatgtatgttagtgtttcattcaaaactgtcctatctgttactaatgctatatattatatttgttttccttgagtttttttttcgggccccttcgttg

SEQ ID NO: 950 - DNA, 771 bp, Zea mays
  Peptide Sequence Number=SeqID_13771
  Probeset Number=SeqID_15353
attcggctcgaggcgtctgaagcgacaattaatttgacgggagcatcctatcgcccaaatggatggccagctcatggcgacctcctacgacgtagcctacgccggaattctagaggtctctgcattcccgcctctctgcggcgctgtccaagaaggtgattgatctcgcttaactgaggatgcttgctggtcacggagccccatacgccagtgccgtcccagcaacctgtatggaagctgctactgggctatctgcccaatgaccgctcgctgttggagcaggagctggcagagaacactgggcagcacgctgacctcaaagatgagtgccatacaaaccctgtagatagagcgcaacaggtgccaacagtaggccaccacaacttaagcgcagagcatgttgacaacggcttcctgctcaggtcagagctgacccgagaggagcaccctttaagccttgggaagaccagtgcttggaattagtatttagagtacttagagattatggagcatattgacctgtatttaaagttgacccactttgacatgcaattttttcttgtgtgatttgtctttttcaatggcctattaatgattttttatatattgactgttaattttttttcaagctttatgttttattttgatattttcatgtgttgatttgttatatgttacctcttctttttttgtttttatattattctttgttttttatatttctttttgtttttttttttgttattatatatttttttatttttttttttt

SEQ ID NO: 951 - DNA, 537 bp, Zea mays
  Peptide Sequence Number=SeqID_13772
  Probeset Number=SeqID_15354
cccaaaacgaactattaatgtgaactatgatggatttgctgaaaatgtgagagttggtgatgagctcctagcggatggctgcatggctaatgctgaggatatctataagatatgaccagatgataagacgccgctgcgcagatcctggctaattgatgccacatgccaatctcacattttcgcgtgacctgtgtatcggtcaccagagaaatactatgcttcctacaatttcatcaaaggattggctcgacatagactctgggattgccgatcgtgtacatttcatcgctggttcatttgtcctgtctgcagaagtaattaggcacttgaaaagctacatagctgcaaggagccgtggaagtgacatggcagtcattgcgaacatcgagagcatcgactctctaaagaactgggagagatcatcgagcgtcagaggcgccatgtagccaaggacatggggcgcagatccctggagcagtccctcgatcagcaagatcgtcagtctcagcactgacaagcgtcatgcgctccagtctc

SEQ ID NO: 952 - DNA, 579 bp, Zea mays
  Peptide Sequence Number=SeqID_13773
  Probeset Number=SeqID_15355
gtacgggtgtagtttttcttttgtaagaaccttccttttttttttttttttttttgcatggtgtgaattaagatcaaacgaatccgagcccttccaaaccctaagctcgcctcccctcccccccaaacaccaccgcgcacctatggcgaagtacggcgagggcgacaagcggtggatcgtggaggagcgcgccgacggcaccaacgtccacaactggcactgggcggaccgcgcctgcctgaatgggcccgggccgcggtttttttcctggttggggggcttaacattcttgaccgcgtgggcggcctcaggctccgcaccggcgcgctcgacaagcttggtggcgaggcctacctcaacctccgcaagggccagggcatcccggggtaccagctctcgctcaccctctcctgggaggccgaggccgcctcggagtccggagctgcgaaggtcgccggcaccgctgaggttccctacctcgccgacgagaactctgtcccaggtcccctaccttcctgttaccgcccgcgtccactagtacctattttctgctacttcctacggactctctcctttttt

SEQ ID NO: 953 - DNA, 533 bp, Zea mays
  Peptide Sequence Number=SeqID_13774
  Probeset Number=SeqID_15356
taatctatcaatttctatgctggtgtggatttcccgcagaactgaagattacaacgaagaagcatctttacaagtaaactcaacacacgggtaaaacgcaccaatcgtcgggacacatctctccacttccagttttggagtggaaaccccccaagaaggaagggtatcaggtctctacagcgtcgtcatgggaagcacacacatgccgtccatcacaactctccctctacatccaattgctaatcggaagaataagaacgctaccgaggcccgcggccatcagagaaaaaattgcggctgaccgatctttgagagcgggggtggcggcgccaaaggcgagcaacgcgggctcacgttgtctgaaaaaggcagatcgaggctcccacgtaaatgaggtatgagagagagataaacagagtgcaaatcttcctccctaaatgcggagaggttggtttgaaagcccgcggttggaaaccgcaacaaagatttgaaaaacgtccttgaagaaaaactgccctggtgttatatcagca

SEQ ID NO: 954 - DNA, 468 bp, Zea mays
  Probeset Number=SeqID_15357
ttccggagagttacatagcaattcatggggatgttccgcagaaaggccgtcttgcattggtatactggagaaggtaggaatgaaatggagttcactgaagctgagagcaacatgaatgaccttgtgtttaagtaccagcaatgccaggatgcaactgctcatgtcgagggctattagtatgaagatgaggaagaacctcaggaagatgaggcttaagacagtgtagtagtgttgtgcaggcgtgttcttgtatgtgtggtctgctgagaaactctgcttaacgttgggttttttttcatcatcccttgacctggacatccccttcgggaaaaaaggattgctttgggggcactctctggcttcgtggcttatctcttctagtttagggattttatttttctgcatgttttcactagtgttcacatggtggtcgccctttgattgaaacgtaggttgatatattcttat

SEQ ID NO: 955 - DNA, 490 bp, Zea mays
  Peptide Sequence Number=SeqID_13775
  Probeset Number=SeqID_15358
cccacgcgtgcggttctagtatcagcagcagccgctctacaggatgaaaccttactacctcctcgcttcgctacgacataatatcttctattatggcgcctactagctgcactctactcgccgttgtacaacaacgtcactactaaaaccatcctgtcaccacacatattagtcttctagcacatcatccttttttcagctgctgtcatagcaacgaggacgccaccaatcatccttcttaacagcagctcagcatgcttggtgaataatacgacccctgctgcagcgcatcattcaccgcggctgtggtggttactaccagcatgaccactactatagtcagcagcgtactacccgctgcttctgctgctttccctcccttcttcgtcacgacggtcggctgttctccccaagctgtaatacagcggctgctttcatgatggctactaagtgctgcactgcagctccaccaccacaaactagatgaggg

SEQ ID NO: 956 - DNA, 566 bp, Zea mays
  Probeset Number=SeqID_15359
cccactcgtccgaccactcgtccgtccactcgtccgcccacgcgtcccgaagagggggaggctgtatcaagggcatcccaagaagcagctcagaaggaagctgctcttgcaaggaggaggcaagagaaggccatggctcttggagctgaacctgagaaaggaccacgtgttactcgggttctcataagattcccaacgggagagcgcacagagcgggggttccacagttctgccgccgtcgcttccgtctaggactacgtcgattctctaggctgcatgaaagcggagaagcccagcctagtttcgaatttcccacgggtcacatatggtccagagaagcaatccctgacgctggaggaggcaggcttgcatccgcaggggagcctgtttttcgagatagagcaatgatgctatggaaaaaccggagctggtaagggtgggggtcctttttggaatttccccggtccccgttgggttttacaaatgtataacacaccaaggagcatgcttgttcataaaaaaaaataaaaaaaaaaaaaaaaaaaaaaaaaaaaaagaagaaaaat

SEQ ID NO: 957 - DNA, 865 bp, Zea mays
  misc_feature (257)..(257): n is a, c, g, or t
  misc_feature (260)..(260): n is a, c, g, or t
  Peptide Sequence Number=SeqID_13776
  Probeset Number=SeqID_15360
cagggggcccggaaccattttttttttttgggcttaaagtttaaaaagggggggggaaaaccccggtgtgaggggggggacctttttggggctgtttgaaccccccctgttttattgctttttggcctaacacatttaggggccctggattgtggtttttcaaacaaaaacccccggtttgaaaaaaaaacttttcccccggggtccatgttttttaaaaaggggtggttttctaaggaagggtggttgtccaccanaantgacaagaagatctgtgggcgtgttcaacacgcgcaccattttcagcgaacataatattgggtcactacgtattttcaaggatgtaggagggttagtggtcccaccaaccaacaggtgagtatagtcagatgttgccccgagttccgcaccatcaagtactagccgatgcctttggtgcatgtgccgccccctgatgatagctcgccgctcacatgatgtatgggacatttagagttcgctcagtgcacgtagcttcacaagaaatctgttccaagacctcatttacaacacacgctgcaagaggtggcttatagtctggcagagcggcaatggtctcctgtggagagccgctggcatcgcaacaggcgcggcgcggggctcacccattgggccaagccgacggtgtactttccaagggggagctcaaagggcgaggcgtccctcgttagcccgggcggcggtccgagcgcgtcgcctagggcagcgccgtagaccgcggcgtcgcgcccgaggaagagcaccctgggtgccgcccgcatggccgctggtcgtctgcgccggcaccgccgcaggctagtcgcgaaagaatagacggacgcgtggg

SEQ ID NO: 958 - DNA, 565 bp, Zea mays
  misc_feature (61)..(61): n is a, c, g, or t
  Peptide Sequence Number=SeqID_13777
  Probeset Number=SeqID_15361
atggcggaggtcccggtgcaggaggcggctatggtggaggagctggtggtggatacggtgnaggtgcaggaggtggcgccggaggcggctacggcggaggagctggtggtggtgccggtggtggctacggcgcaggcgctggtgcaggctacggtagtgctccaggtgctggctcttcctcgtccagcaataacgttattgctgcgcacgcagcagtgtgctcggcagcgggagcatgcatcagcgtgtaccatcatggcatgtacgtgcacgtctgcgggcaacgatcgagtgtctcggtctgtgatcatcattccctcggccagacagaatcgtcgtgcagaaatgtcaccctcgtagatagtgttgggatgtccctacgcgaaccttatagagcgcatgcgtggtcccgttaaagggtgaattgaggtaagggctctcggtcatcctgctgcgtgtggcatatgcggtacatagtcccctgtgccggtagcaagtggaacgtgttcttcggttcgcccccttgtatatatgtgtgggcaagttaaagcaatctttatgagat

SEQ ID NO: 959 - DNA, 750 bp, Zea mays
  Probeset Number=SeqID_15362
ggccctgcctgatggcattgagcatcttagaacacttgagaaattatatctgcgaggagcatccaaagagctcacaaagctatttcagtgcaatgaagaaacacatgagtccaatgggaatcttgagaagatcggtcatatccgaagggttactgtttatccataagggtttgattggaagtaagggtaatggggaggattgaaggggctagaatctctcactattctattttaaatagtgaggaattctagccccctcgatctccttcgttccattcactcccaaactagccctaaaaaggatgcgaagacttggtgtcattaacccatacacttgcggactagtgttggccttgtcaccgattgcatactactggccaactggtgtaatagctcaggacagtcaagagtaaaataaagttggtgaaaatatagttgggtctgaaccgctgaagtgagtggagactaataatttgtttttgtttccggtacttgattttactgttttgaccttatttttgtgtcactaatactcatcatgtatttgtagtcatacaggtatagattaaacgaaactcttcatcacacgcgaactgagcaaaagttgagcggtagataaattgtatatttttaaggctagttgggaactctatttttccaatggatttgtattatatttctgtatttgatctataaatatttcatgatattattttttaatacgtaatgcagaaaagtattaatcttttt

SEQ ID NO: 960 - DNA, 601 bp, Zea mays
  Peptide Sequence Number=SeqID_13778
  Probeset Number=SeqID_15363
aaacggtggttctggagggtttcccgccccatcccccggggccccaaattcccccccccagggttagggaggacgtggaggtgggtgactacgtggggcccaaggggtcaacgatcaacttcattctgttcgacctgggcatggacgaccccccgtgggaccccccaccagtgttcattccggaaaggttcctgcccggcggggaaaccaaggcgctggacatccccggccccaaggaaatgaaaattatcccgtttggggcgggcaaaaggatttgcccgggcctcaggatcgctttcctgctccccgagtactttgtcgccaacctcgtaacgaccttcccctggaaaaaggtggaaaagggggacgttgatgtcccccccgaggacgctcagctccccgtcctcatggggaaaccgctccgggggggcctgcttccaaaaaagcatttgtttggttaatttttttcatcatcaaggggtaagtcagggggtcccccaataatttattaatgcgaataaaaatccagcttcaaagcctccaaaaaaaaaaaaaaaaaaaaaaaaaaaaaaaaaaaaaaaaaaaaaaaaaaaaaaaaaaa

SEQ ID NO: 961 - DNA, 576 bp, Zea mays
  Peptide Sequence Number=SeqID_13779
  Probeset Number=SeqID_15364
caccacgcgtgcgcctaaatcctgtttagtgcgagggggagacaacaggaggatgaggaagaactgcaccttgccccctcctgcgcgcgcgcccaactaaaaaacaagccaaccgacttggaaatgctcttcgcaccgacagctggcccaccacaagtccacaagcaaccacaaaagacaggtgtagccttccaactggcaagtgaacctgcagttcgcaaagaagacaactgtagtcaacaattacgtgacaaggtgaccccttctgcattagaacctacatatatggaggagtcacacgccaagcgtgatgacgacgagccatcatacattcagacatcacgtattcacgtgctgtagatgagcaagcagatcgtatgcacaacctgaaagtgtcttttccttttgctcttcagggggcatgtacattgctgtttaatgtagaggctgttaaaatgcttaaataaggcactttgcaaaaaaaaaaggtatttgcaaaaaaaaaaaaatcgtggcactgtctcgtcgtggagagacgtctatggctcgtaacccaagtagaaacagaccactcac

SEQ ID NO: 962 - DNA, 566 bp, Zea mays
  Probeset Number=SeqID_15365
aaaaaaacacacacccccacacaacccccaccacccccccgacaccaccgcgcccacaaaaacaaaaaaaaaaacaaaaccccccccccccccccccaccccaaacacaaacaaaaaaaaaaaaaacaacaaccacaaaaaaaacaaaaaaaaaacaaaaaaaacaccccacaaaacgatccacaaaaaagagcaccacaccgacggatgaaccacacgggacgaatgaagcaaccttaataagccgtcccatgtcaaagcagcaaaaaaaatgtagtcgtcaggctggtattagactcctgcttggtctcgccagcatccccaggcttaaaatggcccgccccccgtaagggaaagataaagctgtcataaatcgtagccccaatgcattatgtgtggtggtggtaataagtggacaaacttggattggatgttgtcagctgtagccagtaggcgtccagcatgtgacgttccgccacagaaaacgagaacaacggaccgcgcgtgtgaaaaacacccacatcaccaaaaaggaaacacaagggcggccaccgaatagtgagctc

SEQ ID NO: 963 - DNA, 506 bp, Zea mays
  Peptide Sequence Number=SeqID_13780
  Probeset Number=SeqID_15366
aaaagaaccctcaaaattttaacataaatcactaattgaaataattatgaaaaagtttgttacggcttaagataaagaagcaaaaaacgtgtgcccgaacccgtaggaaaatctttgttttaaagcctggcacccctctttttttttttaattttttttttttttttttttttttttttttttttttttttttttttttaacgtatcctaatataataaatagagatagagatgtttgtccgaccggcaattaccaaggtacacagacgaggactataaatacttcaactaagggatgctgttgacaaatcacaatcgatatagaacaaaatgatgggcgacacaataacattttgcattcaatgcatgcaggaagcgaatcgaaccacatattcgcttgcatgccttcaccatgtacgattgtgatttatatggccgactccaggctctgcaatgaaggagggccaaaggttcctcgcccgggaatccggcaccggagctgcagg

SEQ ID NO: 964 - DNA, 552 bp, Zea mays
  Probeset Number=SeqID_15367
ccacgcgtccgcagttcacttagatggagaagatgctgttttggttaagcaatcttgtcaatcaaagcaatagtgaaaatggatccagtatcccacgaaaaggtaattgtccgctcggttcgtgcgttgcacaaactcaaggaacctgcagcacgatccttgatcatttggatgtttggagagtatagcttcatgggggatctcactacaaagattgttcctcctgttctcaagtatcttgcgtggtccttcgttgctgaagtgggggagacgaagcttcaaatcctaaattcttctgccaaggttataatgcgttgtacacaagaagacatggaagaattcaaaagcatagttgcatatgtgcattgagtggcctacgtgtgacttgaattatgatgttccggatcgggcttcgtctactatcaagactctggcccggctacatgactcaccaagggtcctcacatcaacctcagaatggtgatatctataaagagctagccaatcatatatttaatgggaaagttgcagccaacatctcatccagcaagc

SEQ ID NO: 965 - DNA, 447 bp, Zea mays
  Peptide Sequence Number=SeqID_13781
  Probeset Number=SeqID_15368
attggtcaccactggcatcccaatgctgctgttcacgcagtggttgaagaacagggacgggatgataaagttatagtgaccaagtttcctctggtacttcttcttcttcttgtacttgaacactataactttatcacagacagccaaacacaaggttaagaatcacaggcataagtggatacgaagagtaccctgctgacccaatacttgaccctgctgcagctttaagctaaactgtaaagttatgttggtacaaatccggctggttgttcagacgcttttatgattaaatcttttttattcttctacaggggggtaacactccccacaaaaagcttttcaagggatttatttcataaactcttattcttgttccatttcgtcttgtgttttctatccaatattatcacataacgctaaataaaaaaaaaatttcttttttctccc

SEQ ID NO: 966 - DNA, 483 bp, Zea mays
  Peptide Sequence Number=SeqID_13782
  Probeset Number=SeqID_15369
gggttcaagtggggcatcaaataccaggcccccaaagtggtgccgggtccccccctccccaaggtccagcgcccggtgtgcatattttcccaacccccccagggtggtgggggtgttttcccgcatcaccaccaagtttgccctcatgtaccccaagggggggtttttgcattggtacgtcgccaagggcatgaagaagggggagttttccaaggcccccaaggacctgccccccctggaaaaggactacaaggaggtccccccaaagggcgccagtaattccggtcccgaggaggaggaaaactgatctgcttgcataaatctgtttgcctgtcaacccaggttttggttttaaaaaccctttgtttgtgtccggccccccctgggaaaagtttgggtgtttcctcccaccaccccttgttgaacggctcaagaatttgcatttgtaattaaagtctgtccctttaagcccttttggttttc

SEQ ID NO: 967 - DNA, 542 bp, Zea mays
  misc_feature (18)..(18): n is a, c, g, or t
  misc_feature (45)..(45): n is a, c, g, or t
  Peptide Sequence Number=SeqID_13783
  Probeset Number=SeqID_15370
gggcgagaacgagttcgncgagtacaagaaggaggagaaggagcncaagcccaagcagcccctcggcgaggccggcgccatcgccgccggggccttcgcactttacgaaaagcccgaggcgaaaaaggacccggagcacgcgcccccccccaagatcaagaagaaggtcccgggggcggcggccgtgggctccgggggtttcgccttccccgagccccccgagaaaaaaaaggcccccaaggaggcccaggaggccggcggcaaaaaaaagcccccctttttgggctgattgatccctcccgtatggtggtccccccccgtgtgctacgggtgggtgtgttaaagtgaaatcgagcgccccccgtgttgtgggggggtacgtatgtatgcgctcgtgtaatgcccgaataaggggggctacgtaacccatcgtatgtaaacgtgtgggtatgcatgggcttgtgtatgatcgtgggccgaggcccgaaaaaatgtatgcaactcttgatttacttacatgtttagttgtttacgtttccccc

SEQ ID NO: 968 - DNA, 912 bp, Zea mays
  Probeset Number=SeqID_15371
ccgcagcgtccgaccagcgtccgcccacgcgtgcgttgaaacttcacgtaaactgcttgtgaattcttggcatcaatttcatactatcacgacctctgagctattcacatatgatacattgatcttgtacacagtcctaacaagtgttatatctgtggaccgtgtctctctcaaacaaaaggttgtacatgcgcctgaaatcttagccgaaattggcaacatacctcacctcatgagatttctcaatgccttctacaattggcaggacaagtacattttttattgcattctctggctcgactgaaccaatcaagatacagcgatacttgcatgctgattattgctactacatgcgtgaagtgcgcactgttgcctactcacagcttgtggaatcgtacaagagtgcgacaatggaagtcatggctgatgtatttggcgtcacagtcgactttatagaccactaactgacacacttcattgccgctgggaagctcccccgccggatagacaatggggcgggcgtcttgcaaacgaccccacctgatgctaggaacgccttgtaccaggcagccatcatgcaaggagacttcctgctgagccggtgcctgaacctgtcaaaagttatccacctgtaggggaaagcccttcattcaggagcttgccttggttcatagagtgaacgggaggtgcttaactttcaatgggtctcagttgaaaaagcttttagggatatttgtgttctgagaaattgtgttccgccctttttagcccaactacatgaagccccaaaaaaaattcatggcgttgcttgtaaacgtctcttcattaatgaattcaccccttgttttttcccaaaaaaaaaaaaaaaaaaaaaaaaaaaaaaaaaaaaaaaaaaaaaaaaaaaaggaaggc

SEQ ID NO: 969 - DNA, 540 bp, Zea mays
  Peptide Sequence Number=SeqID_13784
  Probeset Number=SeqID_15372
gtgggtgtgtgtgttttttttgatggcaaaaaacatggcattaactatcacattccacataggttagggacacctgaacaaagggacctacacaggccggcccattgcaccaggctacagactcggcactaacggatggtgaaaccaaccctctgattgggggggcggcactcaatgccggcgacaaatgtctccatgggggacgcgtggccttttttggcaaaatatctactacttggtccaaaaacaggacgcctggttcgatgcctgctcggtcagaactgccaaggatgcatttggggatctaaccaccccgagcgagatcatcgaccacacaatagggaataagattcacggtcttaagggtcgcaccatgcaccatgaacccagtaatgggagccacatggtggctcttggcgctgattcacctcaccatggacattgtcatcaaccatggatctgatcgacacttggctatgtctcacggcggaactcctctccgacacgctagggctgcacatccttcttaaagtacatggc

SEQ ID NO: 970 - DNA, 827 bp, Zea mays
  misc_feature (466)..(466): n is a, c, g, or t
  Peptide Sequence Number=SeqID_13785
  Probeset Number=SeqID_15373
ccggcttgcttttgtcgctggcttaattttaatagtgtagtactgagggcggaggtttctgaaatatgctaatccacagatgatgggattctggtgattccaactgctttggggtgccccccaaagcttaacgctaagctactcacatctggaaatctacaattctcagacactacgtcttttatctttagctagcagggggggatgtttccaggtttctattcctttgggtacgcatgataagtgtcccatttcagtttcatttattgctaagcatggtggtgatcggtttttgttggataccactcaaaccatgtatacaaccatccaagagcaagtggagatactagcgaaatctagtgtttcaagtaaacaagcaatgaatgaagaagcagctgaagcttcaggtgtatagggtaatcctgcatttaaggaaaaccaatggcaaaagccagtaaattactantactgaagcaataaagttaaatggaaaattggctacatattccagcaacagagctgctgcctttctagaactaactagttcccgtcaggctgaggcagattgtacaagtgccgtcgcccttgatccaaaaagcgtgaaggcctatttacggaggggcactccaagggaaatgttaggttattacaaggaggttgttgatgatttcacccatccccttgttttaaatgttagactacccgtttagggtttttgttattccccttgtaatacccgttatcccccctgtgtaatgggtttggcccaattactccctcctattaatatcccccctacccctggttagggtatgggttcctatttt

SEQ ID NO: 971 - DNA, 1587 bp, Zea mays
  misc_feature (1416)..(1416): n is a, c, g, or t
  misc_feature (1526)..(1587): n is a, c, g, or t
  Peptide Sequence Number=SeqID_13786
  Probeset Number=SeqID_15374
ccggccgggaaaaagatccttctggtaatttggtgggcaaggcgagacgcccatctcccctctcatcgtctctctcatctcatccagcctgtgccaaaacaaaacgagaaaaaaaaaagtcttgctgctgctggtggtggagcgagaaaggaaaaaaaaaaagaaggggtaatctcaggaaccatctagatacagcggcgcggcggtacgtggactggactggagcgagcaagcctgcgccggcgccgccgtcttcccgaagcagaagctgtagttggtcaagaattggggatcctgagttgaatatgatctcaaatccggtggactggtatagtttcggacccggatagaattggtagggatgcaagattggagggtgcgtgagttcgaaggtaaattcactgatgagtttgcccacagcagtagcaacgaacataaaggtggagttgaggcttctggtgtcattagtagtaagaagttgaagcatgcagttgctaatgagaaaatccaaggtgtcatccccggtacaaataggtcaggttcactgaaatgtaattcagagaacatccaacatgcgaacggggtattatcccagaatataagctgcgctggtgactgcaaaaatggctccattgcctttcctttgagagaagaaaatacaataactgagaccagatgtccagctgataactggaactcctgtcagtttgcactgagcaatggttcgtccattctcaataaccacagtgctccccaggatagcctcacttatggagataatgatctaaactacatcgaatggcctggcattgacaattttgaggatgtcgatacattattcaggagttctgattcaacatatggtcagcagcagctggagaatgcagatgggttatcttggattccgtcttcagatgctgtttactctaccgatgttgctttgcagcaagggtttgattcgccttattcagattatggtattctggatgatctctccgcattccaatgtgcagaagataaatcactaccctcagttggtccttcatcggatgtatgtgataaccaattcaatgatacctatctgttcagtgagcagaagaatgtgaatgcatatggtgaacagatataccaagaggatgggatggagttgttgcccactgaccagatatgcagtggacatgaaaacattgatatggggattgagatgctgtcattgggatcatttaaaaccggagccattctctcgttatggacagtgtggctaaatcttttgatgctctgataaagcttctgtgttctactgcggatgatgcacggccattctccatgcgtagggggggtggcatttgaaatttagaattttaagagcataataccctggttgtgtttggcttgggagtgagtgggtgttagcantagtggggcctgtgtgggaagcgggggctgtcgacagctcttacgttgtcaagggacaaacttatcctgggaaagtgctcacacgtggaacacagactactctttatttnnnnnnnnnnnnnnnnnnnnnnnnnnnnnnnnnnnnnnnnnnnnnnnnnnnnnnnnnnnnnn

SEQ ID NO: 972 - DNA, 461 bp, Zea mays
  Peptide Sequence Number=SeqID_13787
  Probeset Number=SeqID_15375
gaaaggagtcccccctcgaatgaggccacacctttggcccatcgtagacgttaggcccgctccaaatgatatacggtttgtgtagaagcccccacaagcgtccggtgggcaaatatgcgctcctgatttcattagagtgagtgacctgctggggctgctgaacccttatgcccccttataattgccctttcgtcagcaagtatagcatttgcgagcatggagcacccagctccaatgcggtccgggaagctctaagaaactgggatggaaggtcaggccgattaaggatgacttttgcggaacccgttgagttgtgccagcaagttgggtttctcgagcccgtggagggattccgttttcctcccctgcccaacataatctagttagcaagggcgtcagtagtgtaagagcaattccctcggaacccgtgttatttaacccaaacactttgatttggaggc

SEQ ID NO: 973 - DNA, 692 bp, Zea mays
  Probeset Number=SeqID_15376
atcaagacatagttctttgccagtactttccatgccaggattttggtttcgttttccaataaaaccaaagcatatctttcaatattgtttctgtgccaaagcttgtgtttcattgaaccatcaaaaattttggagaaagatcccattggcttcttcttggcaggaactttctttcagtcacagtctcattagacttcctgagcaaatgaagcatacgattgcccttcgtcatctgtacacagatgggtgcacaaggttggagggcatgcctccagagcttggacaaatcgcctcacttcgaacaattacatggtttgtagtgggaagtggcttgagttgtagtagtcttggagagctgaaggatttaaatatcggtggttcgttaatgctaaagcagcttgaaaatgttcctgtagggaggaggagtgcaggagcagccaaccttgtcgagctgcgggtgcccagtcgtaagaataagaaggaactgagacaactgtcactagagtggacaagtggtaaggaggagggactacagtgtcatgaggtgctagagggccttgaagctcatgatggactcctggctctaggaatacattactaccaaggcaccagttttccatcttggatgggtatgttgaaaaacatactcgatcgaccttcggttgtccgattgtagtaaagtagaccggctt

SEQ ID NO: 974 - DNA, 551 bp, Zea mays
  Peptide Sequence Number=SeqID_13788
  Probeset Number=SeqID_15377
aagggctgtgggtttgtttcgctcgaaacccttttgttttttgcaagaacatacccggtttttttcaagaggttgtttttgaaccaccaaggaatgcgacctccatgggggtccccctttggggtcgggggggtaaccttttcatccatgttgattcaactgttggggctcaactcagggggcccgaagtttttgccagggattaatttcttcaaagtgttgccagaccccgaggatgggttcgccgtgttgtactgcatagggttcgaaatgatggccgcccagtggctagcaatgggagcctggtccatgcggttcaaagaggtgttgggggccccaaggcaccagcttgagagggggctctccctgggggttttcaatggcatccatgccctccctgcctgcacccttttgtccaaatagggctcctgggagttagattatattactgggatcccgccaaaggaaaatttgatcgggttacttggtaccccgcatcttcagccctgtaaaaaagaaaaaggaaaagaaaaggagagaagggggccccc

SEQ ID NO: 975 - DNA, 920 bp, Zea mays
  misc_feature (920)..(920): n is a, c, g, or t
  Peptide Sequence Number=SeqID_13789
  Probeset Number=SeqID_15378
aaattctaaatacatccaaacaagatatttatattaaaatttattttcagtactaaacagttttagtattagatctaattcaattgcaacatctctagtatctgtatccaaaaggccgcgggtttttttttttttttttgccccgttgaaggctgcgcagcccgcccgggtcccccaataattcaccatcacttattgcatttgcaaatctcaatatactactgcaactagcaaatctcaatatccaaacaaaagtactacactgaactcaatcatcctcagcggaggaaagcagagcacggcacagcaaagcagagtcgcagagggatagatccgagcacaagcaggccccgatggcgacgacggcgacgaaccggcgggtgatcctcaaggagtacgtggagggataccctcgcgaggagcacatggagctgctccggggcgccgaggttcccctccgcctgacgggcgccgagccggccgggtccgtcctcgtcaggaacctctacctctcctgcgacccctacatgcggcccaagatgtcgcgcccgctgcgggagtcctacacggccgccttcgtcccgggcgacaccatcacgggctacggcgtcgcgcgcgtggtcgactcctccgacccgcgcctcgcgcccggggacctcgtctggggcatcaccggctgggaggactacagcgtaatacccgtggctacaccggcgagatcaatccgggagcgtgagtaattgcaggggaaatcgagagggggataggatctcacagccagaggaggaagacgagcttcctgtgttcctcggtctttcttctttctgaataattcctgtcctatgcatcgatgcttcagctcctctttgtcctcgtggtccttcgcttcagcaattgggttggatagagtgggcttcggn

SEQ ID NO: 976 - DNA, 714 bp, Zea mays
  Peptide Sequence Number=SeqID_13790
  Probeset Number=SeqID_15379
gggacgcatgcgtccgcctaagcatacacacataagagctggtcatgaaagacctcattgattgacgaccaggcgaggtctattctcataagtggcgtaccctcacaactatggacctgacacagggactctttctgaacacaatgacccattcgatgcgttggtcctgatgcaggagcctgttattcctggctcgttactgcgagcatgaacaatcggtcttatgcccatgattgaccagggtgaaaaggatggcaagatattcgcagcctgggctgatgatcctgaatatcggccctactacgacatcagtgagctgtctcctcatcgcctgcacgagatcaagcggctctttggaggtttttagaaggatgggaattaagaggttgctgtggatgcatttttgcctggggccacaggttgagaggccattcaggactccatggatttggatgggcagtatattttgcaaagcttgaggcagtagattggaagcaactatttatttgggggtcttggaatgagggtgattttaataagggaaaaaacttccccctcgcccccaattttggggttggggacaatggcacaagctgggatttacttttgggacgggctttttttttttgtttaattatgaataagggaaaaaaaaaaaaaaaaaaaaaaaaaaaaaaaaaaaaaaaaaaaaaaaaaaaaaaaaaccccaccccc

SEQ ID NO: 977 - DNA, 539 bp, Zea mays
  Peptide Sequence Number=SeqID_13791
  Probeset Number=SeqID_15380
ttatgggcagtaggctctattctgggtgcaactcaaaaagtagatatgaggtacactcggaaaatgggggtggttcgtattttagttgatgtgacggatgtgaatcacatttcggagtctgcagaaatagttgttggtgaagggctttatgagattttttcaaagttgatagggttctcaaagatgggaggtggattgataatgatattacgagaaatcaagatggggatgataagactgaaggtgagaacaaagattattccgagaagcatgattttgatttggccccgacggaggaggcagcagaagacacagtcatggaggatacttctaagcaatgtgatcatacgaagtctaatgatgtggctttggacttggagttggtggtacagcaggagtatcaggacgttattactatggaggcagcaacgtgtttggtttcagaattactagaaattgatgagcatgcagttttgaactcaagccttcttgtttgctccgttctgccaggaagtaaatcgaatgagaggaatgatgtg

SEQ ID NO: 978 - DNA, 670 bp, Zea mays
  Peptide Sequence Number=SeqID_13792
  Probeset Number=SeqID_15381
tgtggtagaacctcccaagttattgggcccacatgcacctgtccttgtctcaaagaccttagacggctatgcatgtgcaccagataacttaacaggatctgtccgagtgtcccaaggaccccggataaaccacttacaaccaagatggcaagattaagtaacacaaatcacacacaccaacagtttgcagcggaaatcttattgccaaattttacaagttacaaaatttttacagtattttatcggagtgattacaaaagtataagtttgaaatatatgctagctcaagttaccatcctcaataagaatataaagacggggtatacttatataagaaggccgagcccaccggcacttaacaccatcattagcagcacaaaactataacctgggtaacactaggttagtgtttgttagacatcgatcacttgacgaccatcctttgtcttggtactcgttcaaattattcatcttcaggttcatcatccgcatcacctcgcgaatcagtccgcgcttggggtcgacttggcttgtcttccgcatcacgcgattaattaacgtaccacatcacaacccgatttggtagttgcctgaacgacgacagccttcagcttgacgacgagatcgaatagagaatggtgagcgcgaggatttcacaactaggatgagc

SEQ ID NO: 979 - DNA, 671 bp, Zea mays
  misc_feature (601)..(671): n is a, c, g, or t
  Probeset Number=SeqID_15382
cggacgcgtgggcgaccgaccagagtaccggacggacacacagcgagggggaggaggaggaagaaggaagcaagagggaggaccgagcaggcctagggtagtcccgtccggtcccgactgcctggcgtcggtagggggcgacggcgtctctatatctgtcgatgggctactggtgggaccgcgtcgtgctgccggtgcggcgggcctggctcggcgtcgcgtcccgcttcggggttcgccagaccgggctggggaggctgcggcaggaggtgagcacgtgcgagtacgaggacgtgcacgtgatggggggagatgctgagccgcaccacgggcgccgggccggcgccagcgcccagcggcacagcggttcgcccaacgcgggcgtggcggcagttcctctctgccgaggcttttagttgtagatcaaaggccgccgcgcgcttcagctccgctgctgttgctgcggtgcgggggtactaagtgatttccgctatcggttttggcagtctttttatcagggtcgtcgtcgcgtcgtcagggagtctttgggtaattcgcttggcttgtagtgtaccgttcggcggtccagttccctcctgcnnnnnnnnnnnnnnnnnnnnnnnnnnnnnnnnnnnnnnnnnnnnnnnnnnnnnnnnnnnnnnnnnnnnnnn

SEQ ID NO: 980 - DNA, 792 bp, Zea mays
  misc_feature (1)..(1): n is a, c, g, or t
  Peptide Sequence Number=SeqID_13793
  Probeset Number=SeqID_15383
nccggtcgacccagcgtccggctcggggtccttcgctggctgctgcagcgggggcgctctccctgttgtgagtctccctggcaactgcggcgccccggtttctgttcgccatggcgcacgctctgctcgccgtcgcaagccgcgactctctccagctcgccaacgtgcgtctgcgtccttggtagccgagtttttctgcgcagccccagctgcgacatcgtctatttcgttcggtgtgctctaagtgttcgacgcaatgtcaatcagagacccccgtggttctgggccctgctctctgctccagctcgcccagtgggacccctggccatcgtcattcaagggactcccaaattgcattgagatgtggtgagctgattcgctatttttcctattaattttatggtcgtaaaataagccgcttcgtagccgtataagattaagttagaaatccccgtgttgcgaggtgtgcttcgaggaatttagtggccgaaaaaatttgaattagttctattttgtagaaaatagtatttcagtgccgggtgggttaaatccagtattttatgctattgtcgatcgctctgtcacccctaatggtgtccaaaacccgtaagctgaagtcgatgccctgctttagtcccccctattttttacgtttatgcccggttaaaagtcttgaataaatttttatttttcccccgaatgtttaaaggggggtaaaaaaaaaaaaaaaaaaaaaaaaaaaaaaaaaaaaaaaaaaaaaaaaaaaaaaaaaaaaaaaaaaaaaaccccccc

SEQ ID NO: 981 - DNA, 989 bp, Zea mays
  misc_feature (1)..(1): n is a, c, g, or t
  misc_feature (486)..(486): n is a, c, g, or t
  Probeset Number=SeqID_15384
naaaaaggaaaatcttgggggacccattatccgggaccacttattatcgttggaccacgagctcccgatcccgaccaactaactggccacaaagcaatcgccaagaacatcgatgtccactcctgacaacccatatcccaatcaatctaccacctctccggccgttccacactgatcggatggcggccttgaccttccacccggccgccttcttcccacgaccacgagaggcagcagtgacagcgaggcagccgctccaccattactgctcgccgcctctccggaccctcgtccctagaactacaagaccgtgccttctcagggccaggtcctccaacgggctcccgcagatcggcggcgcctcgttcggcagcagcaatggtatcgcgtcgcgcgcctcgcctgccgttggaatatgcgagcgtgcatgatgaccgactgtacgcagaatcacgtactgcttcctggccgcatatgcagaggtgntggatggccccccccccccgcagatggggcaccggggcaggggcagcggggagcgagcaccgtcagcatcacggtcgtcggcgcctccggcgacctcgccaagaagaagatcttcccggccctcttcgcctttctacgagggctggctcccggagcattttacagtgttcggctatgcccgtagcgagatgaacgaccaagagctcaggaacatgattagcatgaccctgacgtgccgaatcgacaaaagggagaactgcggcgacaagatggaacagttcctgaagaggtgcttctaccagtctgggcagtacaactcggaggaggggtttgcggagttagacagaaagctcaaagaaaaagaggtaaaatatctttttcgcttggtctgccaagataaaaggatcggacttgtaccaaaatgactgcacattgatggatttgaaatggctgtcatctcgaatgcccacagtctttccctaactgggttgtaccaatcgcat

SEQ ID NO: 982 - DNA, 515 bp, Zea mays
  Peptide Sequence Number=SeqID_13794
  Probeset Number=SeqID_15385
tttaccagtctgttaaaccaggatggtgtgggggggctgactatacatagattacacatgctgatcacaggttactgtacttggatctttagaatgtactcctggtttcgcttttttttatggtcacatcctatatgaagtgccttcatctctgagatatctttaacatcttcctgggggctgggcgcggacactcgaccacaaaaagtacaccatggctaatagtatctgttcacacctgatggcacactattaactttgataatcttgggaacacccatattatcattaacctcaatcctaacgatatgattgataccaatcttatgcaatatgttctctacctcgccgtatcttattgcccgaaggtgacatctaaaaatgtttccggtgtagacacttgtctaactatgactgctttaaataaatcttcctgcatgatgctaaggatgctacttactttatcatagtcatatgcatctatattatgattgaaacaattgattgcctttata

SEQ ID NO: 983 - DNA, 764 bp, Zea mays
  misc_feature (7)..(7): n is a, c, g, or t
  misc_feature (728)..(729): n is a, c, g, or t
  misc_feature (734)..(734): n is a, c, g, or t
  Probeset Number=SeqID_15386
tcccggngtcgacccacgccgtccttttaaaaaaaaaaaaaaaaaaaaaaaaaaaaaaaaaaaaaaaaaaaaaaaaaaaaaaaaaaaaaaaaaaaaaaaaaaaaaaaaaaaaaaaaaaagggcgggaacccccgcccagggcgcgggggcccaggcacaagcagcggagagcaagaaaagcccccccgccgtccgggtaaggaaccctaataataacggggggggccccgcccccgcccaggggcaggcccagggatacctgatccggtacaccccttcccctttgccaaggtggaaggcaaccccgggggggcacaattctttttccggggagtcccggagttactacccaaccccggtgcgcgagggcttttaccgattggccaccgacgccaacaggctcaccaccttcttcagcgaggagaatcccaacgcctgcaccatcgtctgagactgagagcgacggccaggaaggaataacccgttgttccgttcgggcaacggctcgtcttcctttgggttcttggttgattggggatggaatcattagccaagaatccggttcttcttgtagggagtgttgtagataagaaaaaagcaggaaactttcggttcggccggtatgatgagatgtaaacttccttgtgctgctctgctgctcgccttggattgtcaatttgtcgttgttgtttaagccaaaagcagttataaccttacaataatgaatnnatccnactcctgtaaaaaagaaaaaagataaggaa

SEQ ID NO: 984 - DNA, 366 bp, Zea mays
  Peptide Sequence Number=SeqID_13795
  Probeset Number=SeqID_15387
cgggctttcctgctcaggtgtgggtggcaacatgaaagatctagtacccggtggaggaggaggcctttcggtccatccagcaccagtatgcagggcccaagttccggctctagctctctgtcaataaggccctcgccctccttgacatgttggcaggcaaggacgacgcatgatccccattggatctgtagtcgggccactcgaagatgggatgcacgaatgaattcacaaacaataatatcggatggatgggcatgtatatcgtcatgggcatgtcccctctacgagacgggagtatgcctcggtgtagtagtgttatattaatgattaatatagtatgtccacctttgtttgctaatatcaatt

SEQ ID NO: 985 - DNA, 529 bp, Zea mays
  Peptide Sequence Number=SeqID_13796
  Probeset Number=SeqID_15388
gcctaattggaatttatttctatttgctactagaatatttttttatctagatcttagaagtgtaaagcattcattgttaagcttctgaatccggaatggcataaattatgctatgcttgtacttcttaccatcaccattctgttctgtccactgcgaatgaatctcttcaaatccgttttttccgaagacccggatcctccaccacccggatccaaccatgcatcgccagacaaagcaccggatccccattccccgcccccatcgaatgccaccgactccgctgccggaggaggcggccggcgaccgctggaacctcggcggcctcatcaaaaccctgaccatcgaaatcggaatccataattgagacctaccgccgcgatctgcaggaattccgcaccggtttgaagaaagagatcgaggtcgcgcagggttctctcgggaccgtgggccacgtcatcgatgagttcggaaacaccgtcgtgaaaggaacggctcagatcatatctcaaggtaaggacgccatcctcg

SEQ ID NO: 986 - DNA, 484 bp, Zea mays
  Peptide Sequence Number=SeqID_13797
  Probeset Number=SeqID_15389
aagagctctagcattcactccaagacacaatacaaaagatcaaatcccctccaagtcccaaattcattccaaacacttagtggcttgtgagagagagatttttgtgttcatttgcgctcttgtcgcttggattgcctttcttcttttcccattcttattctcaagtgctttgtaagcgaggcaagagacaccaagtgtgtggtggtccttgcggggtcttagtgacccgtgagattaaggaagaaggctcactcggtctaagtgaccgtttgagagagggaaagggttgaaatagacccggtctttgtgacctcctcaacggggactaggttctttggaaccgaacctcggtaaaacaaatcaccgtgtttttttttccgaacacgcaggagagctgcgtatcattgaattaagaagaagggtctaaaattagaccaaatacaaacacaacagaaaaaagaaataaagaagaaaaagaagaaag

SEQ ID NO: 987 - DNA, 455 bp, Zea mays
  Peptide Sequence Number=SeqID_13798
  Probeset Number=SeqID_15390
cccactgcgtacgatgattctcaggcgcgtagctcggcggacaaacttcgatattgaaccagcgtgaccctgtggatggttcagctgcacagctgtatgaaaatacatgctatcaaatcacaatgccgctttgagcagctggaatatgcccaggacacaaggcccaatgcatggcagcagtttcaaaccacagggaaagccaaaaaggcgggggtcttctcctgtcgcatgagggagagcttctgagagtcacccgacgaccacataggttaggtgggtgtcactgcgagtggcaaaggcctgaccgactcccacaggagggagaagcttgtgctccttactggtgagctccggcgatgccgcggatgattgaccaggagtatactgaataaccgcccttgtgtttggatctagccgaacagacatttacataccgtgtgtttagcgccgacatg

SEQ ID NO: 988 - DNA, 436 bp, Zea mays
  Peptide Sequence Number=SeqID_13799
  Probeset Number=SeqID_15391
gggagggggggcggactaacaatttatttatcctttcaaccccataaaaatttggtcctttttactggcacttgggataattaactaaaaaaccccccccccccggggggtaattgggtacataacctcaaggggaaacacaaacatgccccccaaaaaaaaaacacgtggaaaatcccctttttttttaactccggccctttttttttttccctttgggcccaaaaaaactaggcgttggaggcaccttacccccaggtttttctcccatgcttacccaaccaaagccggccaaaccttggatgctcacaatttgtccttaaagggctcggggggggttgcctttttgaatgcccggggcccctgggtgggggggggtggtggcggcccctgcggtctccttgctttttttaaaaaaaacaacaaagtccccccc

SEQ ID NO: 989 - DNA, 520 bp, Zea mays
  Probeset Number=SeqID_15392
ccatttgtaaaagggttccacctttaggcgcagcgtgctggtaaaacggcaacaattgttgccattcaaccaacttgttttggcaaacccaacagcattttaccaacaacccatcattgggggggccctcttttagattttttatgagttatagttcaataataaagttttttgtctaatgtttggggcttcccaaaaataagccacccctccgcccgcgcgtccggggcttctagtctccaaatgggggtgatagtgtatttccccctaagatcggcagtaatgaggtataaatcctcgttggcgtgggctactcggttaattgagcattaacccccccaaacttggcgtggatggttttttcctaaataaaaaaaggaaatgtagttaaaaaaggataaataattaaataaaaaaaaattgatgaagatttttaaataaaattaaataatgggggggctgttttataggtgctaagttaaggtccgcgggaatgggaagttataatttttatttggtg

SEQ ID NO: 990 - DNA, 312 bp, Zea mays
  Peptide Sequence Number=SeqID_13800
  Probeset Number=SeqID_15393
gttatgaatataaagcaacatcttgcttgattccacgcatcagattccgtgtaacttatggacaaaacaagttaacaaggaacacagcaaataagcaaccagccactaccgatcgacgaccggggtgcctgtgtgtctacttcagtctgcacacactgtgcgagaccgagagcacaggtctagcaggtagctagccttccctcaagtgggaaggggtgggctctctctgttccatgacaagtacgaggggtctccaagcgccctttgtcttggtgacgtataagatgaccaaggccacggcgagaaagaggc

SEQ ID NO: 991 - DNA, 492 bp, Zea mays
  misc_feature (455)..(476): n is a, c, g, or t
  misc_feature (478)..(488): n is a, c, g, or t
  misc_feature (490)..(490): n is a, c, g, or t
  Probeset Number=SeqID_15394
ctcctggggggggccaacgtaatgtcttaggcggcaagaagggccccgtaataaatccggcgcgagcgttcccgcccgccgtggtgggcccccgtcgctggagaccccaatgggtgtactggcgtagggcccatggtgggcaacgacctgtccggggtagtttccaagcacctatttgccggttcggccacttaggagcagaaagaggccgcacccaggtgcggccgccctccgtcgggggtagaggactacatgcatgcaggaacatcaggacgttgttttagtccccgctcctcggaatcttgtcaaaaaaaaaaaacaccttgcatgcgggcccaaatagccatgtgtcggggtgggtcaagagtacccctaatgtttcaggcaagcactcgtcccgtcttcttcctatgaccgggtttggttcaaaaaatctggctgttgcgctgggtgtnnnnnnnnnnnnnnnnnnnnnntnnnnnnnnnnnancc

SEQ ID NO: 992 - DNA, 305 bp, Zea mays
  Peptide Sequence Number=SeqID_13801
  Probeset Number=SeqID_15395
ctcgtcttggttttctcgtcttcttggtggactcagtgctccactaattttacacacatactgttgttggtacatgcgcgcgaaactgcacagccatattggacctgtccccccttttcgtacaggagatgatgccacgtgcctaatattatgtaactagcgcgatgtctgatcgtgcggcctgatgctcagcgatgacactaacatacatgtatggcactgagacgctagccgagtcaactcttcactgacgtgcgtcaagacccctatcacaatacactgctgtgtgctctatgcagacaaac

SEQ ID NO: 993 - DNA, 956 bp, Zea mays
  misc_feature (809)..(956): n is a, c, g, or t
  Probeset Number=SeqID_15396
ggacagacttaagcaatggacttatgtttctcttttcttttatttatctaatattaacaattgaacaagcaaactgatccttttacaggtacttatatgtgctaaggcatgacactaattgtgctgctatacaagtttcacctgaaatgctcatctccttgtcatgccttatgttgcagcagtttattagtacttgtgtgattttccatctgttacgtctaattgtgctgctatccaagtttctcctgaaatgctcatctccttgtcatgccttattgcttttgcagtggttgttagtacttatgtaattttccatctgttgcgtctaattgtgctgctatacaatattcgcctgaaatgctcttctccttgtcatgccttattgctttgcagtgtgtattagtacttgagcggtttccatctgttacgtgtttgtgtgttagtagcaccagccttaagcgctaatgattacccattagttgatatgatttccatgccggtgctgtatatacttttatctcttcggtcttagcttcatgggtgtgaaattacgtttgcagggcactcaaagaagagaaaattgctgctcgtagtgctatactgccgatgctccaagctgaagaggatgaaagatttgtcaaagactggaagaagtatcttgaagaggaggcgaggatcatgaaagatgttccagggtggaaggttggcgagagcgtgtacaattccgggaaatggatgcccccggctactggtgagctccgccctgaggtttggtaagggcctgttgtagacattgagaatgccatcannnnnnnnnnnnnnnnnnnnnnnnnnnnnnnnnnnnnnnnnnnnnnnnnnnnnnnnnnnnnnnnnnnnnnnnnnnnnnnnnnnnnnnnnnnnnnnnnnnnnnnnnnnnnnnnnnnnnnnnnnnnnnnnnnnnnnnnnnnnnnnnnnnn

SEQ ID NO: 994 - DNA, 785 bp, Zea mays
  misc_feature (20)..(20): n is a, c, g, or t
  Peptide Sequence Number=SeqID_13802
  Probeset Number=SeqID_15397
tagctgatcttgttcatccncagtctgagctcgaagtagctcgtaggatgaccataacccacgaggatgagaactcggacaccatcgacaatgtgaagtcgaagatccaggacatggggggcatgcagccggagcagcagcgtctgatcccggccggcagacagctggaggatggccgcaccctagcagactacaacatccaaaaggagagcaccctccaccttgtgctccgtctccgtggtggtcagcaagtcatgggtcgtttaagctgccgatgtgcctgcgtcgtctggtgccctctctccatatggagggtgccaaagtatctgctgtccgcgtcatgcctcgctgtcagtagctggtttaatatatggtaccgtttgtgttgtgtgtgcgtactacccagaactatgtaccaatcatgaataagtttgatgtttgaaattaaagcctgtgctcattctcttgacattgatagagctcgaggcatatgtgaaagactcctcgtggcctccgcacactcaactctgtttgggccctacttcttagcggcgaatagaagagaacgttctacaagaaccggcgttatagcaacaagaaggcttccgcggagtatgctctcatatatgaaaatgatgctggcaagaaggaaattcagctgcagcttgatattatgaagaagtatgcttctgttatccgcgtcattgctcgtacccagattatgggggtgcagggtttgaagcagaagaaggctcacctgatggagattcaggtcaatggtggta

SEQ ID NO: 995 - DNA, 630 bp, Zea mays
  Peptide Sequence Number=SeqID_13803
  Probeset Number=SeqID_15398
cgaggatcgtatcgatcaacttcaagacaactgcacatttaagatgtcggacgtagaagataaccagcccgaggtccaggaggaggttgaggtttcggccgatgccgcctccaagggccagatgtcggttctggacgctctcaagggtgtcctgcgcctgtccctgatccacgatggtcttgcccgcggtctgcgcgaggcttccaaggccctcgaccgccgccaggcgcacatgtgcgtcctgaacgaggcctgcgaggaggatgcctacaagaagctcgtcatcgccctgtgctccgagcacaagatccccctgatcaaggtccctgacggcaagcagctcggcgagtgggccggtctttgcgttcttgaccgcgagggcaacgcccgcaaggttgtcaactgctcttgcgtcgtcgtcaaggactggggtgaggagtcgcaggagcgctccatcctgctcaactacttccagaccgagcagtaagcggatcgactatcggagttcgagtcgtttgttcgattagatacgatatacgatgcgatacgatgcgatgcaatgcaacggaacctgggatcgggatagatagggcaccaaaataaaagcaaaatttctatttccgaaaaaaa

SEQ ID NO: 996 - DNA, 452 bp, Zea mays
  Peptide Sequence Number=SeqID_13804
  Probeset Number=SeqID_15399
gcccatgctcgacgagccactatgggtgggacgccctttgcatacctgattggcacgggctctacgaggataaggaacagctatgctagaggcatctcgccaagcacttggtgatgcataccagagccggtgtgacaccatggaggcaataaacaatattcggcacagcaggctaaacattgaccgtacaggacgacgaggcacatcactgggtgccccagagaattctgacctgggaagagatcgaacaggaatacaatgtctatcgtcgaatagaacggcaagatgggagctttgaccttcaatcggagggtcaccgggccaacgagtgcctagaaacagcgtgccacaagaacactcaagatgagcctcctaactgacataccggcccttgagtctgatcgagacattcttttccccctcataagataactgcgcataccaacatcgga

SEQ ID NO: 997 - DNA, 358 bp, Zea mays
  Probeset Number=SeqID_15400
tcagagggagcaggatcctgacccagtaaatggtagcagggggtattctgcacaccagagcctaggtcataagccactctccaagacaatgtgcatctcagcgcagcaagagctggttcaaagacctagatatctctatctatgtatcatcagccccatagctcagcagaaactgagatggaggagcatgtatgtagaatcactaaacgcacgggtggagaaggcactgtgccggtgctgcacggagaccaccgtgggaataaccacatggacgcacgagcctggcttgtacggaaagcggtcaggtaacagaccgaacaggaagcatgatatgcccaccaagcaagtctcgcacaat

SEQ ID NO: 998 - DNA, 353 bp, Zea mays
  Peptide Sequence Number=SeqID_13805
  Probeset Number=SeqID_15401
gatctatcgacggatcgcggttatgtttctagcactcacaagaatgtcgcggaagggaaacgtcatgcctcttcatcatcttaggctcaggtgtagcgggtacacaatgacgatcgtagtggagccacggtgcttgatccagcgctgggtggagctcacacgtaacgtgaggcagcggtcatcgcagaggagatccgggcttgcatgcagagcgaccccagccgaagaccgagcacgaggtaggtcgctgccagtctgagggagtccgtgggtatctcaccggctagctgggagtcccagtctgtccctgctaggttgggcctacctgcagatcctgtccgctagagctctgg

SEQ ID NO: 999 - DNA, 338 bp, Zea mays
  Probeset Number=SeqID_15402
ggtcctatagtggtcgtggagcgcgcattcaccagcccggagctcgtaaacgccaggccttcagtgagaagagcagtgtataattcggtaaagtcttggacccgtgaaggaaatgtgatcaaatatatggaccttgtcctcccccggtgtcttctacctccagtaagtggaataaatagggtgccagtcctgtacgccgtggttgccctccgtttgattggagcgccatctgctttgcgcgagttatgagacctggtctaaaggatcagtccggtactccttgttgcagcgtggccctcggtcatcttgagttgaaagcggtaattcgacaccgaaaa

SEQ ID NO: 1000 - DNA, 399 bp, Zea mays
  Peptide Sequence Number=SeqID_13806
  Probeset Number=SeqID_15403
acaaaatgatcagtctgctaacaagcatctgtaggtcaagagcatttttagccagttctggaattataatggggcaatcgtatgcccctaatgtgagagaaatggggtaaattctgtggacaaatataatggcccatttacaggtggatctttatcctggttgtgcatacgcaagcgtcaaatcctatgtgggacctgtactggtcctggcttattgggtgaatttctaagcacttgcgatgaacttgtgcaatagtcatcggtttagctctttcgacgaaactgcgcaatagtcatcggtttgatttatgtttaagtcacattgagggacccatcatatatgtatcgtgttccatggacccatagtcccattatataaaataatatttttaatgaaaa

SEQ ID NO: 1001 - DNA, 873 bp, Zea mays
  misc_feature (1)..(2): n is a, c, g, or t
  misc_feature (832)..(873): n is a, c, g, or t
  Peptide Sequence Number=SeqID_13807
  Probeset Number=SeqID_15404
nnctcctgttcccgcgctgctctcccgctgctcctcgcgtccctcctcggtcccgctccgcctcctcacctcctctcgcacgccggccggcttccgcccgcctccggccgtcgcccgctctgtctccgtctccgtcgatgcgccggcggccgccacggagccgtctgtcttgggcgcgccctccccgatgtccgcgccgtcgcctcatcctcctccgccacggggagagcaccgccgggggccgctccactagagatcatgacagacctctaagcaaggctgggagagctgacgcaatcagcggttctaataaactccaacaaatgggatggataccggagcttatcctctgcagcgacgcaatgcgtacgaaggaaactcttaagatcctgcaagagcatgtccaaggattgtctgaagcagtagtgcacttcatcccaaggttctactccattgcagcaatggatggccaaactgcagagcatttgcagaaggcgatctgtgaatattcgagtgatgagatcttaaccgtgatgtgcatggggcataataaaggatgggaagaagcagcctctatgttttctggtgattcagtagcgctcgagacatgtaacgctgcgtcgcgggcggctgcaggcaaatcatgggttgaggctttttctgtggctggtctggggggttggaagcttcatggaattgcaaagccatgaggtgtaactaaaagctaggtgtaatttctgtcgctgttcctcaattcttgctaacttttgcgtagcttgtttttacgtgccactgaagagcgtggattaatcgatgagatctatgaattctnnnnnnnnnnnnnnnnnnnnnnnnnnnnnnnnnnnnnnnnnn

SEQ ID NO: 1002 - DNA, 835 bp, Zea mays
  misc_feature (47)..(48): n is a, c, g, or t
  misc_feature (86)..(87): n is a, c, g, or t
  misc_feature (105)..(106): n is a, c, g, or t
  misc_feature (191)..(192): n is a, c, g, or t
  misc_feature (220)..(221): n is a, c, g, or t
  misc_feature (297)..(297): n is a, c, g, or t
  misc_feature (321)..(321): n is a, c, g, or t
  Peptide Sequence Number=SeqID_13808
  Probeset Number=SeqID_15405
ggtccgtgaattcctcgtggtcgactccacgtcgtctcgctttcatnntcctgttggagggggtccttactcaaacttcatgtatnncagaaaaactctttgcannttcggtgcgtgcgagcaagtattggtgccatctctgcaaccagggtaccctcagtggtcagaaaatctttgtctgagggctccannagatatgcttctgtgatattcggacatnncttaggaaatcgagttcctgcagaatatatgccctcggaaattcgcaaaactaccagtccatcaatgccttgcatnggagatacatctgtggcctcaagnagaggaaacgctcaacgatccccttcttccttttcggattagcccgttgataatccaacctcgaataatgtaaggcataccaaacatttcttcgaaaccctttttcaagtggtccccagatgtgatgtggcgaaggattttctgggctcgaccctttcacctcggcggtctcagtctattctcattcgccatgtttgcgatagctccaaatcaattgggaatgtcccttgtcaggcatttcctttctttcccaagtggctcatccatgatcaagaccgcccggcccttataaaacccttcgccccagggtgcaaaaacttttaaaaactgcacagttttgtagttgtacataagttaaacaggttttggggggtttcttggcggcgggtttaggggttaccaccaatgttataaaaccctgtaaatcttttatggttgcaatggtgattggaaaaaaaagcaccccctgttgtgccccatggaagaaaaataaaagagatccggtgatggtccc

SEQ ID NO: 1003 - DNA, 431 bp, Zea mays
  Probeset Number=SeqID_15406
ggccattgtcatgacgatgcccgtcgtagctcggattacgctctagtgcgagctggtaagatgcgatcgttgcaggagcggaacattaagaagggggagagggagatggaggaggcgcgcaaggaagatgagcggaaggaggaggcgggggacaggaatacccaggagccgcagcaaggtcaaggcctcagccgtctcactcgccaacggcagcgacagcggcaggtctggaatgttgccgatgtcgaacccttcagctaatcccacacagcttacaattgtctatggtggatcagtatgtgtgtatgaactcggtgccaccagaaaaggccgagacgagcatgcttatagttgtggatgtaactgatctgatggccaccaaatgcagcgctgtcactgtttttaagatttcaatggtacatacagccact

SEQ ID NO: 1004 - DNA, 468 bp, Zea mays
  Peptide Sequence Number=SeqID_13824
  Probeset Number=SeqID_15407
cctttttattttatttatttttttattattgtattttttattatttttttattataaattataatttttatatagtaatatatattagatatacttttttaatgtcatcgaaagcttggaaatgcttgaaagagagatcctggttacagaagctaacgttgagtacagacagtaggcagagattcggattccaacgtgaatggaatagcttcacctacccgttcgtataatccgctcctcacctcgcaaggagattaggggggatggagtggagatcacttggtatactcgcgccacgcatagaaggggtcaaaatagatggctcggaagccggtgaagcatcaggcgttgacgcagaggtggcggaactcctcctcggagagctccctccccccccgtccggtaggccccccccagtaagatgtcgttgtaaagaagagtcctagtcctggtgatgctgtcagtcta

SEQ ID NO: 1005 - DNA, 295 bp, Zea mays
  Peptide Sequence Number=SeqID_13825
  Probeset Number=SeqID_15408
ccggggatccctgtgaagcctgtactagtcgacctgcagcatgagggtctgccccctcttgttcatttgataataggcattctttgctgttcttcaaagctgggtgtcaagaaaatttatgactggatgtgtagttcttttgccaattgctgtcacattcttcatcacttggtggtttatccaatttgttgatggttttttcagcccactctatgcaaaactggggtttgacatatttggtaattgtttatcttttattggtggtacttcttttgccatgatacattactaaaat

SEQ ID NO: 1006 - DNA, 391 bp, Zea mays
  Peptide Sequence Number=SeqID_13826
  Probeset Number=SeqID_15409
ggggcccctccttcttcccggggggaaacatccggggacaaaacccttctcaaggcgcctgggggctccaattcttttgggagaccgcgggctctaactctttccggagaccgagggctcgcagcagggatgcgaaagggaggccgggagcttgggccccgtcgtcccaagatccggataaggcgcgctcggctgggaggaccaagccccagcagagggggcaccagttggtctgggtccttttgtatcaatttggctgcaaagtgtcttgtggcccttcaaaggacatagattgttggcgggcaaccaacccccaagaaagtatcttggatggtttctaaaaaaaaaaaaacccaaaaaaaaaaaagaaaggggggtaaatatatataaa

SEQ ID NO: 1007 - DNA, 720 bp, Zea mays
  misc_feature (1)..(70): n is a, c, g, or t
  misc_feature (671)..(720): n is a, c, g, or t
  Probeset Number=SeqID_15410
nnnnnnnnnnnnnnnnnnnnnnnnnnnnnnnnnnnnnnnnnnnnnnnnnnnnnnnnnnnnnnnnnnnnnntgtggctcatcagagagtgaatcgcaatcaagttctgaagttgagtctgctgacagtgacaactcacactccaaatcaagagaaagaaagcataaaagctcaagttcaaaggaggagggtagaactacttttgattctggagatgagtataacaaggatgaaacatcgaatggccatggtgttgagcaaggcaactggagtgctgttggggaccttcggcatccgaaggtcctcaaaaacaggatttaatagtgtttctggagtataatgtgtgaacaggtatcttcggactcaagtcaggcatcacagtagaccagaataatacgaaggttggtgaagcgccgaaggtgtaagcaggaaagcttcggcgagacagcagcagttgaaaccgacttaaagatgaaaaggctatttagacctcgacagattactataggattattatcaagtgtaaagggcattaatgtaattttgcacgggctgcatcccgtgcctataaataggtgaacagtactcccgtactgttcacgctgacttggcattcgctttttgcgtcacgcttgtactatcatctccttccagttgaaggtacacttgtaannnnnnnnnnnnnnnnnnnnnnnnnnnnnnnnnnnnnnnnnnnnnnnnnn

SEQ ID NO: 1008 - DNA, 1012 bp, Zea mays
  misc_feature (885)..(1012): n is a, c, g, or t
  Peptide Sequence Number=SeqID_13827
  Probeset Number=SeqID_15411
tttttccccccatgtttcacagaaagtgaagacgcgagtggtcaagaagagcatcaatccggaatggaacgaaaaactcaccctctctattgaagaccctgccgttcctattagactggtacgccttcgcttccacctttccttcccgaactctacaagtattctgagcaaacgagtaacagaggaaataatttactgctagctagtagtaccaatctattactcgtcttccttgatatgtgcaggtgtagctgttagttgttatatgtacaatcaattgaacgaaacattcgtgagccatatatgtttcgtactacagtttttttaaaaaagattaaagttgttctgtacggtgagaaaatcacgtctctcctgatgtaatattagtgattatatatgctaactcagcatgcggtcactaccgaatgacttccatattatggaaattaactttgtctattcttacatgcacacttgtaatttgcctatgccagccaatacagttcagattaagccatatttacggtgttttaagcttttacgttgcacgcatcagtttcgtgagcctgcctgtggttttgataattgagctgagtccatatcaaggtttcccaacaatagctcaaagagaatataggatgaagggttcactggatcaacaatactatcatgctttaatttacttactgaactgcagtcaatactcaatgctacatttcagcgagaactcatgctcgcctatcaggtgaatctctgtcattctgacatattatatccaaaataagtcctaaacttcatataaattatctatcattgcaataaaaagctaaagtatgtgcatgaattgtcctcctctgtttgtacttaaaacactaaataaccccnnnnnnnnnnnnnnnnnnnnnnnnnnnnnnnnnnnnnnnnnnnnnnnnnnnnnnnnnnnnnnnnnnnnnnnnnnnnnnnnnnnnnnnnnnnnnnnnnnnnnnnnnnnnnnnnnnnnnnnnnnnnnnnn

SEQ ID NO: 1009 - DNA, 284 bp, Zea mays
  misc_feature (238)..(238): n is a, c, g, or t
  Peptide Sequence Number=SeqID_13828
  Probeset Number=SeqID_15412
tcggaattcggctcgaggaggtgtttgaatgcgctagagctaactgtgtctataaattagttagacatccaaacaccgttatcgtatagtttaactattacctattttaaagtaaattagttaatagtaagctatctatttgttagctagctaattttactagtaattttttagctaactaactattagctctagtgcattcaaacaccctctaaactttttcatggctttaatccanaaaaaaaaaaaaaaaaaataatatataaatatataaatattatttt

SEQ ID NO: 1010 - DNA, 280 bp, Zea mays
  Probeset Number=SeqID_15413
ggggagaagggcaatcccaaccttcagggatcaaaggtctggaggggcccatttacaacccaacttatgaaacgtttgttcatgggcccttgccatgtcacatgaacgtcagttcaagataacccggttatccgccaagacatacataagctacaggttttttcaaccgaggcccgggttccgggccccccgagaaggggcccaactgctgcaaggggcctggttgggccaacacttcgggttcccccacactatgaaaaccgagtcccccctgtggaac

SEQ ID NO: 1011 - DNA, 541 bp, Zea mays
  Peptide Sequence Number=SeqID_13829
  Probeset Number=SeqID_15414
ccacaaaaaaagtatattctccacgcacgacatttttagaataattgttttttttctcgacctgtgaattaaaggaaatgcccccattaaagccaatgcaaattaaaataacgcacacagataaacactgatctattcattccaagaaaaccgaggccgaggccatacagtctggggcgcatcgcatctttaacatcttacacgggtcgtaagagatttaattttattcggctgctgcagaggaagcatgccgcacaaactgaagatggccgcacgaccattgaggagctcagatctggcccaagatcacctccgcaccagaaaccttaaagagggacggtgcttcctcaacattgaaagacttgggctataccatcgtcaacaaaggcggtccacctgttgagaacgggacatccgccaagcaggggaaaggtctattttcaagtacaagccttcggggcgtactgccataaaagtcacccatagaactcaaatggattctgtagcgtctagcttttttgcccatccatccaggacatac

SEQ ID NO: 1012 - DNA, 485 bp, Zea mays
  Probeset Number=SeqID_15415
gtcctcaccatcctgcccgcgccctggacttgcacactaccatcgcaagcgagctcggtgcgggcggattacccgattgcctgccatgattctggcgagccactcgcctctgctcgggcactccagcgaatcgcttgagttggggactggtcacttctacttctaccgacggggggctgcaaccggtcgccgcatgtgacatggcagcgtcaccgcccgaggggccctccgctcactccgcctgattacggtccggagcactgctcaaggccattatcggaaagggaattctgcagctgcgcaggcagcattgctaggcagacgtgctctgaaaacaagcagtatgctccaggagacgataccctacagcactgggaccagtcacgagcgcctgagaacttacagaacttacaggcgaggttctgggctcactaccatggacaaccttcggatattcccgtgacggaccctgatatgggcatcca

SEQ ID NO: 1013 - DNA, 403 bp, Zea mays
  Peptide Sequence Number=SeqID_13830
  Probeset Number=SeqID_15416
ttacacgcgtacggccacgcgagcgcccacgcgttcgcattgacgcgtggtcaccggccgatgcaccagcatctgcacggagcatgacgtgccggtggtggccttcacgtgcaaggccaaggacgaaacccagctggccttcacgctgtcgctggccctggggcggctcggctggatcgtgtcgcagtacacgatggcggccaatctggagcacatggccgtgctcctggtcgcgggccgggaggacttgcggcgcccgctggtcgagaggttcctgtcccacgttcggatggcgctggaggagctcgaccacgccggccagggcgggcccgtgcccaggatgcggctaaccattgagctcgggccttccgtcaggggctcacgttaggaggccttcgccagg

SEQ ID NO: 1014 - DNA, 386 bp, Zea mays
  Peptide Sequence Number=SeqID_13831
  Probeset Number=SeqID_15417
ttttgggggctgtgctattgtgtatgcaccctttgacagctatggacgatgggctgctgatcttagctgacgtgatcagggacccttggttgctgttgagggtcgtggctctacttgttacgctctcctgactgcacatgcaagaggtgtggtgattgtgcaacctgggctggatggggacacagggcactgtgtttggcttcatcttagacccgacgagttacctgtttaggggcgcgagaaaagggctgctacatgtgtgcggcccaacaatgaaactacagtggtggttgacgaaccttgagagctacagttaggatgactgcttagtgggtatccaagacgatgagatagagtgggttactcctgcaagcatgcgtatgtgc

SEQ ID NO: 1015 - DNA, 402 bp, Zea mays
  Peptide Sequence Number=SeqID_13832
  Probeset Number=SeqID_15418
cgtttaactcggtggttgccagaacgaagaacgtgatcgtctcaggcgactccactccacaaccgcattgtgttgacctggagaactcagtcaagacttttgttgtccagatcgcaaagaccatatccatgattggcgcagagggacggttcggtgagctctcgatgttcgaccggcggctcctgtcctcaccagagtcggccaagttcgcctatgagtggcaagatattgcactgctctacatggaccaactttaaatactgctcctcttcaggtagctaggaacttgcgaattatattaaggccggcctgacctcactctctagcaagattcagatgttctaatgttcaatgctctaccataaaaggttagaggctgctgggacatgcttcccatgacag

SEQ ID NO: 1016 - DNA, 433 bp, Zea mays
  Peptide Sequence Number=SeqID_13833
  Probeset Number=SeqID_15419
ttgatctcagcgatacacacaagactttgtggtggctgtctcagatgttgatcctaactttcacagtgacgacaatgtcatgggagaggccgggcttgatgacccatacctgtgaagtcgcaagcagatgtagccatcaagtgcttttgatgaggatgagtagttccggatggtagacgatgccggagatgatgatgaagaggaatattcattgagtaccagtgaggatctaggggagccacagcggcataaaaagcttgtaactaggcgccggtgaggtacgatgctaagatcagctggctggatcctatcaggtcttaaacgctgaaagtgctgttctactgctcgcatgaactattggcaatgtgattcttcggacatggatacagagcctcgaaaggcaaggaaatctgacgcatcagatactgatgct

SEQ ID NO: 1017 - DNA, 429 bp, Zea mays
  Peptide Sequence Number=SeqID_13834
  Probeset Number=SeqID_15420
tctccctcttgccgtctagctgagctcgactcgattctggccttcgcggaatggacggctagccttgggtgaccaagtgggctagctctttggggtccacgaagctgacgactgtgggcatctgtgtggcgaaggttggtcacattgcaaccactgctgacgagaagacgaagtcgcggaaggagacttacaggagttccaggactacgacgagttttaggtgtgggctggccgatccccccaatcagctgcctgtgaaggtcctatcttatactgcgttgaacttagcactgtcatttacctgtctagttggtgactatgcggatggctctgactctgcgacgtaatcaggctatactctgttatgtcattattcgagcactgtgcgacgatgagcatttatgggatcagctgggacgtgaagtctga

SEQ ID NO: 1018 - DNA, 265 bp, Zea mays
  Probeset Number=SeqID_15421
ctgcagctttctgtggaaagactaagctcgatgaagaagtatgtctttggcttgggatctgctcaggtgctggctactactgctgctgttggtgtgatagctcattgttttgccgcactaccaggaccagcagcaattgttgttgggagtggcttggctctgtcatccacagctgttgtcttgcaagtacttccttgaaaccacacttgtttatcaaactctggcctttaagcatttagtgttctgcttttctaggtattgcaag

SEQ ID NO: 1019 - DNA, 529 bp, Zea mays
  Peptide Sequence Number=SeqID_13835
  Probeset Number=SeqID_15422
aagctcgaattcggctcgagttcttctccaggcacatttcttttccaaaggttgccatggccatcaggccggttcttttctcctgcttgccaccatggctgcagagacagacacgcttgccgtggcgccagtctctgcaacggacctgccatccggtgtcgcatccatcacgtccaacatcccaaacccatggtcggccttgcagaacctcacggtctgccacttgcgcgagcagcagcacggcctcatcaaggtcaaggactacctatcccgcttcggctacctgccccacgagtcgtccgggtcgttcaacgacctcttcgacgccgacctgggggaggccatcaacgtgggccaccgcaacttcggcctgggcatcacgggcgtgatggacgcgtccaccgtggcgcacatgatggctcacgcggcgcggcgtcgccgacatcatcaacggtacgtccaccatagggcggcgggtagcccctttgatctttgtaggaggaatgcgcgcaccacttggaccgttttt

SEQ ID NO: 1020 - DNA, 994 bp, Zea mays
  Peptide Sequence Number=SeqID_13836
  Probeset Number=SeqID_15423
gtaagctcggaattcggctcgagcgactctccacgcaacctctaacctcttattacttcttgcctacccctcaataccgccaagatgggtttggtggtttcgaaattgctcgaccgactatggggtaagaaggagatgcgtattctgatggtcggtctcgatgctgccggaaagaccaccattctttataagttgaagctcggtgaaatcgtcaccacgattcctacgatcggattcaacgttgagactgtcgaatacaagaacatccaatttaccgtgtgggatgtcggtggtcaggacaagatccgtcctttgtggcgacactacttccagaacacccagggtatcatcttcgttgtcgacagcaacgatcgtgaccgtatcgtcgaggcccgcgaggagttgcagcgtatgctcaacgaagatgagctccgtgatgctcttctccttgttttcgccaacaagcaggacttgccgaatgcaatgagcattgccgaaatcacccaacaacttggtctccagagcttgacccgccgtgcctggtacatccaatcaacttgcgctaccactggtgacggtctgtacgaaggtttggaatggctcgccgagactctacgaaagactggacgtgattaattaatgattggatgagagtgagactccggtggccctttgcatctgtttctctctctagttgtgcctgtgtcgtgtgtcttagggaaatggacgagttgttgaaaataaatattactttcagactgaaaaatggtcttgaggccccctccttcaaaacacgaagcaaagtgaaagagtcggtcagttctgtgatggctttggcagaattacaaaagacttctttgctagggtccatattcgtgttctcttctataagacgactctttgtaatttttacctcttgtctgtgttttcattttgttttcttctcttgtttcttaccgctcctcagatcgatgcctatccattcttctaaaaa

SEQ ID NO: 1021 - DNA, 196 bp, Zea mays
  Peptide Sequence Number=SeqID_13837
  Probeset Number=SeqID_15424
ttgatgttgcacatttgtctcttagattatgccttcgtgcagagacccttgtcagttctgtgtgcaacatgggctgtagcccagtcatgcatcaagttgcaccacatttggatcgaacgctcgcgttcttcctggcaccgttgttgtggtcctccgcatcccataaaatcgccgcctgtttttaatcaaaccaaaa

SEQ ID NO: 1022 - DNA, 239 bp, Zea mays
  Probeset Number=SeqID_15425
cgggattcggctcgagccggaggtccgactgcaagcgcgttagcccgtagacccatggccatggccgccgccaccgttttagcgtttactgcccgtggcgctagggctcggtaagcccctctgtgccgtcagctacgcgctgtcgctccgggccgtcgcgggcgcgccctgtcgttggtcggccagggccaggatggcagtggacacggagcagtccagacaaaaaaaagcaaaagaac

SEQ ID NO: 1023 - DNA, 350 bp, Zea mays
  Peptide Sequence Number=SeqID_13838
  Probeset Number=SeqID_15426
ccaactttttgtttcaccatggagatctccatgagtgcctcagaactgtagcgcagagtcctcagttccaaggctcccaggaaggccgttggactgtactgccaggaaagcgatttagacctgtgactggatagcaaccgttattagcatctgcaatgagcacgggagcacttttacatggtactcatgccgtgccattgactagagtaacagtaccctcgtgctgtgggttcttctgtggcatccccctcctgcaagttgctggtaacctccctatcctttgtaccttgggcccattcagcttccgagtttgtgtgtctgattgcactcatatgtcctcagtttatctt

SEQ ID NO: 1024 - DNA, 365 bp, Zea mays
  Probeset Number=SeqID_15427
gtcatgtcacccaaggaatccaaagttgacccccttccgagggtccctcgtcataatattgtccagccagtgaactttgccaccaggaaaaacctcaaagcattctgtaaagtagtgcaacaaacttgtccagtaggatctttcatcaaaccaactgctggggaaacgcctggctatgcttcagaggtcattttccccgacgggccattcataaatggaagcccaagcgacctgtcatgtgatgggcccttgaaagatccatatcccgtcttttgccagggaggaacacattggacccagtgggcccttgtccttggaatggtggatactcaccccgtctcagtttataaggctttataaggcgt

SEQ ID NO: 1025 - DNA, 326 bp, Zea mays
  Peptide Sequence Number=SeqID_13839
  Probeset Number=SeqID_15428
ctcttcctgtctgcgtgctacacgagatgctaggccacggctagcagtcctagtgcgggtacattgtgcatctgagtattacgagccgagcagtaaatgtcaagatactacacgttggggtccacatggggcagctcaggtcggtggtctcggcgcagcagacggagcacccggtccggcgcggtgacacaggcgtacaagggcaggcgccacatggtagctgtcgtcgacgtcgatctgttcaaggggatcgggctcaagttcctggcgatggatcacctgctcgtgcaccaccgggagcaccgcggccgccgactagaggactc

SEQ ID NO: 1026 - DNA, 769 bp, Zea mays
  Peptide Sequence Number=SeqID_13840
  Probeset Number=SeqID_15429
cagagttgtcaattcacaagtgtccactgcttatgtttatcaccaacaatgagctaggacaacatggcttggaggaaaatgtaatgaagatagacaacctgacatcaaaacttgcattgatgtgggatgtggattcaggttcatgtattaggagagcgctatcagaggactgttcatctctgaagcagattattatgacactaatggatgacgatatatcaaagcacctccaaatcattgaaagcagtctagaggaaggaggagaaaaggtatggataaaagaaacatcatgaaaccatggctctattgccatgagcagaggctaagtttcacgtatggtagggccatggagatgccactagttataccgccaggactctgagagtccatctgtttgttcatgcagtattacaaatgaagccatagctgtttgccttggtggccccacttcactgaggaatggagaatcgtaatataatatggaattaactacacttccaacaaaaggagtgtttgagcatttagcaaagcttgacaggttgtttgtaagtggttgtttgtgtctcagatcactgggtggcctacgtgctgctccatctctttcctttattaactgttgggattgtccttctttagagctagcacgtggagcagaactagttccgtcgaaccttgatagatacctcaacatccgtggctgcattctttcagctgattcattcattaacggcctgctggaccttaaatacctttccattgatagctgcag

SEQ ID NO: 1027 - DNA, 2312 bp, Zea mays
  misc_feature (1)..(83): n is a, c, g, or t
  misc_feature (2312)..(2312): n is a, c, g, or t
  Peptide Sequence Number=SeqID_13841
  Probeset Number=SeqID_15430
nnnnnnnnnnnnnnnnnnnnnnnnnnnnnnnnnnnnnnnnnnnnnnnnnnnnnnnnnnnnnnnnnnnnnnnnnnnnnnnnnnnattggtttaattccaagtaatttatgcacttaccttaagcaaactagttcaattctgcacttatatatttgctttggtttgtgttggcatcaatcaccaaaaagggggagattgaaagggaaatagggttaaccttttcccagtattaattttggtggttgaatgcacaacacaaatattggactaactagtttgctctagattatatattctacaggtgcataaaggttcaacacaaacaaatagaagattgaagttagggatcaaatttaaaggagcaaagaaaccgagtgtgctctggtctggcgcaccggactgtcccggtgtgccactgaactgtcccggtgtgccaccggagcaacggctatccagcgcaacggtcgactgcaatggcgcctcacgcgtgaacagtgaagaacagtgcatgcagagtcagatccgcagtgtcataggcgcaccggacagtgaacaagacctgtccggtggcgcactggactgtccggtgccacttgaagacaaagcctccaacggtcgactgctccaataccctaacggttaggtgacgtggctggcgcaccggacagtgtccggtgggcgcactggactgtctggtgcgcccatcgacagcagccttccccaacggcttgttggtggttgaaggttataactacccccaaccaccaccacttcaagcatctaagatttctgagtatcacattcattacaagagctctagcattcactcctagacacaattcaaaagatcaaagcctctctaagtccccaattcatctcaaacacttagtgccttgtgagagagtgattttgtgttattttgagctcttgcctcttggattgccttcttcctttctcatttattttctcaagtgatttgtaatcgaggcaagagacacctaagtgtgtggtggtcctcgcggggtctaagtgacccaggagattaaggaaaaggctcactcggtctaagtgaccgtttgagagagggaaagggttgaaagagacccggtatttgtgaccacctcaacgaggactaggttctttagaaccgaacctcggtaaaacaaatcaccatgttcatccgctttatttcttggttgatttgtttttccctctctttcggactcggatttaattctaacgctaaccccggcttatagtgtgtgcttaagtttataaatttcagattcgccctattcaccccccctctaggcgactttcaggtaccccacacgagggtcaagcacctcggtcgattaactccatagagagctggggaccttctccacgcacaagtggtgctctgcttccgactcctctcggacactccccaccgtctccactatcgagctttcagccgaaacgccgcgaatctcgttctctccagtacacggtggcgactgtgacacaaactcggttgtcacagtcttacaagactctcgccccactcggtacaattacaatggctcgcgcaagagccgaggggttgtgtggtttttctaaactcactcaactaactaggattcacctagagcaagcgcataagcggtgtaactaacttaagcccttcacaaagcacctacgctaatcatcgaatgattctattaagcacttgggtgtaggagcacttggaaaagtctacaatatgtcttgatatattgcttgggctcccacacctccaaatggctggttggtcgggtatttataacctcccccataattctagccgttggacggaaagctgactgctttgtcgtcgggcgcaccaaacaatctggtgcacacatgacatgtctggtgccctgtccacgtcagtcgaccgttgaggtctgtagaagtcgatcattggatccgaccattgcccagactgtccagtgcacactggacaatccggtgctacagcctcgtcctattttaggaccaaataaccaaaaccacttgaaataccatttgtacatataaaattttaaatttgtggtgtttgttgtttgatatagttttcattgctttggtccctaaacttctccccctttggcatcaaccaccgaaaaggaagacattaaaagcatgtaggaagtaaataaaagcttgtcctcaaaagattactccccctaaatgagtattctcctttagaaagagtttttctccccctttagagatgaaggaaagctccccctgatacagatcttaggaaaaagcatgtgaaaattagan

SEQ ID NO: 1028 - DNA, 497 bp, Zea mays
  Probeset Number=SeqID_15431
gagcttactagtcggcggccgccctccttttttttttttttttttttgtttcaatagctttttttaattttcatgaaacacttttgtatgcagacaggaatctccccttcttttattcaaaacggtttagttcaaaaatgaactacgacttgcaggcgacaaatatttaagaacggaaatagcactaacctaaggatacatgacctttgcgcgctcaacacaagaccaagtcactcaaacatgttcggtgtccaaaagacgagaacaaggttcctatttacatgctttcggttattcatcaccacagggagaatttgcgcatggtagaccaccataggaccctaagcttggtcagggaggctgcttcaggagtaaagaaagatcatgtaagggtcagtgagtctctgcatatctaagaggtacttgtcgtccttggtcttgtaaagctgttggtgcccctcaacctaaataggtacatcccttcgtgtttatgtgtt

SEQ ID NO: 1029 - DNA, 221 bp, Zea mays
  Peptide Sequence Number=SeqID_13842
  Probeset Number=SeqID_15432
gatcattgaaaaataaatggggttatgaaagactgtgcatggcagggcatacaacggttaataatgatggcgcagcaaggactagcatgaacttgcatctgattggctttttgtacgatcacactcagtttaattcaaaggactagggttcgggagttacgaactttgggtgacactgccacctaaactggacacggtaggcagaagcccaggcttaacct

SEQ ID NO: 1030 - DNA, 1545 bp, Zea mays
  misc_feature (1)..(1): n is a, c, g, or t
  misc_feature (790)..(790): n is a, c, g, or t
  misc_feature (815)..(815): n is a, c, g, or t
  misc_feature (817)..(817): n is a, c, g, or t
  misc_feature (840)..(840): n is a, c, g, or t
  misc_feature (856)..(856): n is a, c, g, or t
  misc_feature (993)..(993): n is a, c, g, or t
  misc_feature (1000)..(1000): n is a, c, g, or t
  misc_feature (1009)..(1009): n is a, c, g, or t
  misc_feature (1026)..(1026): n is a, c, g, or t
  misc_feature (1029)..(1029): n is a, c, g, or t
  misc_feature (1031)..(1032): n is a, c, g, or t
  misc_feature (1040)..(1042): n is a, c, g, or t
  misc_feature (1044)..(1044): n is a, c, g, or t
  misc_feature (1047)..(1047): n is a, c, g, or t
  misc_feature (1049)..(1049): n is a, c, g, or t
  misc_feature (1054)..(1054): n is a, c, g, or t
  misc_feature (1058)..(1058): n is a, c, g, or t
  misc_feature (1066)..(1066): n is a, c, g, or t
  misc_feature (1076)..(1076): n is a, c, g, or t
  misc_feature (1078)..(1078): n is a, c, g, or t
  misc_feature (1087)..(1087): n is a, c, g, or t
  misc_feature (1090)..(1090): n is a, c, g, or t
  misc_feature (1096)..(1096): n is a, c, g, or t
  misc_feature (1113)..(1113): n is a, c, g, or t
  misc_feature (1118)..(1118): n is a, c, g, or t
  misc_feature (1120)..(1120): n is a, c, g, or t
  misc_feature (1122)..(1123): n is a, c, g, or t
  misc_feature (1126)..(1126): n is a, c, g, or t
  misc_feature (1128)..(1128): n is a, c, g, or t
  misc_feature (1130)..(1130): n is a, c, g, or t
  misc_feature (1132)..(1132): n is a, c, g, or t
  misc_feature (1135)..(1135): n is a, c, g, or t
  misc_feature (1143)..(1144): n is a, c, g, or t
  misc_feature (1531)..(1545): n is a, c, g, or t
  Probeset Number=SeqID_15433
ncaaaccctgcgggactacggttacaaattaaccaaagtccctttgctatgtgacaatgagagtgcaatcaaaatggccgacaatcccgtcgagcatagccgcactaaacacatagccattcggtatcactttttgagggatcaccaacaaaagggagatatcgagatttcatacattaatactaaagatcaattagccgatatctttaccaagcctcttgatgaacaatcttttaacaaacttagggggagcaatctatgttatatgaaactatgattatgcttaattgatatatcttatgatcatattcctttttatgtctatgactaatgtgttttcaagtccatttcaaaccaagtcataggtgtattgaaagggaactggagtcttcggcaaagacaaaggcttccactccgtaaattcttcctttgccgtcactccaagcatctctccattctttggggagaaagcatgagcaccaagcaaaaggactccatctttggtataatcttcactcatttatttttaaccaaagagggagaaagtattacaaagggctctaatgattccgtttttggtgattcatgccaaagggggagaaagtatgagcccaaagcaaaaggaccgcaccaccaaataattttaaaaattggagattttcaattggttcaattggtaaatttcaaattagtatcttattgtgttcaaaagggggagaaagtagtatttctccttcgcatatatcttattcattttctttggactcccttgcaaaaggaccctcaatanaatttacaaaaaggatttgcataancnaaacatgtggtcaaatgtggccnatatgttaaaaacaangaaacaatccatgcacatcatataagtatttatattgctcaattaaagaaatagcaaaaccctcttgaacactatgaggagaatctcattaggggggttttgtttagtcggaggaaaagcatttgctcagcggtccntgtttgnggcctgtcnggactccccaaacattnttntnncggaagcnnnanctntnttttnggancctcctcnctcttacttntngcgtactanaantactcnctctctctttttttgtntgtanancnnacncntntntantttgtgtnnctagtaaatttcaaaacttgaaaatgcttctcaaattcttattcatttacctttgactatttgcaaaaggatttttgaaaagaatttacaaaaggatttgcaaaaacaaaacatgtggtgcaagcgtggtccaaaatgttataaatataaagaaacaatccatgcatatcttatgaaaatttattggttcaattctaagaaacctttgcacttacaattatgcaaactagttcaattatgcacttctatatttgctttggtttgtgttggcatcaatcaccaaaaagggggagattaaaagggaattaggcttacacctttttcctaattgattttggtgggtgaattatcatccacagataattggactaactagtttgctctagnnnnnnnnnnnnnnn

SEQ ID NO: 1031 - DNA, 979 bp, Zea mays
  Peptide Sequence Number=SeqID_13843
  Probeset Number=SeqID_15434
aaaaaaaaaatgaaaagaaaaaaaatataataaataaaaaaaataaaaaataataatgaataaaaataaaacaaaaataaaaatagaaagtaaaaaaaaacaaaaaaaaaaataaaaaaagaaaatattaaaattataaaaaaaaaaaaaaaatgggatgaaatgaaaatatataaaaataaaaaaatgaaaaataataaaaaaaatagaaataaaaattaaaaaagaataaaataaaaaaaaaagacaaaaaaataaaaaaaaaaatgataaaaaaaaaaaaaaaaaagaaataaaaaattaagaaataaataacaaaaataaataaaaaaaaaagtagaaaaaaattaaaaaaaaaaggaaaaatataaaaaaaaaaaatgtgaaaaaagaaataaaagtataaaaaaaaatgaaaaaaagataataacaaattgaacaaaaaataatttcaaaaaaaaaaaagtaactaaagtcaatctaaagaaaaaaagatgtgctgacattcagtagaaaaaaataaaagcttgggaatctccagtaaaatcctaaatcttccaaaggtccgaataattccgaaacagccttaggtaagtttatagagctcatgaagagaaacagattgtaagatatgtaggggagtactggcaaaggtcaacaattgtcttggtgctctctcgcagcaagctcaaaagaatttgtttcattttagtgtttttctttgggatgttcatgtacttgaattttgggtccagaggacatagcataagatgctctgcaactgtaccatgaattgaagtagtgaactggttgaatttcttgagaataacatgttatcaaattgcacggtacagtatgcgcaggttatgctcgcgaatttctggccggcaagtaaagtggtgagcaccagtagactagttagtatagagataaaggatggccatgaaggctggtcagtggatacttctgttgttccaag

SEQ ID NO: 1032 - DNA, 530 bp, Zea mays
  Probeset Number=SeqID_15435
atccagatcttgcacagaccagactacgagcatgatgctccagatcctgttccagcagtatcccgtcttctggaaagtcagtatgatggaagccaaaccagtcattgcatttgtggagttggagaacgacggccagtccatggtggctatgcaggctcacaagggcttcaagatctcgccggagagcgccatggatatatcatatgccaaaaaatgagacccctcgcgtaaatccctgaacccaatacccataatattttccagttcccgccgtccgagaatcgagccacagtatctagtcgactttccggccatggatttagggcagcgcctgcttcatttacaagttagactctagccacttttgagacctgtgtttcggagctcagtgcctcattttgagactgcctagactcttgtcttagtcagtgaattgagccgcatacataggccttgatggtttgtgccgaattggtaggctagagcgattcctaaccggattgcttgtctaatttatataaactttgatt

SEQ ID NO: 1033 - DNA, 431 bp, Zea mays
  Peptide Sequence Number=SeqID_13844
  Probeset Number=SeqID_15436
gccctcctccgatgaacaaggccatgggtgcccccctttgcgggctcacctccccaaaggagatccggttcccgtttttagcaatgttaagtttgccaataataattagtggccccccatggtttttcggtcccaggaataggccccgcccctgcccgttggctggtttccaggggggattccgggtcccctgttgttttgtggtggccccccccttttttcccctccctttttttggggcccattgatttccccccccccctaaatcccccttgcccgggccccccttttgttccccccctttttggtttttaatgtggccccttgggtccgtttaaaaaaaaaaaaaaaaaaaaaaaaaaaaaaaaaaaaaaaaaaaaaaaaaaaaaaaaaaaaaaaaaaaaaaaaaaaaaaaaaaaaaacccaacccc

SEQ ID NO: 1034 - DNA, 586 bp, Zea mays
  Probeset Number=SeqID_15437
caagttcctggttgaggtcaagtccgggcaggcggatgccaccctaaccccagaccatggagctccgggggttgaagcccaacttcgactggtggaagaaagatttcagtggccgaataagggggccaaagatgttcttgaccaagctcgggaacggcaacgagtcttcgcccaactccgtgaagcggaaatggtggggcaggttgaccccctccaagttttcgtgagtttgttatgtatcctgattggtaattcgtagatggcccggttttttcccccccggggtggttctagcttcctagggtttttattttccggggggtcgtgccttgtgaaagtcgagtgtgttgggctggagttgtgttccctggagggcgagttgtatagtttttccccaagggcttcctttgagggggggcaggggctactgaattgtgaggtaattccctgctgaagtagttgtcgaagcgggaagattgtgccatcgccccctattcaaaaccaaaaaaaaaaaaaaaaaaaaaaaaaaaaaaaaaaaaaaaaaaaagaaaaaaaaaaaaaacacaaaaaagaaaaaaaaagaaaa

SEQ ID NO: 1035 - DNA, 852 bp, Zea mays
  misc_feature (1)..(55): n is a, c, g, or t
  misc_feature (771)..(852): n is a, c, g, or t
  Peptide Sequence Number=SeqID_13845
  Probeset Number=SeqID_15438
nnnnnnnnnnnnnnnnnnnnnnnnnnnnnnnnnnnnnnnnnnnnnnnnnnnnnnnagagatttttgtgccccttatccatcttgttagagacatcgagagagagagagggtgagtgcgtcggtccaggacgatgaagaacaagtaggaccgccgctgcgattcttcgttccaggaggaacttgggcacgaatgcagacacgggggcttggcgtggtgggagggaaccgtacctggtgaggccttagcgtggggggcgggtcgtttggaggttgggatttctcaccggaggtgtgtcgccgccgcggagccacggagctaatgggtgggatcccctgctgcgccactagcaggaagccacaagctaggcattgtctgccattctactgattttgggggcatttagctaaagtgtggcagtgaatttcaatttcaattggcaacaaatagctaaagtgtggttgaacttgtgttgttgaacttgatctgtttctttttatgctaatgctatttggtttgtgaactcaacttatgtatgaacttattctatatttgaaattcttggctttttgtttcggtcacttttttttttacgaattataaattgtcgtataaattgggacagaggaggtacaaaacattctttttggggcaagaccgagactcacttgatagtgaaaattcaactaagccgtcttagttccagcatcttaagaaaatacaacatgctccgggcagttcaagtaccgtctttcaggaatctgcagcatctnnnnnnnnnnnnnnnnnnnnnnnnnnnnnnnnnnnnnnnnnnnnnnnnnnnnnnnnnnnnnnnnnnnnnnnnnnnnnnnnnn

SEQ ID NO: 1036 - DNA, 477 bp, Zea mays
  Probeset Number=SeqID_15439
cagcaagtcaaagccatgagtgtagctcctacaggatatgttccccatttcccttatcaagttttataccaccgggggggatttgttccatttgggccgcccaagaaagccgcaggaaaaaaaagtgttccaatccctgcccctttccctgggatggcaatgtggcagtggctgcctccgcccatggtgggcccaactcaagacccaaagctttggccgccaaatgtttaggggcagagctagctgccttggggtgttgactccccgggccgttttatgcattggggggcagatcaaagtgtcagttagtaggtccctggaaaggaggaatcaagtctcgcaactcgggtcatgtttatgctgtaccagttgcttccagcagtggtcatcaacttgttttgttttattgaagggtgaggcatgtaattaatatgtgggtcttacccccccagcgggcaaaattgtcctttgctgcct

SEQ ID NO: 1037 - DNA, 549 bp, Zea mays
  Peptide Sequence Number=SeqID_13846
  Probeset Number=SeqID_15440
aagggcaaggtgccggtggactggtcccccgcgccctttgtggtttcctaccggggttactcccccaacgcttgggtaaacgggggggctttcggcggcggcggcgacaacgggtggatgagcaaacagcccgacaaccccgagtggggccccatccggtgggccgaaagcaactacatgggctacaactattgcgacgacggctgggggttcccccagggcctcccgcccgagtgcacccccagttaagctagctgattcccccggtttttgtacgctcgggggggtcccctgacgacacaccccttgttggtttgttcttgctggacatcaaacatctctaaaggcatgattcttgttctgttattgttaaatcgtgattccaaaacttgtaattgtaaaaaagtgtgtgggcccgggagtaaatccctgtagttttaatttgcttgtaaaaaaaaaaagggttttttttttttttacgcgggagctaaagattgggtcttttttgggtaaaattttttcaatggatttttatgcatgtaccccgcc

SEQ ID NO: 1038 - DNA, 536 bp, Zea mays
  Peptide Sequence Number=SeqID_13847
  Probeset Number=SeqID_15441
cacggattagcggctacagctgtttgagaggcgtgtccactaactaccttagccagagaattagaaccttgtttgattgaaaccccatccgcaacaaatgtttcccaaaatcatctagcttcctcggcctaaagaatatcttaccaagaccatataagcccatgccttagtaaattctcctgttaactagttaattgaacaaagcttatatataaatattagtcagttggtcatatgtgaagataacttgtgaattttctttgcccaactttttcagacgacccctcctaccctagcggtaccagaagatccccatgttgaaactccgatgcaccattgggtgggtcaattgtctgaaaatggtggggttagcccccaaaactcaaattttgaacggcctggtggtggtggcccccaaatattgtctgaaaatggtggggttagatcccccccccttaaggcagatcttcatttctttgcttgtagggacccgttttttggattgttaacgggtatgacccttgttgttagccccc

SEQ ID NO: 1039 - DNA, 1066 bp, Zea mays
  Probeset Number=SeqID_15442
accatgctgaagcttcgattctttgagagtagtggatattaattctatcccattgcaacatctgtgcactgaggtttcgatggcttgagcttggcttccacgtcattgcaagctatttctgctagctgggctttggatcctcctcctggccctcctcgttgctgctgctacgttcgttggatggaactggagtagagtactcgatcctgctgtagatggagctaatatatgtggatggagctagcttaattcggcagtatccacgaacgaaaattccaactgcgcaggcattccgcccgcctcattacgacatggatcgtcaccgtcggcgccatttccccttcctcctcgcgctcgtgcttctcgcggccctgagttcatcatcgcgaggggcggcggccgaagcatcagccgacacctccacaccactcaaagctttcacctggggaagcaatttcagcggcggcagcctgtaccaaggcaaccgtgacaccgtcgtccgtcggctcgtctcaggcccagccacctctggcggagttttcttcaactacagctccagcggcgatgggcccgacgtcgtctatggcgtcgccatgtgctacgccgacagccagtgggacgactgccagcagtgcctgcacagggcgctctcgtacgttttcacgcagtgcttgtacagcagaagcgcggcgatcatgtacagcgactgcgtcctgcgctactcccacgatgctttcttctccaacgagacggagtgggggcatgtgttcaacgtatggtctaccgcgttcgtcgacgacgcggccagatggaaccagacccggtggacgatgatgaaccagctcgccgcggaggccgcggtctcgatgccgcggttggcgacagggaacgcaacgtataaagacgacggcacggacatggtgtacgggctgctgcagtgcaggaacgacttgtcggcgggagaatgcagcaactgtctcagctcgcagctccagtatctgcttggaagtttccctaacagcgttaacacgtatgtcagtgttaagggcttcaggggtaccgagct

SEQ ID NO: 1040 - DNA, 260 bp, Zea mays
  Peptide Sequence Number=SeqID_13848
  Probeset Number=SeqID_15443
tacgctcagcgtattcggtactcttgccattgctctatcactgactcctttcgctttgttgctttgctttctcgacccgtttcacctctctcaaaggcaagctttcagttatccactgaatttagggataacacttaaaacaacatgtgaccataaacgccaaaaaatcgtcattaaaccggataaaggacgtattgctgcatttttttcatagactccttccccctctctagacattacaaaaatacgactctttaata

SEQ ID NO: 1041 - DNA, 347 bp, Zea mays
  Probeset Number=SeqID_15444
gctggcgggccccaggcagtaccgcccaagaaacgaaggggcagcagtggccaaacaggagcagaggcagcagcagcaagtaggaccaatgagacagccagctggtgtgagccgtaggcccctcgtgatacaacgccagaggtggcggagctgccggcccgctgcgcctagcggcgggcaccgtctcccaagggcagcgatggcagccacccaaccaacgtgggaggaccaagcctgcagcggtcaaccagccacccgatcattggtggtgcctccttaagagttcaatatgagggatagctcaataataaagacttctgtggtgatgaggggcgctgcccaggaat

SEQ ID NO: 1042 - DNA, 620 bp, Zea mays
  misc_feature (601)..(620): n is a, c, g, or t
  Peptide Sequence Number=SeqID_13849
  Probeset Number=SeqID_15445
cgaacgagacctcagcctgctaactagctatgcggagccatccctccgtagttagcttcttagagggactatggccgtttaggccccggaagtttgaggcaataacaggtttgtgatgcccttaaatgttttgggccgcacgcgcgctccccttatgtatccaacgagtatatagccttggccgacaggcccgggtaatcttgggaaatttcatcgtgatggggatagatcctgtattcttttgaaatttgcccgatattggatgtctgtttacggagagcgcacgtgcaaaacttgtatgttgtactcgcggatgaagctgaccctgtgattttggcgatgggtaaaaattggccatcgcgtctgtaactaaatttccacgttgcgatgcaatataagctgtagttctgtcctcgcactactatttaccgtttgtgctgcatatgtgatataacccttcaagaaacccccccccgaagggtttgaatgagcccggcctttgttgtttgcttcttataaaaaagaactgttttttccaaaaaaaaaaaaaaaaaaaaaaaaaaaaaaaaaaaaaaaaaaaaaaaaaaaaaaaaaaaaaaannnnnnnnnnnnnnnnnnnn

SEQ ID NO: 1043 - DNA, 967 bp, Zea mays
  misc_feature (1)..(59): n is a, c, g, or t
  misc_feature (741)..(967): n is a, c, g, or t
  Peptide Sequence Number=SeqID_13850
  Probeset Number=SeqID_15446
nnnnnnnnnnnnnnnnnnnnnnnnnnnnnnnnnnnnnnnnnnnnnnnnnnnnnnnnnnncacgcgtgaaggcaagcgaagacggtggcggcgacgcgagattccccactccggcgtcgatggccaccttctccccgattatccctgcatcgcttcgagttggagaagacgagcttccaccgtcttgggaccctataccctctcctttaggctttgcatctgtagatcacttctgctattactatctcaggttttgaacttagaagccctagcaactcggtggcaactggtaacaacagcctagaattgcgggttgttggagatgtttgtatttttaattcttgatcacgatgaggacagtgtaaaaagttgacaaattaacattgttggtggtaactggtagcagcgactctgttttattttcatgcagtgtatttcctaacaaggtactctccatattgtgtgggggacaaattaacataacgctacatcattgtgaaaaaacgaagaaaatgttcaggagttgctccaaggtcatttgaagaactgtcgggtagcgttcaggatggagcctgaaattttaaaatacttggcaagttatcttaaaagggaggggttggtccgtgatacaaggattaaggatgaggaaaagttaccatttttcttatacatgctcagccataatgcctcatttgaagatctaatagctagaatttgctcacagtggtgatacatatcatcnnnnnnnnnnnnnnnnnnnnnnnnnnnnnnnnnnnnnnnnnnnnnnnnnnnnnnnnnnnnnnnnnnnnnnnnnnnnnnnnnnnnnnnnnnnnnnnnnnnnnnnnnnnnnnnnnnnnnnnnnnnnnnnnnnnnnnnnnnnnnnnnnnnnnnnnnnnnnnnnnnnnnnnnnnnnnnnnnnnnnnnnnnnnnnnnnnnnnnnnnnnnnnnnnnnnnnnnnnnnnnnnnnn

SEQ ID NO: 1044 - DNA, 569 bp, Zea mays
  misc_feature (2)..(2): n is a, c, g, or t
  misc_feature (34)..(34): n is a, c, g, or t
  misc_feature (526)..(530): n is a, c, g, or t
  misc_feature (537)..(544): n is a, c, g, or t
  misc_feature (565)..(568): n is a, c, g, or t
  Peptide Sequence Number=SeqID_13851
  Probeset Number=SeqID_15447
gntgatatggagttccaaggtattgttactttgngaagatgcccctgagttaatatctgatgcaaataagctgcccccccgaactcaagaagtcctttccagttgtcatgcattggtatttgtcgcccccaagctggttggtgatcccctcgaaaaggctgctataaagggcatagactgggtctccccatctgatgagaaggccatgtctaaaaggcctgggggtcctcctgtccagattgggcccagggccccttttgcttctcccttgaagagaatgtctgtttttgcccgtattcaggaaaggttttccgctttccttaagggggcccctgggcctacccaagagggattagtcgatttccccgcggcatatgtggggccatataagaaatccccccggccgggttcccgggtcttggctcttgcatccaaattgcttccctgagatgcctgttagtgaagctagaagtttggagggccttggaattgttgtaatatatgagcgctgccttccttcctttcnnnnnaaaaaannnnnnnnaaaaaaaaaaaaaaaaaaaannnna

SEQ ID NO: 1045 - DNA, 552 bp, Zea mays
  Peptide Sequence Number=SeqID_13852
  Probeset Number=SeqID_15448
tccgacgcgtacaagctttaccatctaagggcgattttttgctatgaaatccataaaactggggagacgatctagctttcctttacagggcccattttgcccatcttatgagtgagtatgtactataattaagcgtggcacattccattaacatcgccgccactgctaaaaccttcgagttacccaactaaattggcttgaagaacatcctactttttccctgtgggaaaatagtaaacaggcccaatcccacacgaccttcccaaccggtggccaaaactgaataggccattgggacgccccctgagtgaggctcacttaaattcattgggtgtggcgtgattcgcccattttgaccggtacaattggcagcgccctagtgcctccaatgatattcgcttacttcccttgcgtaggcggcacgtgtatcgggttctcctccccatctttaaatactgggttccttttatgggtccgatttatggctttaccggacctagaccactaaaaagttgatttaggggattgcacacgatctgggccatacccctg

SEQ ID NO: 1046 - DNA, 325 bp, Zea mays
  Probeset Number=SeqID_15449
tcgggaacctgttttgcacactaatactcacaagaaagatgtccagggccagcgcactgacggtcccttagaggcccaatagcatagggcttaaagggtacttggagaggatgacgagtggtcagaaccacatggactgcaccgccattgctcctgagatcctccctcagatcgggaaatgggggccatcatggcggtgctctgactactatgagctttgtgctgctactgacagtttggggtgagagaagatgactgggaagggggggcctgcagaggtgtacaacggacagacagctgatggacaattagtggcagcgaagag

SEQ ID NO: 1047 - DNA, 593 bp, Zea mays
  Peptide Sequence Number=SeqID_13853
  Probeset Number=SeqID_15450
tttcaataatttctttttgatcagatttctcccctgcttcctccatcctctcgcgtctctcgcactcccttcgtttcctctcctccttctgccccgtggacttacgatcctgcccctgcgtgggtcccaccatctcagttcgtactttgtgttcgggctctccttttcttttctttgttttccttcatctgctccgcagcgagaccaaaggagggttgcagaaagaaaaagctctgtgcctctccgtctgtcctgtcggacggctcagctccgcgctggcgtgtctggaggcgaagcgcacccgtcgatatgtcgctgagcgagaagctggaggccgcgcgtgtcgtcctcggcaagcgcaaggagcgcgagcgcgagctgctgcaggcccagccgctcccggtggcggctagagccgagccgtggaatccgggtccggctcgcgcggccccctccgccgccgacgccgccgccggcgaaaacaagctcctggccgggcacctggcccacgagttcctcgcgcacggaacgctcctgggtcggcggatcgagcccagccgcggagccccagctccggctccggcaccggcgcg

SEQ ID NO: 1048 - DNA, 578 bp, Zea mays
  Peptide Sequence Number=SeqID_13854
  Probeset Number=SeqID_15451
ctagaagggggctaccccaccccagtgtgtgccccctttgcgaccaagaagaggaaacaatacaacatcttctcatctcttgcgtctttgcacgacagttctggtattccttgttaagcaggtctgggttgcctaacctttcaccagataatgctagttgcagccttgatgactggtggagcagggctgtggagaagattccccgtgatctccaatccggcttcaattctctagttattcttggcgcttggagcctttggcgtcatcgcaacgactgtgtgttcaatgggaggtcgccgtgcctggcgagtgctctcaccctcgctggcgatgagctcaggatgtggtgtagtgccggggcgagagggctcaacctgctttcaactcttatgtttatgcttgacccagggggatagtctagtggcttgttcagagtggttgtgtgcggttgctgtgttgcgtcttgtgtcgtgttgtgtcatgtgtgtgtgtcgtgtcaggtgtgtgtcgggttgtggtgtgttgtaccttcttctacctattaatggaatgatacgcagatctcctgcgtgttcgag

SEQ ID NO: 1049 - DNA, 1423 bp, Zea mays
  misc_feature (1)..(1): n is a, c, g, or t
  misc_feature (657)..(657): n is a, c, g, or t
  misc_feature (698)..(698): n is a, c, g, or t
  misc_feature (1415)..(1423): n is a, c, g, or t
  Peptide Sequence Number=SeqID_13855
  Probeset Number=SeqID_15452
nagtcatcttcttcctgcccatacggcgagcatcggcggcggcgacccaagcaggttgacctcgccccttcaccgaccagcgggtcgtacagcaagccgatccaattcctccggtgagttctcctgttactacaccccttccggctttggttctcggcgctgtgttatgtgatgtcggtctgctcgagagcagggatagatacaccatccgcccatacgcctgaaatcgaacttgctactaaattgccagtaacactgagcgcgattatcgcacccacctacgtacatagaaattgatctcacgtactgttcagggcctcggcgtttcacttcgccatttcgttgaactgctggaagacacgtcggtgcacactagatttggattggggagaggagaagcgacagctttcggatgtgcaaatgtgcctaggttggtttcaaacataggagtatattcagtacccatttattaccaattcgtaactatcttcttcgacttattgtattcaagggaccccttgatatgttagacaaaaaagaagaagctacattaacaaatatcgaaagcctgtaaaatcttttaccaatagatggtgctgataaggacgtagtgatagatttcctacttgtgtatgggtacctcctcagacatagcanaattaaagcctggtccagctatgcccaaagtacaaatgtgnttgggagaagtgaggggcgcgtgggcttgaggaagaacttgtatcagtggtaaagatattatggtttcgggacccattgcttgcactcttacgtccacgttcggagtagcgcgtcgtgccgcaggccgatggaattgcaccgtaaataaaggttgataagctgtgaggttgaagctagagacgccgctgttttaagtttcttcaaggacaagggaacattaatgtcacctaaagtactttcctcgatggaggttgaagctggttttgctggcgatggcgtcggttcaaataatggaccacaagacatgtggtcacttggcgagatagatccaaaaagagcaaggttcccgtgctgcattgtctggactcctcttcctgtagtttcatggcttgctccttacatagggcatgtcggaatctgtcaggaggacggggctgtcttggattttgctggttcgaatttggtgagcgtggataattttgcttatggttcagttgccagatacctccagcttgacagaaagaagtgctgccttcccgttaatcttgcagcacacgtatgcaagcagtcctacaaccattcagaattaggagcagcgatttcatgggacgatgctttgcgatcgggcatgagacgctttcagcacaagtactacaacctgttcaccttgaactgccactcgtttgtggcgagctgcctgaaccggttgcctacannnnnnnnn

SEQ ID NO: 1050 - DNA, 310 bp, Zea mays
  Peptide Sequence Number=SeqID_13856
  Probeset Number=SeqID_15453
gtgcaagcccgggtcgtcggtgctcaaccggttggcggtggacgtcgggtacaacttcttggggcgcaactcccgcggcccggacgtcgcgttgcgcgtccccccggcgtcgttgttggaggtcggcatggtgtacgtgctttgacgaggctaaaacaatgccccttttttttatgaacatttgatccagtaatcccgcctgttttcagtcttcccagtaacataatgagcccgttctgtatagcttaccctttttcacctgttcggactgttacagctccaatatatagagtcaaaatcctgtagaatt

SEQ ID NO: 1051 - DNA, 416 bp, Zea mays
  Peptide Sequence Number=SeqID_13857
  Probeset Number=SeqID_15454
cccaactgctcgtttgggatttaggaagtgggcccccccctttgatttcattttgaccccacaggggtttgtgtctgttgacaaaaaagccccgatcacccaaggccttatcagcaatttaatgtttggccctgtcccgggggccataaaagtttgggctcagctggggccccctgttgacatctcagtggccgctgatgcaaatttggggggcccaaagctttgccagttttaataagcttgtatggatccgcaggtggggctgcaatgggtagcttgtaaaaacttaaaatgcctgggcttttgaacttttaaattgggcctgtattgctcgggcttgagggcccaaaaagtaaactcttgggggggggggactgttgtgttttgcaagaataaaaataaatttttgttggtcc

SEQ ID NO: 1052 - DNA, 446 bp, Zea mays
  Peptide Sequence Number=SeqID_13858
  Probeset Number=SeqID_15455
ccagccagctgcaaaggactcggctgtggtcctcttttctcccaagcccaagaagcagaacgcccctgcgaagctcacccccaagtttgtgatgcgcaaggagttccgcaaaatggccaaggttgtgaaaaaccaggttagtgtcaatttttacaggcctgttttgaccaagccagctcttgttaggttaagctcggtgtcccccagcctccaggttgccaagtccggtgtcaaaaaaaaaaacaggcagtcctaagcgctaagtttgtgttttgtcagggggcatgttggtgcttgtagtcccagcttatatttatttatgttcccccagtttagacttgttagaattgagcaacccatgttaagatgctgctgtgtgtcttcccttaaaaaaattcccttgccctttgtgattactgtctcgttgctgtgggtcattctatgcc

SEQ ID NO: 1053 - DNA, 747 bp, Zea mays
  Peptide Sequence Number=SeqID_13859
  Probeset Number=SeqID_15456
cctagcgtgcgctctctgtgtgtcggcgcgacgactaggcggctgctatccggccgtcgacgccgacgcccgccggctgattcccaggtatctatcttctggaccttgaccggcgacgagcacccaacaatttcaagctgaaataatggtacggaaaaggaaatcaaagtacgagtggccccaatcatgcttcacctaactggaaaaacacaactgatggagatgcactaattacaccaagaaagaggtgctgtagatagcgaaaatacgagttcataggtctaggatatgctatcctgcttatatcagtgcttgcaatggtaatattataggtttatggaacgttattagacgaccacttgtgtaatgattcttggaggtgttctctttttcttgaaacgcgaaacaataactcttcttgttgcctgttgatattctatgtattgagcgagatgctatgttggatggctcggattgcttttgcgcctcaacttatctctcttttctagagatattctagtgcagttcctaagggacagtgctgaccttaaaaaattcaatggttcttccaggtactctcagcgaagctcaggtctacaaggcactatcttttaaaaatctcagccatcagccgattgcacctcccaagccacttatgctcaaccttcagatcgagatttttcatcaccaccgacacaacaaccttgttaaacactaaccattttattttttagcaaagtgttttct

SEQ ID NO: 1054 - DNA, 533 bp, Zea mays
  Peptide Sequence Number=SeqID_13860
  Probeset Number=SeqID_15457
gcaagatccgcaaccatcagtacagtgctgcaatctggttctggcgcaagaatagggctcaggtgctcaggcccctccaatgggtgcacgttctgtcagacggtcacctccaggagctgccgatcccgatgccgcagcgaagccatcctaggacaggcaggctgccatggttgatggtcctcttttctcccattcgtgggaatatccccctttgcgaagatttgtcgcccgctagttcattttcttcttctcagccaccttttaaaaagaccgaagagagtataaaatgggctaaggagcccatggcagatgattgcatatgtctcagcattagagggcagggaggtcaagcttctacattccatttcactcaaggaatatataatgtacgtttaggactgttaggttgtaaatcgtcacagtgtctatgtaatgcttcttcttggcatgccacactatatagtactaatattgatcctttcactggcaaaaaataccctattaagatctttttcattgagacacgaaccaat

SEQ ID NO: 1055 - DNA, 742 bp, Zea mays
  misc_feature (1)..(115): n is a, c, g, or t
  misc_feature (716)..(742): n is a, c, g, or t
  Peptide Sequence Number=SeqID_13861
  Probeset Number=SeqID_15458
nnnnnnnnnnnnnnnnnnnnnnnnnnnnnnnnnnnnnnnnnnnnnnnnnnnnnnnnnnnnnnnnnnnnnnnnnnnnnnnnnnnnnnnnnnnnnnnnnnnnnnnnnnnnnnnnnnnttttatcagaaccaattccagggtggatcatgaatgaacccttgccgactcagagaaccctgccagtttacctccagcaacgatggcttctgcaagtgatcaacggagcaatcaagggaatgaagataattctagcataggtgaaggtcatccaataacttcccgtaacccagagaaaggccagagctctgataccccagctgaatgaagcccccgctgataaaccctttcttgcgtcaatggtcccagcccattgctgggagcattatcgatgcgttcgtcataaaattagatttggacagttgtggcgcttgtgctgtgatcatggtggttcgtgtatgtatatgcactgtatatatataggtttgtgctaatactactgctgcggcctgtatatttggccagttgccgacttgtcaccggttgtggtcagtagtaacgttacctctggtaactgatgagtggtaactgtgtttgttaccacgtagtttgggagcgaagaacttgagcggttcaggtaaaagacttgtcgcgttacaaattgttgaacttatccgatgtagggttgcattgcatagttggactgctatgctttcgagannnnnnnnnnnnnnnnnnnnnnnnnnn

SEQ ID NO: 1056 - DNA, 634 bp, Zea mays
  Probeset Number=SeqID_15459
cgtcgacctcgagaacagaagacctattaatcaggggaatttttcagcaactatgagtagtgggagtaatttattttccggaagctttaggactgtaggttttactactccgtttaacttttcaaatggatcaagtgtatttacgttaagtgctcatgtcttcaattcaggcaatgaagtttatatagatcgaattgaatttgttccggcagaagtaacctttggggcagaatatgatttagaaagagcacaaaaggcggtgaatgagctgtatacatcatccaatcaaatggggttaaaaacagatgtgacggattatcatattgatcaagtatccaatttagttgagtgtaaatcagatgaattctgtctggatgaaaaacaagaagtgtccgagaaagtcaaacatgcgaagcgacttagtgatgagcggaattcacttcaagatccaaacttcagagggatcaataggcaactagaccgtggctggagaggaagtacggatattaccatccaaggaggcgatgacgtattcaaagagaattacgtcacgcaaccgggtacctttgatgagtgctatccaacagatatgtacggacaaccggaaattcagagatcggtgcctgcaggcgta

SEQ ID NO: 1057 - DNA, 304 bp, Zea mays
  Peptide Sequence Number=SeqID_13862
  Probeset Number=SeqID_15460
ttttttttttttttttttgaactgaagaacacctaataataaccaatcccaacacaatcaattcatacagctaccgtcagtacgagaatgcacaacaacttaaaatcagcaaacatacagcaacaccaagcaaacgaacaacaatccagggtacatcatcctgtgctggttgtactgatcggctccttgagctgatttttattcttttctaggtcgactattattataataataaatgtgatcatgcattggaagtggtcgacaacgaatataaatctatctaaagcaaaaaaaaaactcgtgc

SEQ ID NO: 1058 - DNA, 433 bp, Zea mays
  Probeset Number=SeqID_15461
ggccccgccttctgctcgcgccagtgccagtcgctttgaccccagtggtgccagcagctcagccaggtggaccccctgctccggttacacggcgtggccgcgcttggccccccggtctctttgcaccagcccatcctcataccgttcaggtagctaggttcagcaagtcgcggttcgttctagcacacagcggcaatgtgtgcctttgcagccagcagtttccgggtccctccgctgccctcgtcggtgtcccccaattgatgccctttgtccctgtagtttagccgatgccctacagccttcgttccagtccaacacatcattgggggtgcctctattttagtgtcgagtctatcagccgtggttgccataagtacaagttttttggatgacgtaagtggccaaccagaatataaaaagttacatgtcctcc

SEQ ID NO: 1059 - DNA, 1060 bp, Zea mays
  Peptide Sequence Number=SeqID_13863
  Probeset Number=SeqID_15462
gctagtatggtcccactagcttgtgggtcactactgccaggaggaacggcatatgatgaagtgcattcggacatatactcatgagcatcatcacgtgctcgcgttggcctaccatgtccaactgatctgccatctggtctataacgtgcatgattacaacgaggctcagtattggacaggtatacgtatgggctttcggatccgactggaacacagcgctcagctattgacaggtatgcgccatcactcgatggaacgaacacatcacgatcgaggagctccttgcctgagcagtacccgttcggacaacctggatcttccggtggcggatggcctcatcactgatcgctggaacttggtccttagatttgaccagcagacgtgcaaccgatttcttgagtccggtggagcctaaaacctatctacggtctaactttttggatcccactagtcgtttcttcctggcgcctttggtaaaaacatcccctgtgtcggccaatacagaagtgtagtgttcatttcctacaaagacagaagtgtagccttcaacccttttgtttgatgtggatttcggtgtaagagcgtatttgcaagagtacgtttggtctaggttagtatattaggaatacaattcccaagccgttgggcggtgccaaagtttaatactaaacgtttgggtctgtcgatgagaaaaaagggcgagtgggtgagaagatgctgccctccgcagaagtcgatcagaccggttcctaagggggtcgttgtattagagattaacctgagcccggtcagaaccggtttggtcgatttgggaacctggtagggccggtattttttgttatttgcagtctaactttctaaattaggtcgtattggtttgtgttggactgcgccacggaatcctttcaagtttatataaattttttgtattttttgtaatccttagtgttttttgtaatccttattggttttctaaattaggtcttattggtttaagtgagaaacaatccggttagaaatcgtttcgatccactaatcctaaacaatggattgacacctt

SEQ ID NO: 1060 - DNA, 560 bp, Zea mays
  Probeset Number=SeqID_15463
tacactgcccacgcacacacgccattacattcaaaccaaacgctacacacgccacagcacatgcgtcctgacgtctgcctccaccgcaatggtcctgtttaggtatcggccgtgacatgctcttggtccacgaccacgtttttagtccaaattcttatggctgtttaattccttttctcatggtagtataaatgccaggtcctgctctgtggtttgcttggcatccctccattccttttcctcagtctcccatgcacacaagaagtcttgctgtccttaagtggcaggttagtgaaattcaaactggtctatgtggtttgctgatgtaatcagtttccctcatacatttccatctcttaagtttagttggtaagcaaaaagatggttgatactgccaaggagagcgtaggaagaagtgctaccagtttggaaatctatggcaagatggaagaagttttcatcgaaatggatagcgaacggaacatgagtcttttgactctctgtttgttagtacttgacttatttatatgtgtcaacaaaaaacaaagccttttgaatct

SEQ ID NO: 1061 - DNA, 943 bp, Zea mays
  Peptide Sequence Number=SeqID_13864
  Probeset Number=SeqID_15464
ctgcaaccccatcgtttatgcgcttgcacatgcaggccgtttcggggacgcacacaaggtgctcgaaaaatttcccctctatggcgtggctccgaatatctcgacattcaactccctcgtcttcggatactgcaggcacggagaccttgctggggctagtcgagtgctcaaggccatgctggggcggggcatttcaccaactgcaaggacatacaactattttttcacggtctttgccaggaatcttagcatcgatctgggaatgaacctctacgtgaagatggtcagcaatggctacgcgccagaccggctcacttaccaccttctgatcaagatgttgtgtgaggcgaaccggcttgaattaacgctgcagatgcttcaggagatgagaaacagtggttttgagccagatcttgcaaccagcaccatgctgatacattttctttgccgacgccatcagtttgaggaggcttttgcggagttcgagcaggtgtttgagagagggatggtgccccagtatatcacgtaccggatgcttatgagagagctaaagcggcttggtctagtcaaactggcacagaagttggcagatctaatgcgctcagttccacattccacaaagttacctggcggttacagggataaggaaggagatgatgctatagagaagaagaaatcaatattactgaaagcccaggccgtttcagacgttctgaaggattgcaaggatcccaagaaactgcgcgagctcaaagatcctgaagaaactgacgtccaaattgcagacaggattgtagccaacattaggagaagagtatacggagacatctcaaggatagtgccatctgtttcttgaaacattgatttgcattgggtagatggatcaatattaattgggtgactatggtttatcagccagttgaattattcatagtgggttttc

SEQ ID NO: 1062 - DNA, 1849 bp, Zea mays
  misc_feature (1834)..(1849): n is a, c, g, or t
  Peptide Sequence Number=SeqID_13865
  Probeset Number=SeqID_15465
attgcttgccctcgctcggctcgatccccactctaccgtgccagccaccaaccccgcccgcgcctccgctactaaagccgaggcctcacccaccaggccaccgccatgctcctccccttcctcagatcccacccgctcctccaccacgccgctcgcctgtcctccccgcgcactcgcctgatcctccgccgcgacttgctcccgctcgcgcgctcccggcctatccgcatggcggcccattccggctccggctccggcgccagcccccctgccccagcgccgcctgctgccgtggtgcaaaagtcaaagatcaaattttgccctgcttgtggaagtccaacgaaattggccatacctgatggtgatgagaagatgagggctgtttgttcttcttgtggaggagttcactacgaaaacccaaaaatggttgttggttgccttgtggagcacgataataaggttctcctttgcagaagaaagattgaaccggcttatggtctttggacacttcctgctggttatttagaggtgggggagtctgctgctgaaggagcctctagagaaacattagaagaagcatgtgcagatgtagagataatctcaccttttgctcagttggatattccactgattggtcaagtgagtgaaaatttggcatagtcacaaagttataggttattttgtccactactaagttgattatctttgtattacaatgagatgcagtagagttacattattttccgagcaagactgaagacccccaatttttcacctggagcagagtcgctggaatgtgcactttttgctctcgatgatataccattcgattctctagcattttcttcaatcgttgtcaccttgaggatgtatactgaagatgtgaggtctggaaacatcaaatatcactattgcattataaacaaaaggtaaatcgtccctttttgtagtaactgatcattgttgtcgttcgtaactctgattgcttttacaaagtaagtttatgaatcttgctctagtttccttgtctcactgcaaattttctgcagcactcacctatatgacaatcttgcagcatgttcaagtttacgaatactactctagtttcctatatggtctataacttgttttgtgcaacttgatttacagattaggagccagcccgtcagaccttcggagtttcgatattgataaccatatagctgtgtgaggttttaaaggttctaaaacccttggcgattgaggggaatggttttggcatacaacaggcacacggccacacaacaaaaacatcgccatcagatagaccagtgttgaatgctgaatccccatgggagccttttttggcgcctctctgcggattggaacagatttagagggtggaacagatttagagggtgtttgatttttatggactaatttttagtttctctattttattctattttagactctaaattgacaaatacggaaactaaaatatagattttaggttctgtatttggtaatttagtattcagtaatttagagactaaaatgaaataacatgaagaagctaagcattagtacttagaatccatacactgccttaaagtacgtgctggaactgtgaatggttcgtatactaaagcctggattagcccttttaggagattctgcgtttggatgggagttgggaggactgaaaattgtatcatagtgcagcaaatcttggttgtaggattgagctatcctgcatgccatacttgtggcgcttcttcagcgaccgccatgctgtgatctggttacaattgaattaatggtgagctcttttttaaccatttatttccagttnnnnnnnnnnnnnnnn

SEQ ID NO: 1063 - DNA, 698 bp, Zea mays
  misc_feature (610)..(610): n is a, c, g, or t
  misc_feature (622)..(622): n is a, c, g, or t
  misc_feature (637)..(638): n is a, c, g, or t
  misc_feature (647)..(648): n is a, c, g, or t
  misc_feature (656)..(657): n is a, c, g, or t
  misc_feature (664)..(665): n is a, c, g, or t
  misc_feature (672)..(673): n is a, c, g, or t
  misc_feature (681)..(682): n is a, c, g, or t
  misc_feature (692)..(693): n is a, c, g, or t
  Peptide Sequence Number=SeqID_13866
  Probeset Number=SeqID_15466
acccacgcgtccgcccacgcgtccgcccacgcgtccggtcacttccgcacttctgcaagagagaagggtcaggttcatccagcgacgcgctggatgcggtagattgctactcctaggacgagcctttgcgcgagcagctgtacagctacatgaagcagcagcaatctctgaatcaggactccgttggccccagaggacaaggctcgggcccccgtggaggtgccctcccccgcccttgaggaggccaagattgcggagccgatcaaagcagagctccagaatttgaggggaaccggcggtcccgccctttcttgcggcagcatccagattgaaggtccatgagggcgggcgccagtgacccaaaaaaaagcttttggtaatggtgcctcctgcttgcagtccctggctgcaggcttgaccggggcgaataaagagcgggtttttaatacctgtacccccgattgttgtgatttctaattaaccaagtgggggtgtatccccatgcttgtcctacccctgtaggtatgtaaaaaaaccggccccctggccggggtttttgtaaccccctgctaattccttagaaggcccttttttattttccccccaaaanaaaaaaaaaaanaaaaaaaaaaaaaannaaaaaaaannaaaaaaannaaaaaannaaaaaannaaaaaaannaaaaaaaaannaaagg

SEQ ID NO: 1064 - DNA, 709 bp, Zea mays
  misc_feature (652)..(709): n is a, c, g, or t
  Peptide Sequence Number=SeqID_13867
  Probeset Number=SeqID_15467
ccaaggccgacgcatggacggcgctgtggaccataagcctgcacaagatcttcgcggccatcgccatgggcatcgcgctgctccggatgctgcccaaccggcccctcctctcctgcttcgcctacgccttcgcgttcgccatctccagccccgtcggcgtcggcatcggcatcattatcgacgccaccacgcagggccgggtggccgactggatcttcgccgtctccatgggcctcgccacgggcatcttcgatctccggcgcaatcagccacccccggaagttcccaacaatgcagccctacgtgtctctcaccaggtcaggtgtcccatatcatgacgacggcgatgacagccacgccgaacacgacggcgagccacctaccgaccggcgtgtcgacggcgacgggcctctggggccggtaccctttggagaggaggtggttgatgcagacgtagacgaatatgcccgtggcgaggcccatggagccggtgatgtatccagtcgccctcccggcctctgcgtgagtggcgtagaaaatgattcccacaacgtcgcttggtgggatgcatatggtatatatcacggctaagcccaaggaatatcagtgagtttggttgcctatttccagcccacggatcatgtttgatttnnnnnnnnnnnnnnnnnnnnnnnnnnnnnnnnnnnnnnnnnnnnnnnnnnnnnnnnnn

SEQ ID NO: 1065 - DNA, 1896 bp, Zea mays
  misc_feature (1)..(1278): n is a, c, g, or t
  misc_feature (1879)..(1896): n is a, c, g, or t
  Peptide Sequence Number=SeqID_13868
  Probeset Number=SeqID_15468
nnnnnnnnnnnnnnnnnnnnnnnnnnnnnnnnnnnnnnnnnnnnnnnnnnnnnnnnnnnnnnnnnnnnnnnnnnnnnnnnnnnnnnnnnnnnnnnnnnnnnnnnnnnnnnnnnnnnnnnnnnnnnnnnnnnnnnnnnnnnnnnnnnnnnnnnnnnnnnnnnnnnnnnnnnnnnnnnnnnnnnnnnnnnnnnnnnnnnnnnnnnnnnnnnnnnnnnnnnnnnnnnnnnnnnnnnnnnnnnnnnnnnnnnnnnnnnnnnnnnnnnnnnnnnnnnnnnnnnnnnnnnnnnnnnnnnnnnnnnnnnnnnnnnnnnnnnnnnnnnnnnnnnnnnnnnnnnnnnnnnnnnnnnnnnnnnnnnnnnnnnnnnnnnnnnnnnnnnnnnnnnnnnnnnnnnnnnnnnnnnnnnnnnnnnnnnnnnnnnnnnnnnnnnnnnnnnnnnnnnnnnnnnnnnnnnnnnnnnnnnnnnnnnnnnnnnnnnnnnnnnnnnnnnnnnnnnnnnnnnnnnnnnnnnnnnnnnnnnnnnnnnnnnnnnnnnnnnnnnnnnnnnnnnnnnnnnnnnnnnnnnnnnnnnnnnnnnnnnnnnnnnnnnnnnnnnnnnnnnnnnnnnnnnnnnnnnnnnnnnnnnnnnnnnnnnnnnnnnnnnnnnnnnnnnnnnnnnnnnnnnnnnnnnnnnnnnnnnnnnnnnnnnnnnnnnnnnnnnnnnnnnnnnnnnnnnnnnnnnnnnnnnnnnnnnnnnnnnnnnnnnnnnnnnnnnnnnnnnnnnnnnnnnnnnnnnnnnnnnnnnnnnnnnnnnnnnnnnnnnnnnnnnnnnnnnnnnnnnnnnnnnnnnnnnnnnnnnnnnnnnnnnnnnnnnnnnnnnnnnnnnnnnnnnnnnnnnnnnnnnnnnnnnnnnnnnnnnnnnnnnnnnnnnnnnnnnnnnnnnnnnnnnnnnnnnnnnnnnnnnnnnnnnnnnnnnnnnnnnnnnnnnnnnnnnnnnnnnnnnnnnnnnnnnnnnnnnnnnnnnnnnnnnnnnnnnnnnnnnnnnnnnnnnnnnnnnnnnnnnnnnnnnnnnnnnnnnnnnnnnnnnnnnnnnnnnnnnnnnnnnnnnnnnnnnnnnnnnnnnnnnnnnnnnnnnnnnnnnnnnnnnnnnnnnnnnnnnnnnnnnnnnnnnnnnnnnnnnnnnnnnnnnnnnnnnnnnnnnnnnnnnnnnnnnnnnnnnnnnnnnnnnnnnnnnnnnnnnnnnnnnnnnnnnnnnnnnnnnnnnnnnnnnnnnnnnnnnnnnnnnnnnnnnnnnnnnnnnnttagatcgtcgtcatactatagtacgctacctcctccaccccatcgatggacaaaagtactcctaaggtgctggtcatgcatctctgacgcggccaccgcttcgtcagtggctgtcctacctggctccaggtgcggcgggggactcgacgacgacgatgacggcgctgtttccgacgtcgagcacgacggtgccgccacggcggccaggtcgatgtgaccgatccatgcagctgccatctatggatcgatcgagctctctatattcctagccggccggcaggtcaatattatatatacttattagtaggccgaccgactggtgcaagtgcaaaagaaaatctgttgtaccatatagtaacagattatcaagctgttctttcattttgcagctgctgtagcgctactgctatatagagtcggttctcttcgtctgctccgtcctagttaagtgcagcacacggctcatccctggcacgagaaataaatcacgggcatgcgtgtgtcaacagctagaatatgtgctcgattgatgcacagtgtgttagaatttattgtccattttctaataatattttttactgttgaagttcaaaaaaaaannnnnnnnnnnnnnnnnn

SEQ ID NO: 1066 - DNA, 372 bp, Zea mays
  Probeset Number=SeqID_15469
ggcgggacgggcacaagcttttttttttttttggccctattgtttgttctttcatttacttcgatgaagccactgaagaagtgcgtcatcttgtccaagatgaacaagatcgaaggccccaacacagggagcttcgacaagaaggcctattcaacgagggtgcatggtatgatgattccaatcatgaggcctttactttgagatgatgcttctcctttggcaggagaactgtaggctacccctatgtcccccatcatacatgccacctcagctccccatgtatgatgggcactcacatccaaagcagtcttctgatgagccgtgacgccactatatcttcctatgggggcaacactgcaggcatggggaaga

SEQ ID NO: 1067 - DNA, 1471 bp, Zea mays
  misc_feature (1)..(36): n is a, c, g, or t
  misc_feature (1471)..(1471): n is a, c, g, or t
  Peptide Sequence Number=SeqID_13869
  Probeset Number=SeqID_15470
nnnnnnnnnnnnnnnnnnnnnnnnnnnnnnnnnnnnacgcaatcccctctctcccacacggcggcaggcagcgactccatctccctgcctcctcggacaccgaagctccatggccgcccagctccttccctagccgagctatgtcttctcccatggcgccaccctttccctcggcgccttccccagcgggatttctcctctcccatggaaatcagcagcccccttcttcctcaactcggacccgtacaacaggggctttctaccccacagtcggtcgtcgttctcctggccctgctccacggcgcccttcttccccaggccgatgtgcaggccctcttccacctcctgtcgagcgtccctgcctccccttctccccctctgcaccatggctggttccttgttccccttggaacccagcagggagagcaggcgccccttcccctagcggatccatgatgctaggaggatctcctcctcggccggcgctccaacccggcgtccatggcgtcggtaccctccctcagcagtgcgccgtcgacccgctccactctgaccatggacgcccaggcccgaccgtcgtcttccccgtgacgcgcatgggcgactccactccggcgccctccagcaagcgagcgataacgccgtagcgaaaccccgtgctccctgcgtcggtctccagccggctccccttgcgagctccctcagatctaggccggtcaccaagctcccttcctccgtgccggccaacgtcttccacaggacgccgacgagctttcccacctccaatgccaggaccgcgcgcgagcacaagctcagggccccgctcggccctctcattcgcacgcagggtgcccctgcttccccatgcccgagctccctgctccaaatccagcaaggtccctccagacccgctccctaagtcggcgagttcctccatctctggcgccagcccacaacagcaaagggcctcccatggtgtttgtttccccaacgctcgccccgtcaacagccgcgacgccagttcactagccacgtggacctcctttgcgtcatgccctcggcgtgctccacgtaatcccgcagcaagcagcaacagtgacgccctccgctgcgtcgcgctcgccagaacgggcctcacgtcgtcgctctacgcagcgtctgcgtgtcgtcgtcgaaacccgcggtcgtttaatcgcagcccttgtcgacgtcacgcctcgcgcatcgctcgtcggcaaagagcccaaactaatggcatgcatgcgcgacgagagtcggccaggttgttcgccttgaatgattcgtgatttattttatttatgtattcggtcgatgatgtgcctgcatgtgaatatgtgcgtgagaatataattgtatgaatggatgtgtgtagagaagaaactgaagtagaaaagaactcggacgtttttatattttgataagaaagatgtgcgatgcgttgtttgatgcn

SEQ ID NO: 1068 - DNA, 440 bp, Zea mays
  Probeset Number=SeqID_15471
accagcatgtgtacatggatcatattatcattatcagttcttcaaaggatgggaatggataggagtacgtgcttatccattttcagtacacacgtatctttcggaaggacgtcggtatcccgggtgatgtacgggctattaattagtagatcaaaattttcctcaactgtcattaaaggcgccaacagagtacattgttcgtccattcagagatcagttgcacacacacgttcagactcagagacaggagggagcttattttgtttcggtctaacacggtggtactcacgccactgtaacagttcagtcacggtactcagccatgaacgcgtacatggaaagccttgaagcgggtgatcaccgcggggattttattcttcctggatctggatttggcccaagttcctggaacatggcacgtcagatgcacgatcctgccg

SEQ ID NO: 1069 - DNA, 729 bp, Zea mays
  Peptide Sequence Number=SeqID_13870
  Probeset Number=SeqID_15472
aattaaaacatccaactaatccatctgtccacccaagaagagaaatagtgaaccagctcaccaatacaaaatgctactcagatccacaatatcaacaatgaatcccaattcgaacatttcgtcgaacacctggcgggcgtcatattggaccatgcttcttcatcaccaaatcctgggatttccccctcacatctcacacataagcacacacataatcacaatcaaccacaaaccacatgtatcaattaaggagataagtagcacaagacaaagggacctcaccgatgactatgaactgcacaagtcgacaacgaggcatccatggagggaggtgttgttgttccctatgccatgggagaggtcggctagggcaaccataggaagtaacaagggaaggggcgtgtctagggggatggctcggccacctgggagagctacaggcgaccatggaagggagccggggactaccggcattcatggtcaggggcggaagctgagggaagggcaagacgcgacggacgccggagctaggggaaaaagcaggggcgtcgagtggaggtgtggcggctggggaaggacacagggactaacggcggccatcaccggcgtcgagcaggggagggcaagcgcgtgtaggagacaaaggctgggaatcggacgtggagaggataagggcatgggcaggagagtcgtggggatccccgcgtactctgcgttgttaccactgct

SEQ ID NO: 1070 - DNA, 762 bp, Zea mays
  misc_feature (714)..(762): n is a, c, g, or t
  Probeset Number=SeqID_15473
acctgcaactgcaagtctgcaagtcgttcgttcatccggtgcgctatccaaaatacagcggacaacttcgcacctttttcacccatcactcgcgaacgcaggtcgcactgtcgcagcatgcttcgcctctccatcgccgtcctcacctcaactctcctccccacgtccgtccccaccgtccgaccccatccgcgccgcctactccgcctccgtctgcgctccctcgccgccgccgcctcgctctcgccgtccgcccgcagcctccgcctcctcgagtggggcaaggtatgcgacgccgtcgcctccttcgccggcactgcccacggccgcgacgccacaacggtatcgcgcttcggatgtcatttctcgttgccggagtatcgacgaagggggttgttcgtttctgacaccagtgctgtacggtttgatatgcgggtgcagaaacaactgtgggaggtggaggatgtgagctatgagcagagccagatgctgctccaggagacggaggcggccgtgttgctgcttgacaacgctggtggggcaatggatttctcggggttggatacagttgcgctgccatgaagctggatgaaggctcatgtagtcgattaacaacacttacagaaaccaaatttagatgctgtcattaacaagtcactagtgaaatccatacaagatattggtgatgatgatggctctgttaaagacactgcnnnnnnnnnnnnnnnnnnnnnnnnnnnnnnnnnnnnnnnnnnnnnnnnn

SEQ ID NO: 1071 - DNA, 455 bp, Zea mays
  Peptide Sequence Number=SeqID_13871
  Probeset Number=SeqID_15474
aaaaaaaaatccgtttattttaagcccaagtccaaggcgccccctgaaaaattgaatttttaaccgctggaaaagtttaaaaaaatttttggttggtgtatggacctgaagcttttgggggacaccaaagctcctgcggcctagacaaaatcgacttcggtcttttttgtagtagaatagcccgtagacccctcccgccccccccagggtgttgagttaaattccaaggtgccctgaatccccctaggcttttcccttccctgtgttggttcctggaaaccccgtccggtaaatccgggtttgcccaaaccaatggagtgtttttcccccgcccctttgatgtctcatgttccccccccagtttcaaggtttgtccccccagacccctttttccgaaagccccccccgtgagataattcccaccgatttttgtgcccgtgtggtttaccttttgt

SEQ ID NO: 1072 - DNA, 694 bp, Zea mays
  misc_feature (601)..(694): n is a, c, g, or t
  Peptide Sequence Number=SeqID_13872
  Probeset Number=SeqID_15475
aattatcaactcatttctatattattattatgcaaaaaatagaaacgatattaaattacaaatgttccttcggcttgaaagaaggtaaaaagtacaagcgtgacgcaaaagtaaatgcccagtccgcgtgaacagtacgggggcactgttcacctatttataggcacgggacatagctcatgtaaaattacatccatgccctttacatttggtagtaattctatagtaatccaccgaggtctgaacagccttttcatctttaagccggtttccttttctgctatcacgccgaagctttcctgctcacagctttggcgctgtgtcaaccttcgtattctttgggcttctcccactgtggtaccgattcgagtccgaagatacctgttcacacattatactccaaaaacattgttaaatcatgtttttgaggaccttcggcaagccgaaggcccccaacaattttaaaaatatttttaatctaaatattaaacaaaatgacttatcgaaatgaaaaaagtcttctaaaaatttatagcttcagtttcacgattttctgaagcatctaatgacctgctccaccaacttttctgaagtgctccannnnnnnnnnnnnnnnnnnnnnnnnnnnnnnnnnnnnnnnnnnnnnnnnnnnnnnnnnnnnnnnnnnnnnnnnnnnnnnnnnnnnnnnnnnnnn

SEQ ID NO: 1073 - DNA, 410 bp, Zea mays
  Probeset Number=SeqID_15476
gtgcatgagtgctgccagatagatctggacctcgtgtatggcggacgcagtagggggtgggtctcctgtgtggatatgcgggatcttccaggctactttactgaactgatacgatgcactcacgtggcgtctgtgcccctgtcccctggtgcctttgcgaacattggttgtgtccatgaggggtgggttccgataaaaggaaatgggtgggactggatccggcatcacatcttgcctgccatgaaaggctacgtggagactctggtctaacgagacccttaccgattccgctggccacttgtgacacgatttgtatatggtaacatcgatcacctactatctaatagattctgacttcccaccactatttcaccggatggaggatactaacatagagcagttgtggtgtg

SEQ ID NO: 1074 - DNA, 423 bp, Zea mays
  Peptide Sequence Number=SeqID_13873
  Probeset Number=SeqID_15477
aaggatacaggcgcaacttgtaacggacattcttggaacgctgttcagcgacacaacaaactcactgctgactgcctcaaatacacagatttccatagctggtgacccacagctgctgcattttgacgacaagcatcttgagtatgaccaatgcccaacatgttgactggacttaatcagtgaataggctgctaagggtgctctagagctggagggtcatcaggcggctcctgttgacctacaccggcaggcggaggctgtcgagatgaactatcctgcgcctgtgctggtggagctagcatacggcggggaggagccaattgtgtccggtggcgcatgctccgccgaggaatggaccccccgtaaagtagtcgggctctctcgcccaggacacgccgtgcacggtgtttaccccgggccccc

SEQ ID NO: 1075 - DNA, 325 bp, Zea mays
  Probeset Number=SeqID_15478
gatctggactcgaggatgtcatggataaagtaggggctaacttaatcaacacacagcctggatgctgacggagatgcacacgtcaacgtgtatctataggagcacatgcctcccgaccacgcagaacctattccagccgcccagattgatgtcaaatgaagccaggccgggccgggccaacgctcgccagcagttaacctcgctcaccccgccggccacgagctagcctacgttaatgtggacgccctcagcaaggaggaagatcgcgacgcgggctaagtaaacaacggcgttggtgaggatggccaggcctcctggctggaat

SEQ ID NO: 1076 - DNA, 325 bp, Zea mays
  Peptide Sequence Number=SeqID_13874
  Probeset Number=SeqID_15479
attccagccaggaggcctggccatcctcaccaacgccgttgtttacttagcccgcgtcgcgatcttcctccttgctgagggcgtccacattaacgtaggctagctcgtggccggcggggtgagcgaggttaactgctggcgagcgttggcccggcccggcctggcttcatttgacatcaatctgggcggctggaataggttctgcgtggtcgggaggcatgtgctcctatagatacacgttgacgtgtgcatctccgtcagcatccaggctgtgtgttgattaagttagcccctactttatccatgacatcctcgagtccagatc

SEQ ID NO: 1077 - DNA, 542 bp, Zea mays
  Probeset Number=SeqID_15480
cccccccccgtcagatttgaaaaacccaatcctgggggggttttgccttttttcaaaaagcgggatggggtgatggccccctcccctgagctgctgggcccccggatatttggcaaacccctcctccctgtttccccccccctgggtcccccgggggccacccgctccagattgtttattttttgctaacccccccccttcgttatgcaaaagcccactcttcccgttttacccccgtcgccccgggattcaaggggaaaaatgtcatatttcctgttgctcccagaatggcccgtccggctccggtttaacggcggcggcggctttttaccccccggcccctgctgttgttgggacggcccccccccccagtgggcccccccccccccccgcttggagctgggcctttttttataaggggcccgaaagagtttttggttgcgggtagcttttaagcccctctcgagtaaatgtcctattccaccccttttttccccccttttttccaccttatataaatagttttaaatttctcctccccc

SEQ ID NO: 1078 - DNA, 1385 bp, Zea mays
  misc_feature (24)..(24): n is a, c, g, or t
  Peptide Sequence Number=SeqID_13875
  Probeset Number=SeqID_15481
tggtacgcctgcagtacggtccgnattcccggggggggtacagctcattgctatgtgaaagcaggcagcgggggaggtgatgatggagagacagccgctgcaggccccgacagacagcgttccggaccacgatggtgcggtagacagcactatctacgccggatcgctactcgcaccatggagtggacgcacacctgaaacggccttttgcaggtgctgattgaatgatacagtgctgcaccatatactccgtaggaaaataaactacttcatggtgcctctctatgctacaagcccttaaggataagagcgaactatacatgttggttacataaaagcaagtcctaccaagggccgtcggccgttctataggactcatgtttacgggcaaggacatgcaaccacctaggtgtcgtatagagatacctgaagttcattatattggatcaactccatacagcggcattcactgcatataaagctttggctattagcactctactacgtcactggaaaggagagcttccttgtcacaccactttctggtttccacggttgccttgctggctttcttgtggccctgaagcaactcttaccaaaccttgagcttcctatgggttttttgtgggaaaataaagggcaaaggggagtgccattctttggggtatgtttttcaaggtatcatggccttcatggtgcctgattccattaacttcctgccacctttggtgtccgggatgtacgttagctggctttccctgagatacttccaaaggaaccccctggctggactcaagggtgatcccagtgatgacttttccttccccagtttattcccagctcccataagggagcgtggcgaaagggtttttgaggaaaggttggcggctgacaatgctggtgacccagaggcctcgcctcgtggccatggccccgcggaagactgagaacttttttgtgaccatcagctcctcttataggagccatggctttgctccctccagcgtttatagctctgcccttttgttttttggagatggagctattcagttcccagcgaacgaataatacgatgttcttagtttcttttttttttcccgcttctttgtttgcgaggatttattggttaaattgtgtacaagccaattgttatggtccagcgaaaaaaaaaaaagaggatgatggcattcccagcgaggtgttgagattccgttgtacccaggcatttgcacccgattgtttggtcctggtcaaagttctgtagaagtcaaaaaacccggcccaaaaaaaaaaaaaaagaagggcttcgccaaaatcagatgttgagaaaaaaatattttcttttagtgacgtgatttgacccgacaaccggtttcgcataagat

SEQ ID NO: 1079 - DNA, 362 bp, Zea mays
  Peptide Sequence Number=SeqID_13876
  Probeset Number=SeqID_15482
tttcaatccctgtaaatgaccccccccaggttgggaattttgacgagcccgaaaatttgcaagttcttgtgatcaaatcgagcccccctgctaaaatatttttatatgatgattggagcatccctcatacacccgcgggtactgaaattccccttcgtttgggatgaggactgcttcgaacccccaaaagccgacctttgggtcccaagtgtttcccccaatttatctgcttcacccatgaccccgcgggggctgggctcccccaattctcagcccccgttgtaataaagccggggcccttttcatggaaaaattctgtattggggcccccgaaaataaaatttggccccggtttttgaccc

SEQ ID NO: 1080 - DNA, 572 bp, Zea mays
  Peptide Sequence Number=SeqID_13877
  Probeset Number=SeqID_15483
acatatgagccatctcattggggggatacaagccaaaaggtgtgtgaagtaacagagcagccttcgtcagaggccaaaggaaatgataagagtgaatttggggctatactttctgatgttgtaaccaacatgaaagttcctatcacagtactaaatgtaactttaatgggagcgtttagaagtgacgcacatgttggcacttggagttatcctcccactatacttgattgcagtcactggtgtcttcctggagtccctgatgcttggaatgaacttgtgttttcgtatcttttgacaaatggttggcgaaacatgccgggctgaaatttatggcagcattgctcaatctacccccactttttgtattttgatatttgacattaccaggtatactagagaattaacatacttccgggacaagagacagctgcatctgctgtaggtacggtggttcactagacttctgcattcttttcttctttttgacttgtatatatacatggtcaagtatgcatggagagctgtacattttacaccacatttttttaattattcgggttcgtaaggattac

SEQ ID NO: 1081 - DNA, 494 bp, Zea mays
  Peptide Sequence Number=SeqID_13878
  Probeset Number=SeqID_15484
ctttttggtccccaggaaccgccccccaagggggagaaggtttttgttctttaggagcccaaaaaggccaccaagtgaggccgtgcgcacaaaagggggggggccagggcccagggaatcggcgtgcgcgcgtggcggggtattccctcgcgggggtacatggcagtatcacacgggattttgttgttcagtacgctacggttattacgggggccccccggggtgggggtgtgtgtgtgtcgaacgaagcccggtacgaagcaaccagtgactgtcgcgtgaacgtgtccggtccgggctgcaagtaacgtgggctaaaaaaagtgtgcgccgggtggtaatggtggtggggcccggtgccagtgcgcgcggtgccccatgcctgccgcggctgcagcttgttgtgtcttgtgttggttaggttcctgttcctttcggtcaatcaattctcacgcatgccagtttgggtatggtatgggtcgtcttctttggtt

SEQ ID NO: 1082 - DNA, 455 bp, Zea mays
  Probeset Number=SeqID_15485
tccctcaaggtgggggaagggggccacgtcatggcaagggagaactaccccctgtggcattttatgtggggcaacaagcagtttttcaagggtgaggttcatccgtggaacaacggcgaggaacaggcgcagccccagctggcgggggccggcgaagtgaccagtccacctgcccagggttcccagtttggctacagcaaatgcgagatgagcaatccgggatcctgccctccgtggtgggccgccctgattgccggccaactcttagtccgcaaggactgataaaagtctccatcctgcattcaacatgatatatgtcgtcaatctgcccagcaatttagagatggattatctatgctatacactatgttatcaaataaactgtagcgtggcatggaaggacatgagttgagaattaattgatgccagtgacaccccaccgtagattcagcttc

SEQ ID NO: 1083 - DNA, 600 bp, Zea mays
  Peptide Sequence Number=SeqID_13879
  Probeset Number=SeqID_15486
ggccgggccgggcttttttctgccttcctttccccgtgcaacttacgcaaacgcgacctaacgaatcgaatcaaattcgccgtctacctcgtcggcgtcggcgcaccggcctcgagcccagtcccccgtccgagtccgatcagccaccggagatgcagcacgggagcggcgactacacctcctccgccccctccggccactactaccagcaccaattggtctagatggaattcgcatgcttgatccgagtacaagcaggaccctgaggatttatccactcgtttcactgacaagatgggaggttttggatgcaactatatttgcattctgggcgaagacaatagtggatattgaaccaaagagaattaggctgaagtcaagcagttatacttcaaatactatgcttgacactgtaacagcagcaacagtgcagtttaaggagataggtgcagatgcaagaagcagaggagcaatagaaactggcaaacccttggtacaatcaaatgagaaaaagaaaggttttgattggatgtttacaaaacctgttgatgaagtgaaagaccattgggtcccagatgaggttgccaagaaatgccactc

SEQ ID NO: 1084 - DNA, 486 bp, Zea mays
  Peptide Sequence Number=SeqID_13880
  Probeset Number=SeqID_15487
ccattgtgcatcagtctgcatcatgacgcatgtggcgtcaatgcacgggatcctctcctggcagaggtgcaatcgatggtgtatgatcacacagagatgaacaagcagatgcatgtgaagaatgagggaagcatcaagctagcttgcgacgaagctcatcgtcaggcagaacaagtacaatttaagaccgtgtgctatttaagtatatggtggcaaataatgggatgcttgcgccgcagcggtgcaacagtggggcgtttcagacccagctaatggcaagctcttggtgttaggtatctacgttagctccgtacgtgtcttcggagtcgatcaactatcatagtatagtgaagacgtgagcgtctctccagttccctttccataccacgtggtactgtgacatgtcgtgccttagctgtcatgttagccacgtactatatataaaaaataatgcgtggaccagatgtttctatgttaaaaaagaaa

SEQ ID NO: 1085 - DNA, 487 bp, Zea mays
  Probeset Number=SeqID_15488
cgcggccgcgtcgactttttttttttttttttttttttcattttggcatctctggattgaaattcttgggtgtcgcagggaacacagaactccgttgcgtttgtgctattatcaggaattacaggcagaggggagaaaatgaggaaaaagaattatctatagcaggagcaccgcaccaccaaggggactcaggctcagccagcgagggcgtcggcaccggcgcacgatctcgaggatctccccggggatcttggcctggcgctgccggttggaggcgatgcgagagggtcttgcggagctcgctggcgctgccggtgccactctttatgcccatcatacgcttgttcagttccttttctagcactactgctttaattcgctgctatgcacatccagctacatggacctttacttacgcagaatcacacctgcttcccaatctctctgttctctactgacataactccctccattgattttcccttca

SEQ ID NO: 1086 - DNA, 517 bp, Zea mays
  Peptide Sequence Number=SeqID_13881
  Probeset Number=SeqID_15489
gtttgcccttttgagcggccgcagtgacaggtacctgctctacgatagcagtggttaatgatgcatgtcagtatgatgtcactaagatatgcagctcttgtgtgtggatcgttattatccgccgctcttctaatcattagatttcgaaagaatttcgatttcttttcaataaaggaaaatgtttttcttccaccatttttctttagtgagattgaatatttatatccaaagagtagtgctttcgaggcacctcttttcccgtatttccttaattatttctaataactctttactccgcgttcgtaattatgaagcatatgtgtctggtctttacggtcattataatgtgcgtcgtgtatttgctgtgaatcagtataggcataatgaggcatgggagatcgtattgttcttcgggatctcatgaatcagtagtaggttggaacgtcagcgaaatctccacaagggttggatcggaagctggacacctggtgctggggcccgtcgggccggccgctgg

SEQ ID NO: 1087 - DNA, 598 bp, Zea mays
  Peptide Sequence Number=SeqID_13882
  Probeset Number=SeqID_15490
tcgagcggccgcccgggcaggtacccatttctagaaaaaaaaaaaaaaaaaaaaaaaaaaaaaaaaaaaaaaaaaaaaaaaaaccaaaaaaaattaaaaaaaaaaaaaccaaaaaaaaaaaaaaaaaaaaaggttggtccccctggggccggaacccccctaggggggattttgggggatttccttcacccggggggccgttggaccttccttttagggggcccatttccccctatgggggggggtttaacatttcacgggccggggtttaacaacgtggggacgggaaaaacccgggggttcccaaattaaatcgcttggaagcaaatccccttttccccagtgggggtaataccaaaagggcccgccccgatcgcctttccaaacagtggcccaccctgatgggcaaagggcccccccctgtagcggccctttaagcgcggggggggggggggttccccccagggggaccgttacattggccagcgccttagcgcccgctcttttggtttttttcccttcctttttcgccacgttggccggttttccccgtaaggctttaaatggggggctccttttagggtcccaatttagggtt

SEQ ID NO: 1088 - DNA, 592 bp, Zea mays
  misc_feature (566)..(566): n is a, c, g, or t
  Peptide Sequence Number=SeqID_13883
  Probeset Number=SeqID_15491
ggccggcgcgaggcgggggatcagggccttggatgtgtgcggaaggcggccttcagggcggtcgttcggacaggggcaagcttttttttgttttgttgttgtttttggagtccttcttgtcgccgcgacggctgccaggaccggccgtgactgctgggatcaagtcgagagggctcagatgctcagccactgccaggatttccttgacgaggtgtccgatgccggcaggtgctccagggatgtaaggggaagcagcggacgaggcggcatgagaggaagctggctcttggagcaatgctgtgatcagctcaccgagatggatcacgactgcatgtgcgaggggctaaaggcgattgtgcacgaacaagtacggctcagcccccgatccttcttcggtggtcgtctgggcacacaggaggagggcggtgagtgcgcccggatgcttccccagctttgcggaatgggaaggacctgctaccagctccgcgccccctatcgcgcattgtcgccgccggccatgtctctcttgcataacaagctctctacaatcgcaactacctgtttgntttacaggagatcttcgggtggctca

SEQ ID NO: 1089 - DNA, 686 bp, Zea mays
  Peptide Sequence Number=SeqID_13884
  Probeset Number=SeqID_15492
cccactcgtccgcggcacacgtgggtgcaggtgtattccgcttgtgctgtagactcgtcctcaggaggaggatctatctcaacctcatgcgacacatcacttccttcgagcagttgacacaacttaagcatgtacactgctgagtctggacgacaactatgtgcattacctagccacctacaagcgtctagaaactagccatcacaaacctgcaactgccttgcatacagagcttctaaatcctgctggcattgctgtcagagactccacattgtactgccatgaaagcatccaaagcatggcgtgtctatgccgctatatgccactaattatgtgagacggaaagaactaagactagagcacggaacagattgaaacatgatgcaaagaccactgcataaacgtatggtgcccgtgacaacttttcagcctgtctactgctatatcatgtgagaaagtgagagttaaactggtctggtcataggcaccttcaaacgctcactatcataagctgtggtggtatctggcgaatgaatgcatggtgcatctccagcatctaagaattctggacagagagagccagagaaaaatacgcatggccaattggaatctcaagatgtcattgggactacaggttccctggatggatgcgattgacatcactgagttctcatgcaagtcatgta

SEQ ID NO: 1090 - DNA, 505 bp, Zea mays
  Probeset Number=SeqID_15493
gcgcactcgtccggtatcacagcagagtgcgtggcagcagagcattggcgctgaaccctgctgcgagccctgcgctagaggacttctctcgagaccgctgcgcccgccgtggcaccggctttgaccaagctgaccttccgtctcctgttcattcgcctgaccagtccacgcacacgggcgaggactggggacaggacggcggatgaccagctgggacgacagctggggagacactttcccatctactatggcctatgctacggcccccacttcggcgctcacttgcagggtggctctgtgcaaatcactggctaaaaccagctattcaacctcctattcaacgtcgagtggcttaacggctggatgctggtctccaacctggtgatcaccggtgggttaaacgagggggccatctactgtggcatctacgggggcaccatggtgaccggcgtgataccaagaatgatactaagaaggagcatcgacggtaactctgatgagctca

SEQ ID NO: 1091 - DNA, 444 bp, Zea mays
  Peptide Sequence Number=SeqID_13885
  Probeset Number=SeqID_15494
aggacaagctaaaaggggggcttgatttgagaaatttgttacctatacctagggggctaggtaggcggtccgtcatgatttcatcccacgaagtggggggggcatcatcgatctttctacaaacatacagcaaaatgctacacctctctcgccctatgggttatgggaaacattacaaggggttcaaagggttcattctatctatcacatactcccatgcatgcgcttgaaactacctaccacttgttagcttggattagtcagcttcttggaactggttgccctggtcggttcttggtcaggcttagctggttcagttcggtcagggcccctggaaccagcctattgggggctccccccaattctagtgtggggcttctccgggggttggaatttggatttttgggagtatgctggagtaacgaacgcgtgggtacaacccgg

SEQ ID NO: 1092 - DNA, 479 bp, Zea mays
  Probeset Number=SeqID_15495
gtcaaatcggatatttgttcttttttgtaagcctgttgttggcgtggcttgtgttcgtcaacccatagcaattgttgggcttgtgtagactagatggtcgcaaaattgcagtatgatggattccctttccctcttataagagtttcttgaccatggggtgcctcaatcttggttatgctggagggctgtgctgatgcaactgatgggttatggtgtgcctaaatcgtggctatgctgacggaatcgattggtgaagatttcgttctaaatggaccaggtgtgactgcccaggtgttccttctacttgtacgttgcttttttgacggccctgcccatggacagttggtcataagtttctttttgatggccctgtatatattgttggcccattttatctcttgcccgttgcagtagaagttcgagggtatgagaaccccagtttcaaagtttctcgttattatattccattgatggtttgg

SEQ ID NO: 1093 - DNA, 280 bp, Zea mays
  misc_feature (25)..(25): n is a, c, g, or t
  Peptide Sequence Number=SeqID_13886
  Probeset Number=SeqID_15496
taatatgttagatagcaaccaaggnaaaacgaagagtgggccaaatatttggtgtgtggagttggatggccaaggctagattcgttggggttgcagtacccctattcctttttctttgagaacatattcttttgtccaattagaatctgcaattttttttaaggttaccagtgaacaactgggaacctgagatcagttttcccatgtagttctcaattggtcgggtctgaaattttctcctgggacccatatggaaacaggatgtggctcctttgttccc

SEQ ID NO: 1094 - DNA, 435 bp, Zea mays
  Probeset Number=SeqID_15497
cccaggcgtccgccaaaaagcagggcgccaaagcaagcaagaaggagagccctagctccaaaaaggccaaaactgatggtcgggagggagaggaaccagtgaagtctgaggttgaggatgatgatgaccaggatggcaatgaggatgaaaatgagtaaatagtaggatggggaccagcagctttgcaattgggtgtttgcttcttgtttagcctccaatgtgctgttccttttgctgttatatatgctgtatgctgtaagaaaaatctgtacatgatggacccttagggctatggcatgctggagtgcccgtttaactagaggagctggatactcttgccacccttgtcagcatgtgtaaactgttgtttttccttgtttttatcgacataattggggtgactaccccttgcagttaacagcatctgcttgtccc

SEQ ID NO: 1095 - DNA, 408 bp, Zea mays
  Peptide Sequence Number=SeqID_13887
  Probeset Number=SeqID_15498
cgcacgcgtgggtgctcccggaagagatgggcatgcagaagcttgttttatctggcagcgcagaggggaagcgtgaggcgatcaggcagctgtgcttctcgcttgatcactaccgccgtgggtgccagcagcttcggcagctcctgcaggaccacaggaggcccgtggtgatggcgacatgagtgagttgcgtacccttcctggatgttgaaaggatgtcggatctctgaaggtggcttctcagtggtatgctgtctgacgatgtaatttgtgctgtctccttcccctcttcctacacaatctggcgtaaagcttgtgctctgtggttacttgaactgtccggttgctcgtgatctggggcgtgtaatgtaatgagctatatggccaatggataatcatggtactccc

SEQ ID NO: 1096 - DNA, 1944 bp, Zea mays
  misc_feature (1944)..(1944): n is a, c, g, or t
  Peptide Sequence Number=SeqID_13888
  Probeset Number=SeqID_15499
ggccgggatcttctcccagccagtcccagcgcgcggtgctccagtggcgtcttctccctgctgtgctcgccggagctcctccagctcgaccgctcggcttcccctagcctcttcccctgcgagctcgactcctgctcgcctatggagttcttccagctccctgctccggtgactagggctcggcgtccggctccctggatgcttgccctgctcgccgccatcctgctcggccagcgcagtcccttctctgctctctctctctattccctgctcattggcagccgactccctctacctcccatggacgccagccgcgcccctggttcctgcctctgcttctgctcggaattcccatggccagagctttcccctagcccggatctcacccagtcgcccagcttggctctatccatactccagctccccctctgtttgttctcgctactgggtcgggtctgctcggccactgagtccgacccgctcctctgcacgcagtcgcgtcctgtttcctgctcgccagtgcgccctctcggctcgctcgactttaattcccaatcgcgtcgtcgatctcgtcgtttgccgtcaagtcgtcgaacctgtcatcctctgctcaaaccccacctcaccagctcgcttcaaacacgatctcgtcgtcgagcttcgccttagccttagctcgtcggtcacgctcgccagatgttcgatcaaggactttagctgaaggtcgtcgtcgttcaggcaactaccaaatcgagttgtgatgtggtacgttgattaaccacgagatgcggagaaactgagtcaagttgaccccaagcgtggactactccgcatggtgaagctgatggaccatcaagaagatggttaaatcaagcaagtgctcggtcgagggatactcgtcaagtggacgtcatctaacaaacactaacatagtgtttattccaggatataactttgtgctgctgtgatggtgttaagtgccggtgggctcggccttcttataagtctaagtaacccttctatacttcttattgaggatgatcccttgagctagcatatatttcaaacttatatttttgtaatcactccgataaactaatgtaaaatttttgtaacctgtaaaatttggtagtaagatttccgctgtaacaatattggtgtgtgtgatttgtgttacttaatcccgcggttctggttgtaagtggtttatccgatgtccttggggcaatcggacagatccggttaagttatctggtgcacatgcatagccgtccgaggtctttgagacaaggacaggtgcatgtgggcccaataacttgggaggttctgccacagcagggagcaggcgcaaggatcctctttactgcacatggaggcgagcacctcagatatgccctacagttgttatttccagcctttaacaatgcaacagaatatgaagctctgattcatggactgaacattgctatatcactgggcatcaagagactgatggtatatggagattctttggtagtcataagtcagataaacaaagaatgggattgttcaagcgattccatgggaaaatactgcactgccgtccggaaactcatgacattgaatttcgacctcgcactgccattaaaactcaagcaccggttgactttgtattggagtggaccgaacaacaagttccagattacccagaaactgcagaagtatggcgaatgtcttttgatggttcgttaaagctgcaggtgtaacacccctggtgtttaaataccgctcgacaacgagtatggatttaagcccgtaatatcagtggataaaacatatgctaaattttaatcatcttctatcgcgattttaatatcgcatctgtttctgtctatttagactcctaaaattttcgcgaatttcggaacgcaattgttctgaaagcttgcgagcctgtgcccaatn

SEQ ID NO: 1097 - DNA, 636 bp, Zea mays
  Peptide Sequence Number=SeqID_13889
  Probeset Number=SeqID_15500
cccctcctaaaaaggggatggacaagtttgacctttttttttttgcccattttgcaaccccgggggtagtttttggtgccgaatttacataaaaaatttttttggcgaagctttttttagaatttgtccggaaaacttcggcccccctgtttatgccccccctgggcctttttaaataaaaagggaatggatttatgggggtgggggggtccccccttttaaaggcgcccattatgggtgggcttcccccctggggaagaaacttttcccccccatcgtaatgtaatggggggggattttcgaatgccaaagcccaaagtcacccctggcttggaaaaacgtagggggtgccttaaatccccgtgggccccttttttgggccttccagaaccccaaaaagtttgtcctcccccggcctggccccccttttaagggggtttgtggggcccttccccaacgctcatccccaatgggggaacggggtttttttttgaaattgttttccacccagggttgttccttccaaaaaaaaaaaaaaaaaaaaaaaaaaaaaaaaaaaaaaaaaaaaaaaaaaaaaaaaaccaaaaaaaaaaaaaaaaaaaaaaaaaaaaaaaaaaaaaaaaaaaaaaaaaaaaa

SEQ ID NO: 1098 - DNA, 457 bp, Zea mays
  Probeset Number=SeqID_15501
ttaatcccgatcgacgccgaaagggccggccggcaccacccagccccgaaccccgacgccggggcggccccctggtgaaagcaccgcagggtcccacgccgtcgcccgtgcccgagctgtcaccaagagtttgctcccgagggtgggtcagggccctgggcactttcccgcgtgaaaagaaggagggagcggcccccacgcagggagcaagggaaaaaaaaaaagagaatgcctgccctgcatgcatggctgccccaggcaatttcgtcctaaaatgtcttactgtgatttaggaaatgaaaaatcaagctaagctggaatcatatattactacttccgttttcgtcttgttgggttgtgccgatttacaagaaccttttacttgccggtgatttttggaaatcgagaagttcatcatatttcctcccagaaaatctagaaataaacaattgcgagt

SEQ ID NO: 1099 - DNA, 759 bp, Zea mays
  misc_feature (684)..(684): n is a, c, g, or t
  Peptide Sequence Number=SeqID_13890
  Probeset Number=SeqID_15502
tgaggagtgcttcaacgcggtgctcaacatgtcggactgcctgacgtacgtgacggccgggagcacgacgcggcagccggacaagccctgctgcccggagttcgccgggctgctcgagtcccacccggtctgcctctgccagctgctggccggcggcgccgagtcctacggcgtcagcgtcgactacaagcgcgcgctcgcgctcccgggtatctgccgcctcaccgcgccgccctgtttccgccgtgcgcagttttcggggctccctatcccccgcgggattgggtgcctacatgccgcggcccggtgtcaggctctctctcacatctttctggcggccacaagaaagtgccgtgccaaacacgccggggccggtctcagccaaatcccctcaaagccacggtgccgggacgcggtcaaacgccggcgggccctcattcatccgccctcgcctgtgacgcgccgcccgccgggaattatgtttctagcaccatctcctcagaagttgtgttcgccagctcgctcgttctataatcaagaccttgttgattcccttccctccatatattccttcacacacaccaatataatgttgtgtgccatatatgaatttttatatatatatgaatactatattacccaccggtacaaaacacaacttattgcccaagccaaaaaaaaaanttaaaaaaaaaaaaacacaaaaacaacaaaaaggtgcggcctgtttctagagggattccaagacttacggtacgc

SEQ ID NO: 1100 - DNA, 1040 bp, Zea mays
  misc_feature (1040)..(1040): n is a, c, g, or t
  Peptide Sequence Number=SeqID_13891
  Probeset Number=SeqID_15503
ccggccgggcccccgcgctccggaacctggtagccgtcgcccgttccgtcggctcttcctcctagcgcactgcgcggtcccaagctacagatcttgctcctagcgccctgcgcggccccgagctacagggttcttgtccttttcataaccctcgacgacctcaaggccggcacccttccctgttgctgcgttggcatcgccggcgactcgctcccgctgctctacggcatctccgtcgacaaggtcatctgctgagcgcgccgcccttctcgctggagccagccaccatcgtgaccattatgcgcgcgacgaccatttcatcatcatccccactttttgggctatttgtgttgtgatcaaacaacatcttcaaaaccttggcgaagctttgaagaattagtggcctatacaagaccaaggaatcttgtcctttctttgcgacaccagtacgcgcaacagttatcatctacccaccacctatcccttagtgactagagagtgtgatttgtagtgttcagttgagctcttgcgcttggatcgcttcttttctttgccattctttcttgtgatcaaacactccattgtaatcaaggcaagaggcaccaattgtgtggtggcccttgcgggaagtttgattcccaagtgatttgagaagagaagctcactcggtccgagggaccgtttgagagagggaaagggttgaaaaagacccggcctttgtggcctcctcaacggggagtaggtttgcgagaaccgaacctcggtaaaacaaatccgtgtgtctcacttcttatttgcttgagatttgttttccaccctctctcgcggactcgtttttatttctaacgctaacccggcttgtagttgtgtttatatttgtaaatttcagtttcgccctattcacccccctctaggcgactatcacaaggtatcacccaccaagggagtgcagaggtttgggatcaaaggcaagctagcccctcgttacattggaccttatgagatcatagaagcatgtggacccgtggcatataagctgn

SEQ ID NO: 1101 - DNA, 1627 bp, Zea mays
  Peptide Sequence Number=SeqID_13892
  Probeset Number=SeqID_15504
ggtggtgaagacgcacgttgctctcgcgtgtgtgtttatcgctgtcgtattttgattgcaagtcagctcgacatccatcaaccaccatgtcaggcaaaccagcttttaaagtcgctgacatcagcctggctgattggggccggaaagaaattatgctggctgagaatgaaatgccgggattgatgtctttgaggcgcaagtacaaggagtctctacccctgaagggagcccgtattgctggatgcctgcacatgactgtacaaactgcagtcctcattgagacacttgttgctctaggtgccgaggtccagtggtctagctgcaatatttttagtactcaagaccatgctgctgccgccattgctaagacaggcgtccctgtctatgcatggaaaggagaaacagacgatgaatatatttggtgcatagaacagactttagtgttcaaagatgggcagccactcaacatgatcctggatgatggtggagatttgactaacttggtacatgagaaatatcctcagtaccttgctaacattaaaggaatttcagaggaaactaccacaggagtccataatttgtataaaatgatgaccgctggcaaattgaaggttccatgtattaatgtcaatgactctgtgacgaagagtaaatttgacaatttgtatggttgccgagagtctcttattgatggtattaaaagagctactgatgttatgttagctggcaaggtctgtgttgttgctggatatggtgacgttggtaaaggttgtgctcagtccttgagagcctttggtggtcgggtcattatcacagaaattgatccaatcaatgccttgcaagcatctatggaggggtatgaggtggtgacaatggatgaagcttccaaagaaggtcaaatttttgtcacaactactggttgcaaagatatcatcactggaaaacatttcctaagtatgagaaatgattccatcatttgcaacattggccatttcgattgtgaaattgaagttacctggttggagaaaaatgcagttgagaagatcaacattaaacctcaggtggatcgctacaagttggccaatggacaccacatcatacttctggcagaaggtcgtttagttaatcttggatgtgccatgggtcatccttcatttgtgatgagcaactccttcaccaatcaaaccttagcccagattgaattgtggaccaaacctggacagtatagtgttggtgttcacatgctaccaaagaaacttgatgagcaagtcgctgcccttcacttagaccacttgggagttaagctgaccaagctcacagctgaccaagctgcttacttgggcattcctgctgagggaccctacaagcctgatcactacaggtattaaatactgtcaaaatacacctctgcatttttcaacattgccatacaaacatcaatttgtcaacataccatgtgaaattaattttaaccagacatcaccctgtgaatatttgttgtgatacaatcttttttaattttacttctgttactttttactaccaaactggttttgcactttgaagaataaaagacaacattatcaaaaaaaaaaaaaaaaaaaaaaaaaaaaaaaaaaaaaaaaaa

SEQ ID NO: 1102 - DNA, 769 bp, Zea mays
  Peptide Sequence Number=SeqID_13893
  Probeset Number=SeqID_15505
tggacgcctgcggtaccggtccggaattcccgggtcgacccacgcgtccgggctggtgtggccttaagccctccgccaccatgagcggcaccttagcgaagatcgcggagatcgaagccgagatggctcggactcagaagaacaaggccacagctcaccaccttggcctgcttaaggctcgccttgctaagcttcgtcgagaactcatcactcctaagggtggcggcggcggggggccaggagaaggttttgatgtggccaagacaggtgatgctcgaattgggtttgtgggttttccatctgtggggaagtcaactctgcttagtaacctggcaggggtgtattctgaggtggcagcctatgaattcactactctgaccactgtgcctggtgtcatcagatacaaaggtgccaagatccagctcctggatctcccgggtatcattgaaggtgccaaggatgggaaaggtagaggtcgtcaagtcattgcagtggcccgaacctgtaacttgatcttgattgttctggatgtcctgaaacccttgggacataagaagataattgaaaatgagctggaaggccttggcattcgcttgaacagcaaaccccccaacattggctttaagaagaaagacaagggaggcattaacctcacagccacttgtcctcagagtgaactggatgctgaaacagtgaagagcattctggctgaatataagattcataatgctgatgtgactttgcgtagtgatgccacagctgacgacct

SEQ ID NO: 1103 - DNA, 581 bp, Zea mays
  Peptide Sequence Number=SeqID_13894
  Probeset Number=SeqID_15506
accccttggggcgccacctggccttgggttaagacgactcccactcccacaacaagggggggttgtaaattggctttgaccgggtggagggaatagagcttcccccgggggccccggccccggcggttgttaaaaaacaggtaaggttcgcggtggctccccccagaagccccggtgtggacaaaaccgtgttggagaaactgcccaaattgttcaaggcgcccgaggccggcccggggttcatcttgggcccctcgcacgtaaaaaccaagcccgggtggtcaatactcaaaaggttgcccgtgggggtgggttacaactttttgcgagggaactcccccggcccgaacgtggttttgggggtgcccccggggtccttgctcaaggtgggaatggtgtacgtcctgtaaccaaaacgtggcggtgatgggggactgcgatttttgggtccggttttcgcggggtgaactggggatctctcccccctgcaaaaaaaaattcctattatgcccatctcgacttgcccatgtataaattgtaacaaaatgcgatggtaacaaaggatgccctgccttttcccc

SEQ ID NO: 1104 - DNA, 388 bp, Zea mays
  Peptide Sequence Number=SeqID_13895
  Probeset Number=SeqID_15507
atttctcgtacaacaactcgattaaacaggaagtgatttggaactgtggaagttctgcccccgcttgcaggactcttgtttactggtcccttctgacggagcacggccgggtcgtctcaggggcccgcccgtccgtgcagactacgttcttggcggttgatagtttcccgctggcgattgttcgccgcgtcagttcatgtacgtatgtatgtgtgtatgctactctgcggtggcgaatgctttttctgatgcctctgtcgttgtgtgttcatcaccgtcgtgtgcgattgttctttgggttgtctttgcctcaataaccctgcttcattctccagtattctatagatgagtgctatgtactctgtacaacatagaacagagtacaaaa

SEQ ID NO: 1105 - DNA, 378 bp, Zea mays
  Probeset Number=SeqID_15508
taaccaaagacgtcatatgctccttaaattttaagaggacatctggtccttagattgtaaaatctcatggcgtatgtttagagggtatcagatggggtggttcaagcagacctgacttctcgtgttcctgtgcaccaatgtagtcgtcctgggtgtcgtgcacgccactggagatggaccttacatcccatcttcccatccatttgttttaagagctgctggtggtagagctaatggtgatggatccaagaagacagagaacatgtgatcgacctaaggcagtttcagctccagagaagaaggtccattactcatgcaaatgctaagagcaagagtgaaaagttccctaccctcacattaaggtggtacggttggtgt

SEQ ID NO: 1106 - DNA, 906 bp, Zea mays
  misc_feature (1)..(17): n is a, c, g, or t
  misc_feature (899)..(906): n is a, c, g, or t
  Peptide Sequence Number=SeqID_13896
  Probeset Number=SeqID_15509
nnnnnnnnnnnnnnnnncagctcccaatgtttccaccttcccctctcccgctgctttcctctcccagcgagcagtcagcagtcagcagcaccaccggtctcctccacaacaaaaaacagatattctatcgtcaacaaaaaactgcggcggcctcgagcttgttgtcgattccagctccatgcgcccatgatttactttacttgtgtaagatcaccaatctccagtctctactgctacttccccctttgcgttgctggaaaataattggtttggccatttagattcactaattttatgcgtggttcctcttcttatgtttctcatgtcttccttcatttttatccactgtttgccttcagggaagactaatttaaaaaaaaagatgatattggtactgaaataccatgcactgcccgtcatctattttttcatgttcaaagtattaagaagcataagcaactactccgcaagctatatcatttacgcactattaggctcatcgatccgctaatggatggtccaagtgatatttttgatggcatcctacggaaccaaacaaaactgcgtgtattgtctctgtcattttacagcagcagcaagttgccagaatctattggtgagctgaagcgcctccggtatttgtgttgagtttgtgatccaaattcttaagaagccggccggggtggcgagcgaagcggaggcccgtcgccgggaggcttgggccggcgttttagggaaccacaaatataaatccttctgccccccgcaggagatatctatctctctattgtaaatctcctgcgatctgtaaccccccaaaaatagtgagaagttaccggccggcgaaccgtggttttttccctttcaactttgaaggggttccccccgttaaaaaagtnnnnnnnn

SEQ ID NO: 1107 - DNA, 1238 bp, Zea mays
  misc_feature (1)..(171): n is a, c, g, or t
  misc_feature (887)..(1238): n is a, c, g, or t
  Peptide Sequence Number=SeqID_13897
  Probeset Number=SeqID_15510
nnnnnnnnnnnnnnnnnnnnnnnnnnnnnnnnnnnnnnnnnnnnnnnnnnnnnnnnnnnnnnnnnnnnnnnnnnnnnnnnnnnnnnnnnnnnnnnnnnnnnnnnnnnnnnnnnnnnnnnnnnnnnnnnnnnnnnnnnnnnnnnnnnnnnnnnnnnnnnnnnnnnnnnnnnnatggcgcccaagcccttcttcttcctcaagccagcggcgccctcattcctccctgcgcagcgccccttttcttgtgcctccagcagcaagaagctatcgcccctctccattttcccccacgtctcttccctctttttttcctgtacgtgcgcaggagtatggggcctcccatggcgccctcctccctggtctcccttgcgcagggcagccatggccgagctcgccctcgcctcctgctctccatgggcgtgggtccccatcctctccctcctcctcccaaagtgcaggtagcagtccagcagccatggacgcccaggctgggaaacgctggaactcgcgctctctctggtttgggtggagcagcgcctctctctgcgctcagcctccccaactcggcgcccttgctgcaggcgagcagcagctccctatccatggcgccactgcaatattccccttcctccccctcggccagccatggcgcagcgcctctgatccttcatcctcgcaccgcagcagccgagctcgccccacctcccctcactgcgcagcccctcgacgaaacgccgctgttcctgcagccccgacaccttccctggcttcctcgctgctagcgctgcgcgcgtgccacgtgttcggcgatctatccaagtggggtgttgagcagtgagcagcacgccgtcgacgcccgtcgtgtgctcgctgttttgcgcagcccnnnnnnnnnnnnnnnnnnnnnnnnnnnnnnnnnnnnnnnnnnnnnnnnnnnnnnnnnnnnnnnnnnnnnnnnnnnnnnnnnnnnnnnnnnnnnnnnnnnnnnnnnnnnnnnnnnnnnnnnnnnnnnnnnnnnnnnnnnnnnnnnnnnnnnnnnnnnnnnnnnnnnnnnnnnnnnnnnnnnnnnnnnnnnnnnnnnnnnnnnnnnnnnnnnnnnnnnnnnnnnnnnnnnnnnnnnnnnnnnnnnnnnnnnnnnnnnnnnnnnnnnnnnnnnnnnnnnnnnnnnnnnnnnnnnnnnnnnnnnnnnnnnnnnnnnnnnnnnnnnnnnnnnnnnnnnnnnnnnnnnnnnnnnnnnn

SEQ ID NO: 1108 - DNA, 435 bp, Zea mays
  misc_feature (413)..(413): n is a, c, g, or t
  Probeset Number=SeqID_15511
gcgagtacaagcttttttttttttttttttttttttttttttttttttggttttttttttttttttttttttttccacagggcaacagaatatgaggtatttatcagcacttcaccagtgcctgcggcttgccagcaaagaaattgcagccggcgggttgacatgatacagtaaacagtaacgaacacacaactgcaacccacctgccttcagaaattttgttataccgccattatgtacataataaaaaaccagttcagctccggcacttttattggcacgtctgccgcgctaaattataaggtcctcaggtttcatctgtccagtgtaccagtgcagtgcgcagtatgggtggcatgcaacggccgtttcgccagcccggattcagatgagactctcaaggagcgctgttnccctcccgagttcgacacgccc

SEQ ID NO: 1109 - DNA, 881 bp, Zea mays
  Peptide Sequence Number=SeqID_13898
  Probeset Number=SeqID_15512
aaccgcaggcccgatccctttccgcgtatcgtttgcgtgcgagcgaacctggcagagtggcagtctggcactggtctggtaggtggtagccaccgcgcccgcgcgccgctcgcgtgcacgtgaaccgcaccggcgccaccacccgccgccgcccgcccgtccgatggcacatccagcccccaccgcccagaaaaaacctaaccgcccaccacccatacccagcccccgccttatcctcctccaccgccgccgcccccgccccccaactactcgtcctcacctccacccttatcgccgcccgcccccagatctagatctgagcctcccgtgaccgaggccgcgggtagacaggcatacgatggccgatgagcctccaccgccgccgctagcgaggaagagcgcgccggcgcagccctggtcgcacgtcgagaccacgcacctcatcgacgcgtacgaggagcgctggacggcgctgcgccgcggccagctcaaggctcaccagtgggaggaggtggcggccgaggttgccgcccgctgcgccgccacccctggggtcgtcgcccagcgcaagacgggcacccagtgccgccacaagctcgagaagctccgcaagcgctaccgcaccgagggcgcccgccccgtcacctcgctctggccctacttccgccgcatggatcgcctcgaacgggggccactcgccgtcgcgtcttccgcctacccggccgcgactggttctccgcctgccgccgacggcgacgaacaaggagaggaggaagactacgaggtggaggaacacgaagcggaataataagacatgcacgacgcaaacgagcaggatgaaaaactcccccaacccaagaacaacacccggagcatcaacg

SEQ ID NO: 1110 - DNA, 657 bp, Zea mays
  misc_feature (1)..(56): n is a, c, g, or t
  misc_feature (657)..(657): n is a, c, g, or t
  Peptide Sequence Number=SeqID_13899
  Probeset Number=SeqID_15513
nnnnnnnnnnnnnnnnnnnnnnnnnnnnnnnnnnnnnnnnnnnnnnnnnnnnnnnngtgcagccacctccgagagcctggatgtgatggcgtcacagaagagaccctcccagaggcacggatccaagtacctggccacagcaagtaccatggaccatgccaggcatggcttcctcccaaggcacagagacacgggcatccttgactccatcgggcgcttctttggcggtgacaggggtgcgcccaagcggggctctggcaaggacgcacaccacccggcgagaactgcccactatggctccctgccccagaagtcccagcatggccggccccaagacgaaaaccccgtagtgcatttcttcaagaacattgtgacaccacgcacacctcctccatcgcaaggaaaggggcgaggactgtccctcagcagatttagctggggagccgagggccagaagccgggatttggctacggaggccgcgctccagctcacaaggggctcaagggcaccgacgcccagggcacgctttccaaaatcttcaaactgggaggaagagatagtcgttccgggtcacccatggctagacgctgaagcccgcctcgtggccgcagaaccctgtcctcagcttcttaatatcaccgccttcgacgttaacn

SEQ ID NO: 1111 - DNA, 983 bp, Zea mays
  misc_feature (1)..(124): n is a, c, g, or t
  misc_feature (953)..(983): n is a, c, g, or t
  Peptide Sequence Number=SeqID_13900
  Probeset Number=SeqID_15514
nnnnnnnnnnnnnnnnnnnnnnnnnnnnnnnnnnnnnnnnnnnnnnnnnnnnnnnnnnnnnnnnnnnnnnnnnnnnnnnnnnnnnnnnnnnnnnnnnnnnnnnnnnnnnnnnnnnnnnnnnnnnctcacgagcacaacagggcggccagacagggctcccacaggccatcaccacaacacacaaagacagctcagagcaggtcacacacaggctcctctcccccgttgcgcaacgcgctttcccccacttcacccgcctcggcgccatggctaagctcgcgctggcgctcctcctcctgctggccgtggcggcgtccgcgtcggccagcagcgggagccacctggatctcgacctgggcttcctctcctctggggaccgccggagggagtgccgcgggacggtggccgagtgcctcgccgaggagtcggatgaggagggccttgacctggccggatcccaccgccgcgcgctctacggcggcgggtacatcagctacggcgcgctgcggcgggacaacgtgccctgctcccgccgcggcgccagctactacaactgccgccccggcggccaggccaacccctaccaccgcggctgctcccgcatcacccgctgccgcggctgaggcggctccggatccgcccgactgccgaggaaaggtctggttggtcaaggtcccggccgggatatccaacaaccagcagtgcaacaagcaagatttacctgcccatcgatcatatcgtcaactggtccggcagttcgcgacaccatgagctccacggagtgcggcggcggcggcggcggcgccaagacgtcgtggcctgaagtggtcgggctgagcgtggaggacgccaagaaggtgatcctcaaggacaagtcggacgccgccatcgtggtgatgcccgccgattccgcggtgaccgtgttttatccccctatccgagtccgcatcttnnnnnnnnnnnnnnnnnnnnnnnnnnnnnnn

SEQ ID NO: 1112 - DNA, 361 bp, Zea mays
  Peptide Sequence Number=SeqID_13901
  Probeset Number=SeqID_15515
atggacgctctcatttctcggcgcacggcccagcttccgtcaaaatgtctactgggcacggaatcctgtgcaagctcagcttggagggtgatcactctacacccccaagtgcatatgggtctgtcaaagcctacaccaactttgatgctgagcgcgatgctttgagcattgaaacagccatcaagaccagaggtgtggatgacgtcaccattgtcaacattttgaccaaccgcagcaatgcacagagacaggatattgccttcgcctaccatagaaggaccaaaaaggaactttcatcaacactgaagtcagccttatctggccaccttgagactgtgattttgggcctattgaagacacc

SEQ ID NO: 1113 - DNA, 425 bp, Zea mays
  Peptide Sequence Number=SeqID_13902
  Probeset Number=SeqID_15516
ttttagaaaccccggttgggtaccctgggtctcgagtggcggcctccctgtggaaattttgctggtggccccacttacaatggaacaactggtggattccaaactatcccagttattgatccggattggggggaaccggtttcagagataacaaatttcattgagcttgaacctgaaaatgaagttatctcttacgatactgattctgggtacaatggcatggattagtattcaagtgaaggggaacagggtattattagggggggttctttcaggtccttcatattccaggggggaaattggtgccgattaccctggatggtgctcaatctccgccgatccaggagaaaggaggaaaaatctggggcttgacctggttccttcatcgggccggcgaggcatttaggaaaggattttgggatgat

SEQ ID NO: 1114 - DNA, 782 bp, Zea mays
  misc_feature (1)..(182): n is a, c, g, or t
  Peptide Sequence Number=SeqID_13903
  Probeset Number=SeqID_15517
nnnnnnnnnnnnnnnnnnnnnnnnnnnnnnnnnnnnnnnnnnnnnnnnnnnnnnnnnnnnnnnnnnnnnnnnnnnnnnnnnnnnnnnnnnnnnnnnnnnnnnnnnnnnnnnnnnnnnnnnnnnnnnnnnnnnnnnnnnnnnnnnnnnnnnnnnnnnnnnnnnnnnnnnnnnnnnnnnnnnnncaattcccctaaaatgaaaggatccaaacgtcccgtgggtaatttttggtatatttttctttgttatttcgaatataatgtagtaaatttgtgctttgtgtttctatttgacgtaaatctgcttaatcttgttcaaatctgacattaactattgtttgttggcatatacaggatcaaaacggaaaaaagcaattattgcaggcacgctgtcgtcccttctattcttgtgtctagtcattctcacattcttctctgcttacaaatacgggatgctgccattcaaatcgaaggacgaaccaaggatcgagtcctttctacagaagaacgggaacctgcatccaaaaagatacacctacgcagatgtgaaaagaatgacaagatccttcaccgagaagctaggccaaggtgggttcggagccgtgtacagaggcagcctccacgatggccgccaggtagcagtcaagatgctaaaggacaccaaaggcgatggcgaggaattcatgaacgaggtggccagtatcagcaggacttgtcatgtcaacatcgtgacactgacggggttctgcttgcaaggatccaagagggcgcttgtttacgagt

SEQ ID NO: 1115 - DNA, 633 bp, Zea mays
  misc_feature (601)..(633): n is a, c, g, or t
  Peptide Sequence Number=SeqID_13904
  Probeset Number=SeqID_15518
ggccgcttttttttttttttttttcacttaaaacatctcacacacaatcacataacaatatttaaatacatagtctcatcaattacatcacaaaagtctcatccatagtcataagacacatctcatccagtcataataagagacaatatctcatacatagtcataataaaagtctcaagtatcacaacacataacatggaagctcacgatcgtcgatcgccatcggggtatagcgacgagtgatggtcgatacctccactagcgaagagggcttcgacaaagtctaaccctgtcttctcgttcctgatgttcggtagcttgagatgtaggtgtaggtggaggtgaagaccaaggataatgtacgagaggtggtggtgctggtggtattggcaccaggacgtgtatcccttgggcctgtgctagttccagtggcgtatcaaaagcaaagaagttgcgcagcatgcttgttggcaacaaacaccatccttatattagacaggtaaattgtgccttttgtcttcacattaccaccaggagctctaaggatgtatacacctgcggcgagcttttgtggtatccagttaaattgtatgctcagctnnnnnnnnnnnnnnnnnnnnnnnnnnnnnnnnn

SEQ ID NO: 1116 - DNA, 422 bp, Zea mays
  Probeset Number=SeqID_15519
aagtctgtgaccaggtctgaagacccccgcgtctctcgtccggacactgcccagattagcagagccttccacccgtggcagttcgtttgtgtagccaaccccagggaaccggacatccaatactcgtaactggtgaccagcaatcaacctcgtgattaatagcaaacattgaaacgaactctgctgtgccactatgatttggttccctgaaacttggttcttgcacatcagaagttatgcgggtgcttccatatcttaaaaaggcatatggaaatgccatgcaaaaggttctccatgtaggccctgatagttgcacagtagtttctaatttgttgaaagaaggaaaggttgaagcttggggagtggagccttatgatttgtaaaatactgacagtacttgcataagcctcaggggcgagagc

SEQ ID NO: 1117 - DNA, 497 bp, Zea mays
  Peptide Sequence Number=SeqID_13905
  Probeset Number=SeqID_15520
aaatccaagccactgatcaaacagtcagcattttctttcttaatcacataataccctattggcaagagcacaacaatgatccaattggaaaaacaaacacacaaaagaagagaggaaatccagacaggaatatttgttcggaattgcctacatgagagtacaaattacacaattgatactctaaacttctctgatataaacagagtaagtttgacaacgataaacagagaaaatatctattgtgcccgcgtactctgcgttgttaccactgcttgcctttgtgtccagcttttgataaattagaaattcttaattgcctttttcctaattattttttgagaagcttttaaagcacttttcacctttgggaaatgacaattattgtttgtgtcacatcaatctcttactaaattttataattttctctttccctctaacaaaaatatagttataagtatttttttctttatttgtcacttgcgactattttttaattt

SEQ ID NO: 1118 - DNA, 368 bp, Zea mays
  Probeset Number=SeqID_15521
ttgtggagccaccatgacgacctccgcctgcctgcgtcatattttttctattgtggcgcctactaaaaataatctgctcgccgttgtacaacaacgtgacggctgaaacaaccccggcaccacacatattaatcgtgtagcacatcatccttttttcagctggtgtcataataacgaggagggcaccgatcgtcgttcttaacaacagttgagcatgcttgatggatgatgcgacccgcgctgcagcgcatcattcaccgcggctggtgtggtgtctacccgcatgaccactactatagttagcagcctactagccgctccttctgctgctttccctcccttctttgtcacgacggtcggctgttttc

SEQ ID NO: 1119 - DNA, 408 bp, Zea mays
  misc_feature (1)..(1): n is a, c, g, or t
  Peptide Sequence Number=SeqID_13906
  Probeset Number=SeqID_15522
nttagaaaaagaagtgttggtacatgattagtccaaatcatgatttacacaactaaccactgttatcatgtcagatggaagattgaacgccacttcatatcttagctttcatgagtagtatgcatctattgggatttcatatacaagattagatgctgaggcatacaacactataccacgtgtagcgtaatgacaaaagagttggtcatactcatggcccttcccttttgaatgtgcttatatatgtgctttcacgcaaactgtatgaatacatagtgttagtctacagcataatgtcctcacatactcgtccaacaacaaggaatcgctttgagatgaggagccacaagaaggggatcgatctctgcaggacaccatacgttggtaagcagatcaccttaaatacca

SEQ ID NO: 1120 - DNA, 352 bp, Zea mays
  Probeset Number=SeqID_15523
gaccacgcgtccggttcgccaagctcgccggttgctactttttcatgtgcgccgggaccgcagccaaggtggatctgctcaaatgcaagctgggattcgaccattctttcaactacaaagaggaacctgacctgaaatcggcgctgaagaggcacttccctgacggcatcgacatctacttcgagaacgtgggcggtgagatgctggaggcggcgctggccaacatgaacccctacggccgggtggcgctcatcggcgtcattttcgagtacactggcggcgcgcggcgcgcggtgctcgacctgcttgaggtgatctacaagcgtatcaccattctgtgcttctttttcta

SEQ ID NO: 1121 - DNA, 595 bp, Zea mays
  Peptide Sequence Number=SeqID_13907
  Probeset Number=SeqID_15524
cttcgtgaaaaccctaacggggaagaccataacccttgaggttgaatcatccgacaccatcgacaatgtgaaggcgaagatccaagacaaggaaggaatcccaccggaccagcagcgattgattttcgccgggaagcagctcgaagacggccgtaccctcgccgactacaacatccagaaggaatcgacgcttcacctcgtcctccgtctccgtggtggtgctaagaagaggaagaagaagccctacaccaagccgaagaagatcaagcacaagcacaagaaggtcaagctcgctgttcttcagttctacaaggtcgatggttctggtaaggttcagcgtttgaggaaggagtgccctaacgcaacctgtggtgctgggactttcatggcgagtcatttcgatcgccactactgtgggtagtgtggtctcacctacgtttaccagaaagaaggagctcaggcctgatctgctgctccatctctatcattttgaattgaatactgctttttttttggaatttggaagttgtttttggatgttgtggatcttatgttgaacttgtttgaatttcatatctaggtttttcttatggat

SEQ ID NO: 1122 - DNA, 657 bp, Zea mays
  misc_feature (264)..(264): n is a, c, g, or t
  misc_feature (440)..(440): n is a, c, g, or t
  misc_feature (584)..(585): n is a, c, g, or t
  misc_feature (593)..(594): n is a, c, g, or t
  Peptide Sequence Number=SeqID_13908
  Probeset Number=SeqID_15525
tgcatttggccatcgaatcacgctacgtagctcgaattcgctcagcggtacgggcacggtgctgcgctcatcgtggcgacgccattgatggtgatcttcagccccgtgctgttgccgctgccatcacggcagcgctgctcacggtaggcatcgtttcgtcgggagtggtcggcgtggctgcggtggctgtgctggcgtgggtgtaccgctaccttcagaccacgaccttcgtcgtcgggtcagcagccgctacatcgtcaaggnactgggcgcagctagcactcgtctggagcagacacgctgcgctactgaaataaaaaaaaaagcggtaggtacccctccggtttctttattattatgttgcatgtttagttacatattatgtcacgtgtttcgattaaaaaatgaacttagctgggaataactgagaactgggacgngtaaatatagctttttcatttacactgtacatgtaccggtaatcattatgtttgcagcaggtaataaatgtgtatatatatatttgcagctaataaaagcgaagagacaagatcagacccctccctacgcaataaaaaaaaaannaaaaaggnngctggcctctcgaagcctgaattctcgaggcttacggtacgcggtgcatgcgactgtcatagc

SEQ ID NO: 1123 - DNA, 327 bp, Zea mays
  Peptide Sequence Number=SeqID_13909
  Probeset Number=SeqID_15526
ccaatccaatccaaccccagtccggcgacggttccgggagaggagtgggatggacggggaagcgatccggatgggtggcggcaacttggcgcccgcctacctctccggggccgccacgcgaaccctaactgatctaatcccgcatgatgcccacaaagtccagcaccttgaccctatcctcgttatgtttaacccggactctacggtgctagagcttgtcggaagcacttcggtaccagcaaagggagcagctggttatattaatgacactgcacaccccgcccttactgttgtccaccaggcacgaactgtacacattaacgctct

SEQ ID NO: 1124 - DNA, 832 bp, Zea mays
  misc_feature (1)..(78): n is a, c, g, or t
  misc_feature (679)..(832): n is a, c, g, or t
  Probeset Number=SeqID_15527
nnnnnnnnnnnnnnnnnnnnnnnnnnnnnnnnnnnnnnnnnnnnnnnnnnnnnnnnnnnnnnnnnnnnnnnnnnnnnnggggaggtgggtcgacgcctcgacggtagcgagtacgccgagtagcgcggtgccgacgacggtgcggggttcgacaccatcgggcggtcatcgggagctcagcaacgagcatcgcacgatgcggggcagactccggatgggggcgggggcacgatatcctctggattccggccatgtgtgcttcaggtcggggctaatgccgctcgattggtggtagcgcctcccaacatccccgcacgtataggctcacctcaccgttcggtggcccaatcggtcaatcgaccgcggacaccaccaggagaggctcgttggcttcgatgccacagggagggtggtccccgtcggcgtcgtccaaagtcaggttcaaggcgcaggcgcacgagtggcgcgacacggctgctcctgatccggtgatgggttcccggttcctggacgactccttcaattgggaattccgacgacattcacgggggatttaaggacgagcgggggcgagcgaggatggaagggggcgcggcgtgggagagataatggaaggcagacaagggacgccattcacgacggctggaagtgagcgaggatggaaggggagcgtggcatnnnnnnnnnnnnnnnnnnnnnnnnnnnnnnnnnnnnnnnnnnnnnnnnnnnnnnnnnnnnnnnnnnnnnnnnnnnnnnnnnnnnnnnnnnnnnnnnnnnnnnnnnnnnnnnnnnnnnnnnnnnnnnnnnnnnnnnnnnnnnnnnnnnnnnnnnn

SEQ ID NO: 1125 - DNA, 489 bp, Zea mays
  Peptide Sequence Number=SeqID_13910
  Probeset Number=SeqID_15528
cttaaaaataaaaaaaaaaaaagaaaaaaaataaaataaaaaaaattaattagaaaacagaactaaaaatatgggcaaggtacatgcacgttcagaaaagattacaagctttcacctaacacaacagttggtgataaaggaagccgctcgattgtttcggcggcgttatacaaagcaaaccacagtaatgcgttttcgcagaacttgtcacaacaacactagaaagatctaaaaagattggccaatgatatgaaaggacttaaatattttagggctcagacaaagaaggctaatttccatgtcagaccaaggccgcagggaccggatcaaatgctgtcccacatgcgatcaccaacctgactcgcctccataggggcaagaactcaaggaactctttgtggcattggccatatccaaaggctgtttccaacaagggcaaaaacatggcgggggccccccaaaaaactttaccaatttttccagaggggc

SEQ ID NO: 1126 - DNA, 359 bp, Zea mays
  Probeset Number=SeqID_15529
ggatggcatcgaatgtgtgcttctggtgaataaggtaaagactgccagggtcttctcttctctggccaacagcccgcagatgagccccgcgtccacccagtgctgagtatcagcgtggtacgcttaggggtcccagttcctttagtgagacagaataaagcgagcagtttttttttgggtctgttttatgatggcagatctcttttgagatatgtacatgtccatgcagactttgtccccctaggttggtatagctcttttatccaggtgggagttggccagccggaagtctatgtaaccagtgcgcatgtatcattatataatcataccaacatatgtgccgcctttccgtcttaaaa

SEQ ID NO: 1127 - DNA, 875 bp, Zea mays
  misc_feature (1)..(7): n is a, c, g, or t
  misc_feature (875)..(875): n is a, c, g, or t
  Peptide Sequence Number=SeqID_13911
  Probeset Number=SeqID_15530
nnnnnnnagagagatgagaagacggggggtgttagggagctcgggcaccgcgcgcactgggcatctaaggggtcctcgcgtgtccgtcgacgcgagggctgggtttcctcgccgctgggtggcaaagatgtccgcccgccgtcgtggacctgcgtgtctgatgacattgaagcatcggcaaccatcctgggatgttccctgggacacaaggacggggtacgctgtagccagaccaactttggggccggtgcctaaccaatttctcgtcggcgtgggaacatcaccgcggatctgcagagcacgtggaccgatgtctcctcaccatcattctctgctataagctaatcgcttgtacgtgcccctaccagtccccgagagctccgtgtccatggactcgccaccgctaaacagagagtagggggaaagcgccgccgcgaaggcgtggccggccacatcgagcgggaccttggtgactgggagggtggccgagatgggtgctggtgaagggactcgcgcacgcggggcgccgtgggagtagtggagattgttcgccggaggtgtgaaactacgccaagttaccctccgtcgtgaacccgctcggccatcgcttaaccctccgcgcgaggtttcaagtcacctgaagttcaccctggtaactggatctcaagtgtcaggagaagaacaggtggtcgaagaggagccgcctaacactgaggcattcgacttgatctaggtggcgtttctcagtcgacattggcgccgacgatccttagttcgttttatggttattcctttattttgtaataagtcttccgctatgtaataattactctgatgttatgtgacatttatctctatacactctgttattatan

SEQ ID NO: 1128 - DNA, 513 bp, Zea mays
  Probeset Number=SeqID_15531
caggtcattagcaaattttaggtccacacctgtgcccctttggggcccttgacccgcttgtgtgtttcggtcccaccccgctcgctgctgcccttttcggtgtcgagtttgcctcctaggtttcactcccgcccatttcacccccagaggatcgtcatagcaacaaccagccccctaactatatcttctaagatatgtaaacatccacttttagtgatgctaacaaaagtataccataacaattagtgtttttctaagatatgtaaacagccccggtaaggtggagcaggagcgaggagggatatagcggcagcggcgtctggtccaaatctccccccttagataaaaccttctggaaaaaactatgctttgctcccctttttaccattcaaggcctgctttatttttcttttatcgcccaaatctcccaactttttaggttctttttttttgtaaaatataacaagctgatttaatcttgcaagttattcaatgtagccctcatccttatcc

SEQ ID NO: 1129 - DNA, 432 bp, Zea mays
  misc_feature (34)..(34): n is a, c, g, or t
  Peptide Sequence Number=SeqID_13912
  Probeset Number=SeqID_15532
caccgggccggaaaacccggggcgaccgacgcgnccgcccacgcggccgctcaagtcgatgtattctctgatatccagcctctgatcagagcggttcttgatggggggaaggggtgcatttttgcctatggtcaaactggttcaggaaagacttacacaatgagtgggccaggcacatcaaaagaagactggggtggtaactatcgagctgtaaatgacttgcgtgatatctctctaaggaggaggaatgctggctcatatgaggggggagtgcagatggttgagatttacaacgaacaagtgcgggatcgtttatcaaatgatattgcacaaaaaagacttggaattgggaggacatctcagcctaacggacttgttggccctgatgcaaggggacatccagtcaaatcaacattggatgtgctagagttg

SEQ ID NO: 1130 - DNA, 443 bp, Zea mays
  Peptide Sequence Number=SeqID_13913
  Probeset Number=SeqID_15533
ccggtccggatatttcccgggtgcgagcccactgcgtctcggggtttgtacacggtggctgatgattcgtactgggaggacacacatctctatatagtcgggtttgtacagcggtgtgctgatgattcgtgcctgggggaccacagaaaaggggatcctatatactcagggcagttgagggaaaaatatccaccgccctttcttgatgagctttacactttgtttggtcgaaccacacgcaacaagggcaatttgattagtgctggaggtgtccgtgagcccccgcgaacctttggcagccaggatactcctgatgacggtgtgggttgctccaatattagatcatcgtctaaaaggccaatcagggaagccacaatggatagccatcctaagaaaaagatgagtttggaagagcacattgctaatatttctgagtccatttg

SEQ ID NO: 1131 - DNA, 1043 bp, Zea mays
  misc_feature (601)..(1043): n is a, c, g, or t
  Probeset Number=SeqID_15534
cggacgcgtgggcggtctcgtgttcgggcacgtcgagcaccaccgcctggccggcgtcgtcctgttcgcgggcctcgacgacgtgctggacctccgcctcttcgaccagatcagggagatcagcgcgttcggtgcgtggccggtggcgacgatgtggcgggacgagagggaggtcgtcgtgcggggccccgcgtgcagctcgtccgcggtcaccggctggttctcccaggacctgagcgacggcaccgtggctgctgcctctaccacctccttcatcttggcccacaggaattgtcggaagatcattccttaggacctcctattggaaaaacagggattccggtcagatagtatccgcggctaataacacatataaccgcattggtcgcgaggccggtgtagacgaatatggcgggacgagtaggaagttgatcgtgcggggccccgcgtccagatcgtccgcggtcaccggctggttctcgcaggacctgggcaatgtccacgcggtgtcctgttacaagtcctccacggcgagggcgagggcgatgccttctcacgaggtggacgtacacggcttcgcattcaacagttccgtaatttnnnnnnnnnnnnnnnnnnnnnnnnnnnnnnnnnnnnnnnnnnnnnnnnnnnnnnnnnnnnnnnnnnnnnnnnnnnnnnnnnnnnnnnnnnnnnnnnnnnnnnnnnnnnnnnnnnnnnnnnnnnnnnnnnnnnnnnnnnnnnnnnnnnnnnnnnnnnnnnnnnnnnnnnnnnnnnnnnnnnnnnnnnnnnnnnnnnnnnnnnnnnnnnnnnnnnnnnnnnnnnnnnnnnnnnnnnnnnnnnnnnnnnnnnnnnnnnnnnnnnnnnnnnnnnnnnnnnnnnnnnnnnnnnnnnnnnnnnnnnnnnnnnnnnnnnnnnnnnnnnnnnnnnnnnnnnnnnnnnnnnnnnnnnnnnnnnnnnnnnnnnnnnnnnnnnnnnnnnnnnnnnnnnnnnnnnnnnnnnnnnnnnnnnnnnnnnnnnnnnnnnnnnnnnnnnnnnnnnnnnnn

SEQ ID NO: 1132 - DNA, 378 bp, Zea mays
  Peptide Sequence Number=SeqID_13914
  Probeset Number=SeqID_15535
gcgatgtgtgtcaaagaggcaaaactgaacatcggatgctagctggactactgcacccgataaagatacctaaatggaagtgggaagaaatcggcgtggatatcattgtcgggttgcctcgcaccccgaaagggtatgatttgatatgggtgattgtgcataggctaaccaaagtagctcacttcattctggtcaagactacttacaagggatctctgtcggcagagttatacatgacatcggattgtgtgtttacacggtgtaccaaagaagatcgtttctgatcgaggctcacaaattacctcaagattttggagaagctttcatgaaaatgtggatacgaagttgagtttcagttcggtctatcaccctcaaact

SEQ ID NO: 1133 - DNA, 508 bp, Zea mays
  Peptide Sequence Number=SeqID_13915
  Probeset Number=SeqID_15536
aagaacagcttggtctgtccaaaaaatcaaaatgaaatctgagggaaaaaaagaaaaatatttgccatctatccactcggtattgtgctataatgatgttaatttaatctggttggagatggcaaattatgtgcctgcaggagctgggccagtggactccgattctactgaaccgtttttctgttgagtttatgatctaaattctacatataaaggctggtttcccccgaaccccccttccaaactagttgaatggttgataaactgtctatttggctatactccgtgttgagtttgtgatctaaattctacatataaatgccgtgttggcgtcgctacactccggcccgaggggcggagccctccgcagtatatattattgaccctaattagggtttgttgtgcgtcgtcattatttactcctcttgtaagccaccgtctacagacgacattctgtaaacactccatatatagtaaaggtttcgtctggccaaaaaaaaaaaaaaaa

SEQ ID NO: 1134 - DNA, 1555 bp, Zea mays
  misc_feature (1555)..(1555): n is a, c, g, or t
  Probeset Number=SeqID_15537
ttagaaaagcatcacagatgattgcagatgttcttgaagaggctgttaaaagtcgacagctcgactactctcatttcatatcacttccattggctctccgcccatatcttgtcgagaaacggaaccacttccagagttgaatccttggggaagaagacagtgacaaagatgagagccgaagaacatgtttgaaacttggtctctagcttggtgggaatatccaaagaaaccacaaagcaccatcttaaacaaaatctctagaaagttttccttgtgattaggatttgaaatatcacctctgttctatgaatttctaaaatctaaatttaaatgtcttgttcccttcaggctttgagttgtttatttgtcacctgtagattttggcattgacaagtcgaccgatttatcaaacccgaaacgtttcacctgacggttcttatgttgaggttgtggaacaaggagcgtatagctaaggccgccgatgtgctccagtcagtatctacccaaggtaatgaagctttggaaaatattgacttgtcaatgacaaagatgggagccaaagtgaaggttctactgatgaaatggactatgaccacaaacatgcaccaacaaaaatgggtgccaaaggctcccaatcaaattttggcattgacaagtcaatatttatcaaacccgaaacgtttcacctgacggttcttatgttgaagttgtggaacaaggaccgtatagataaggcctcggatgtgctccagtcagtatctacacaagtaaatgaagctttggaaaatcgacctatttccatacagcttagggggccgacatgcacgaaaggctttccagctaaggctcgggtggtatatgttccagtgctggaagttggtagcgaagggcgcctagctcgtgcttgcatcataactgacgcctgcaccagggcaggcctagtttttgaaagggacgtgagagaactgaagttgcacgcgaccgtaatgaacgtgcggcacaggaagagcagaaataaacggaacacatggacgaattcgtttgatgcccggggcatattcgggagatttgggaaggcggagtggggtgcataccccatccatgagatccacctttctcagaggttcaagtttgacagaagtgggtactactattgctgctcgtcgatccccttgcctgcggagatgcacacggagtgaccttgttattagtggtaggtccttaggggccaggtgttaccatgtatctatctatcgatttgaatcaccgatgggcaggtgttaccgtgcatctagtgttttgaatctgaatccccgatttgagccgttgttggatgctgttgtatgttacaagcaatggcaggcactggtagtgggttcccctgttgtaaagttgtagttggtgttgaactgttggttgttattgcctttccatatgacccattccattgtggagccgactcactcacaggcaggcaggcaggagcagtatctatcccttctgctggcctcagctcctcatatcacctattgtgatttgcacaattgcacctgtn

SEQ ID NO: 1135 - DNA, 398 bp, Zea mays
  Peptide Sequence Number=SeqID_13916
  Probeset Number=SeqID_15538
ggattcacagccatggatatccactgatgcactgggcagcttgggctttagcatgatgtttacatggcgagctctaccacaccgtcttcgactacggcaagctgagggttggcttcgcagagtcggcctaaggatatggtttggcgcctcgtccagaggcgaacgcatgcgccgagagagaagcttagcttgtttttaacttgtgtctttatgcggccggcgatgtgtgtatatatgctactacatgtttagtgatgctttcagagaccagagacaacgcccatctgttttaacctggcgcaagaatatttctggatgtattggtcatcacgcttcggcctcttgtactgaattgttgccgtgcaccctagcaacgtgtactgaagaagtattttcac

SEQ ID NO: 1136 - DNA, 345 bp, Zea mays
  Probeset Number=SeqID_15539
gattagccaactattttgatcactttcctggtgaagcgtactttatttgcattcttatgtacgttttatacataatagtctctgcttttttcattggatcgggtggatttaatcagctgacaggccgattcaatacttctcatttgccctaccggtatgctcattatttcggtcattactcactttctcttttgacattaacattggcttgctctcgtgtttgggtgcgttttgacaaggtaacatttgttttggcacacaaactctacacaaactttattatgttcactttaaaactcactcggtcatttttattttaaaaaaaagagtttatgttcaacgttt

SEQ ID NO: 1137 - DNA, 367 bp, Zea mays
  Peptide Sequence Number=SeqID_13917
  Probeset Number=SeqID_15540
gaaaaattgaattcgaaatgaatataacatcgttgttcaatgtgaaaggaaaagttggacttgttactggaggaggaagaggaattgggtttatgattgtacaaggatttgttgaaaatggtgcaacagtaatcatatcttccagaaacgcaaaagaatgcaacaagattgcggaagatcttatcaatagaggacctgggaacatgttatgcaattccagcagatttggctaaaatggaagaatgcgtgagacttgcataagaaatcgcgaaagaagaatcatatttgtacattttagtcaataatagtggtgcaggatggcgagaagaatatgaaacttatccagaatgtgcatttgataaactct

SEQ ID NO: 1138 - DNA, 886 bp, Zea mays
  Peptide Sequence Number=SeqID_13918
  Probeset Number=SeqID_15541
cattcccaacccgcaaatccatccacgatcatcacaactttgggggtttcccatcttacaacaacactttcccatcaaccactactcctcttcatcaagatgactggacgcggaaagggcggcaagggcctcggcaagggcggtgccaagcgtcatcgcaagattcttcgcgacaacatccagggtatcaccaagcccgctatccgccgtctggcgcgtcgtggcggtgtcaagcgtatctctgctatgatctacgaggagacccgcggtgttctcaagtccttcctcgagggtgtcatccgtgacgccgtcacctacaccgagcacgccaagcgcaagaccgtcacgtcgctcgacgtcgtctacgccctcaagcgccagggccgcaccctctacggcttcggtggttaagctgctcgtccgtctggcgacgcggagctgtggacggcggcggtgggagcagacgccttgttcgttctgctggcttggggcatttgtttcatctcttgattgcagcgaagcaaagagcgccaccagcgatttgtctttttctctcgttttggatcccatttcccctcacgtccttccttggcggcgacgggtcttggtccgtgggaaagaaggatgatgggaggagcgtcgaggccacgcacacaccatgaaccaaccacacattagggcaggcatgaatcaccggcatcttttgcgtttttgttttctgtacatggcgtttggggctgggattactactggggatgggatcgttcatgatacacccgttatgatgtggtcgtgagacaaatgaccagggcgtcttgggaggagggacgacaggagtgggtagcgcacccgacgaagcaaattcgatgaattgaacacatgaaaa

SEQ ID NO: 1139 - DNA, 314 bp, Zea mays
  Peptide Sequence Number=SeqID_13919
  Probeset Number=SeqID_15542
tcatccaggccctgaaacattccaaaggaaagtgcttataataaaccttgattacttgatgagcatgctggggtcacggttcaacatcaatattccaagactacagaccccgaataggggatattcctttgaatctgcctgctggtgatacttcaactgaaagaactgtgcatattgatggcactcaagaacaaattgaacatgcaaagcagctggtggctgaggttaccactgagaatcgggccaggaatccaatgtctggtggctattctcagcagggctatcaccctcctcgtcctcagtcaaactggggc

SEQ ID NO: 1140 - DNA, 1448 bp, Zea mays
  misc_feature (1)..(110): n is a, c, g, or t
  misc_feature (1419)..(1448): n is a, c, g, or t
  Peptide Sequence Number=SeqID_13920
  Probeset Number=SeqID_15543
nnnnnnnnnnnnnnnnnnnnnnnnnnnnnnnnnnnnnnnnnnnnnnnnnnnnnnnnnnnnnnnnnnnnnnnnnnnnnnnnnnnnnnnnnnnnnnnnnnnnnnnnnnnnnngaattcgagatgaaaataacaacacttataaccctaaaattgtgcgcattggagtgaaggcccttcattctgttaaagcagtttccatggattatcttattcaacaaaaactttctggtgtagatcgcacattagatggtgggagacgaggtgctggtgaatatgatcggattagagcttcaatactggacgaagcagccattgtattttctactctgagtttcagtggatcatcaatttttagcaggatgacccgtgcttttgatgttgttataattgatgaagctgcacaagcggtggaacctgcaactcttattcctttgatccatggctgcagacaaatttttcttgttggtgacccagttcagttgcctgcaactgtcatttcacagactgcacagaagttgggatatggaacgagcttgttcaaaagatttcaagctgccggttttccagtgcaaatgcttaaaatccaatatcgcatgcatccagagattagtacattcccttcaaaagaattttatgaaggggtactacaagattttttttttttttttttgataaacatggaacaaccttgttgagagtgccaaggagcgaaattgcttattcaaggtccccaagccattgacggcaggctttgcagcggataaccggcggacgaaggaggcggaaaggcgagcacagccagctgtacaggttgtaggatctgctgcgacattgaagcaagataaacactggaacaaccttgttgagcgatgatgcgggcgaacctgcatatgcaggggacgccagccattctccgatggatgctagcggtggaggtgatgatgattgatttgaagatgcaacggctgcggtggcctaggtagcgcatattcgtagactacaggtatgcagaaggagtcggtttgcttgtgaagacgtagtgttttctgaagcttgaaaaaaaagggaacacggagattttgatatggatgcagactgtggagaaggcgataattgattgtaagaccaaaagaattgattttcctagaacgaccaatgacgcaaactactggtatataccaggaaaaagaattctagggtagacgtagtgattgctgagggttgaaaaaaaatggaagcgatgattcttttctcttatctaattatggggagaagctgactatcgtagagtgcaccaccaaaattattttttgtgaaactgcagaggtgacaaatatgtcgcttatgtctgttttccacggttcacagttaaattgatggggctggagcctggaggttcaccagctccagtatttgtctnnnnnnnnnnnnnnnnnnnnnnnnnnnnnn

SEQ ID NO: 1141 - DNA, 501 bp, Zea mays
  Peptide Sequence Number=SeqID_13921
  Probeset Number=SeqID_15544
tagcaagccagcaggccgactcccggtagtcattgacctgggatgcaggtttagtagggctagaggcagggagagattgagtcccaggcgcatgctagcgtcttccgcccctgttcttttttttcgttgtctatttctttccaattcataattttcccatttaataatttaatattccaatgcctgtgtcataatttatgccccaaataataaaaaatgcaatttgaacatattccaaaaatgagaaggaattcatttatttataaattttatttggtgttgtataatattcttttcgttcctctttttcctattttcctttcaatttcaagatttaaggattcaaactcctattttgaacttcaaatttccaaatatcaaaattcctactaatgtgaatatgtactctattgtttagaatatgattatttattattattatttttattccctggcatttatttatttatggaaggaattaatgggttcatttaaaatttc

SEQ ID NO: 1142 - DNA, 448 bp, Zea mays
  Probeset Number=SeqID_15545
cacgtctaatcaacgtagagccgcagagaagcgaaaaaattggggattgggaggctaaaacagaactaaactagaactactcctagggccttaggttaaaacgagagatagactggttattgactccactgccgatgtatcaatcggcatgtatccctctatatctatagaggaggtgggctggacccgtctcaaacaaatctcgtgagttaattacgcgaatctagccaacaactgtaccatgatactcggaaccctaactgactccgggctgcgcggaccatccgtgctcaccagtgcggaccgttcgcacggtcaatttgcgttccaacagttccgcgacacataaatgtctgaatcgtggccgggattttctttagggcacttacttgaatttcgcgtgaaacatggtattattaatgagaggacaccgtcaaactcaccacat

SEQ ID NO: 1143 - DNA, 1331 bp, Zea mays
  misc_feature (1)..(70): n is a, c, g, or t
  Peptide Sequence Number=SeqID_13922
  Probeset Number=SeqID_15546
nnnnnnnnnnnnnnnnnnnnnnnnnnnnnnnnnnnnnnnnnnnnnnnnnnnnnnnnnnnnnnnnnnnnnncacgggcaggagaaatttctcccatccatggcgccacaaatctccagccgtcgttctccctgctcctctatccctagtgcacggcgccgttgtctctgctctcccttccatggcgccactcctcgccagaatcttgctcgcctatgtgctcggctccaggaacaggcgcccccctgcatctcccatggcacatggaatctccaagtgcaggcgaccaacactttccccatggcgcccctctgcatctcctcccctggtgactaccgattctctctccagttccctcctctctgttccttgcgcataggaacttcttctccaagaccggcgcttgttttcccctgcgtcttcttccatgcgcactcacctgtaggtccagcagccctccccaaccaagcttctcccatggcgctgctacctccaggatggagctcgacaccccaaaggttggaatccgaccctctctctgttcccctcaatttcaagctcccctggcctttctttttgccctgcagaaattccccctgggcgctggaggcgccaagctcacgctggagcacgtcaaggcttgaccgacactttttccatggctggctttgagcagtgagtcgagcccctcttcttgccatggcacttgacccctgctcttctctgccccacgacgcccaggcctcaacgcccctgcgtacgttcctccatggcggcgggtcagcgcaggcatcttctgcccatggcgctcggcacccaaccagcaggaacatcgccctccgtcctctctgtttcccttgagctcaagcgcaggaagtctgtcgcctccctctgcgctgtgcagcagcgccggtctacagcagcagcctcgacatcccctctacgtcgcgccctcggcgtgctcgatgtaatgccgcagcagcgacgcccttcgctgtgtcacgctcgctaagtcgggcctcacgccgtcgctctgtgcagcgtttctgcgttgtcgtcaaaacccatgcatgtgtcgtcgtcgcgcttctcgcgtcgtttctcgacaggaagccaaatcaacatgcatgcatgcacaactccacttgggtctcagccaggttgttcgctttagaaaaattgtggtttttgttttatttacgattcagtcgatggcataaatatgtgtgtgaaaatataattgtatgaataaacgcgtgtagagaagaaactgaagtagaaaagaactcagacatttttatatttgataggaaaaatatgcgatgcgttgttt

SEQ ID NO: 1144 - DNA, 299 bp, Zea mays
  Probeset Number=SeqID_15547
agaattggcgctgacttatctcaagaacattggggggggcagaatataccgggccgcgctgtacaaactttcatgattttctggtttactggaatgccttataccactgcttattcagcatagcacaccttttgcacgattattcctaatttattggtaattcagccatcaagcatatatgctatcatttacctttgcactaattggcagggtgacatcaaagttgctccaggatctcttgcttatgaagaatcagttaacaagccactgaacgtcatggagagggttgcagcagcctt

SEQ ID NO: 1145 - DNA, 305 bp, Zea mays
  Peptide Sequence Number=SeqID_13923
  Probeset Number=SeqID_15548
aatgatgacaccccgctgctgaaggacatcgccgccataatagattagagagtataaaaggtggaagggcatcaatagtaaaatgattgtgtggcacataaaagggcgcgttcgcactccacaccccccccatacatgagagtatataatttaaaatttcaatggactttagactctagtatatgtcatgtgcggacgtacctacaccaggcgcaggcgcgccaacgacgtgcgccgggccaaagagcgtgcgatacgcgtgggcggttaggcgcgcacgcactggtttgttacggacgcgtggg

SEQ ID NO: 1146 - DNA, 354 bp, Zea mays
  Probeset Number=SeqID_15549
gtgcatcgttaaggtggcaccacggccttggtagttgaagccactatccgtaggataggattctctcgctcgatcgctggatttcttcagtctgtcacgctgtacagcacatagcacagcaacgttgcttatatattatggattatttcgttcccatatccaccggatctggggacagctggatacagtgtacaggtacatctaaactacgtggcactgcatggtacatagaattcgttttcttttttcccttgggagccgaggcttcaatgaatctaagaaggcccgagctggaattcagtttattgtctattttaagcaaaaatgattaacaaacaattattattaaagaaa

SEQ ID NO: 1147 - DNA, 601 bp, Zea mays
  Peptide Sequence Number=SeqID_13924
  Probeset Number=SeqID_15550
tatgaaggccatccttgccatcgctctttgcctcatcttcgttgccgccgcttcggctcacgtcaccgttgtcggtgctcgtggacccggaatcaacagccctgggtacatcaagtccaactccatggatccatgcggaaatggaacttacgatatgaccaaggccatcaacgtcactgctaatgacatcttccccgttacctgggctctcttcgtcaaccacaacatccctccagccgtcgccggatccatcaacttctactggggactcgaaggaaacgccgtcatcgaccccgttccagtcaccacccaaccagccaacacctactacaccacctacttcgtcgtccctgatgtcttcgacgttgccaccctccaaatcgaatacaacaccaacggtgctgctgagaactacttccaatgcattgacttcttcatcgccccctcagcgtaaaaaagtactctgctatcctcctgttacgtgggaatttgctttgcaaatgaagccgatctaaacaataaagcccaaaaaaaacggaaaaaaaaaaaaaaaaaaaaaaaaaaaaaaaaaaaaaaaaaaaaaaaaaaaaaaaaaaaaaaa

SEQ ID NO: 1148 - DNA, 700 bp, Zea mays
  misc_feature (1)..(1): n is a, c, g, or t
  Probeset Number=SeqID_15551
ncgagcggccgcccgggcaggtacgcgggggccctagtgttctagccaaagcttgcaatggtgtgagggattcatgtgtattgcaagccaaagctcctctcccactgccaccaagttggcactgtccagagctgtgtgcgctgtcttcctgtgtttgtgatgaccacagccaccaagttcaccacaccatagccagaacattctagggagttgctggcctgtatgaagcttgttccgtaatcatctcagagctcccagcagaaggagtgtaaattaaagatgaagtggtcgtggaagaggagtttgctccagtgcatgttcatcaagtggatggagctatctaactggttattgggtagaagatctagaacctcttcattgcaataaggtgatgagaagtactcgagccgttcctgaggctggagagcgtttccagttctggaggaggactagctaggtttatgtataagctttggagggtttctaccttcctgcttttgtaataagttatgcactttgagtatatcagaacttgtaataaatattactctttcgaaacatgtaaaacttgagttttgaaaaggtaaagaatgtttgtaaaaaaaaaaaaaaaaaaaaaaaaaaaaaaaaaaaaaaaaaaaaaaaaaaaaaaaaaaaaaaaaaaaaaaaaaaaaaaaaaaaaaaatataaaaaattaaaa

SEQ ID NO: 1149 - DNA, 870 bp, Zea mays
  misc_feature (1)..(209): n is a, c, g, or t
  misc_feature (836)..(870): n is a, c, g, or t
  Peptide Sequence Number=SeqID_13925
  Probeset Number=SeqID_15552
nnnnnnnnnnnnnnnnnnnnnnnnnnnnnnnnnnnnnnnnnnnnnnnnnnnnnnnnnnnnnnnnnnnnnnnnnnnnnnnnnnnnnnnnnnnnnnnnnnnnnnnnnnnnnnnnnnnnnnnnnnnnnnnnnnnnnnnnnnnnnnnnnnnnnnnnnnnnnnnnnnnnnnnnnnnnnnnnnnnnnnnnnnnnnnnnnnnnnnnnnnnnnnnnncgccgccggcctccgccgctgggagatcggcgtggtggcctcccggatcggccagctctactacgcgcgctacctccgcgccgccgagccgcgctcgctcgtcggcgcctacgtcttctacgaggccatatacaaccgcgactacttcggcgcggccgcagctgcggtggggacggacggcggcggcgcaatcacaggaatcatcgccctgtgcgtcgtgctcaagccgccccgccatcatcgcccctcgcgcaccttcgttcggcaaccttccatatcgctccgcatccgtgctccccctcacgcaataccaggaaaccctccattaccgcctctcacccaacatcctctgctagcccccgccgcactcgcctcccgaattcggccgccacggctcctgccccagcccacctccctacagcagctgcagttccctccggcctccagtggtctgtcacgccgcctcctcgtccagatccgtccgtggtccgcccctccggcctcgcccagctccaaagctccctcatgctcgcgggcacgcggcctcgccctggggccaggccctgggtcgccgtctccggcatctgggttgaggggtgagcgagaaggttaagaggcacagattgnnnnnnnnnnnnnnnnnnnnnnnnnnnnnnnnnnn

SEQ ID NO: 1150 - DNA, 429 bp, Zea mays
  Peptide Sequence Number=SeqID_13926
  Probeset Number=SeqID_15553
aggagctgctgaagaacaggaaagggcgggtgagcgagacctggcctggcgcagtggaggaggcgcagctgctgctcgccctgatcgatgtcaaggtcgtgtcgcgggtgctccgggtggggaagctgagcagggagcagctgccgtggcgcgaggagaagctgagcaaggtgggcctcacggagaaccggctgcgccgcgacgggtccccgatcctcttcccctgttgaccgacgcagcatgtcatgccgcgccagagagctgccttgccattcactttgtttaccttctgagataagtacatgccttcaagcctaattgatgatgcacataccaaaccaaagttgatcactgagttgagtttagtttatacagtgcagcatggggcaacatgcttcgtttcacttcaccggaagcatatggtttctt

SEQ ID NO: 1151 - DNA, 1298 bp, Zea mays
  Peptide Sequence Number=SeqID_13927
  Probeset Number=SeqID_15554
aattcggcacgaggggaaaaccctagacgagccccccttgcaacggtcagatccattcctatatagtattcctccgccgccaacctcctgagcatcccatatctgtgtgtgctcaattcgccatccacaaaatcactgcacccgatcatcgtatcaggaggagaaggtaagagacgtgagggagatggaggcggcgacggccatggatttccacacgctctcgcgccgggagctccaggcgctgtgcaagcgcaacggcgtccgcgccaacatgaccaacgccgccatggccgaggcgctgcagggcctaacctcggtcgacggggtcgacgagatcggcacgactctctgtctgccgacggcgacgccaggaaggtcggcgatgaagtcggcggcgaagatggtggccgtcgaggagcagcagcacggtagcccgctcccccgcggccgccgcgtatcggtaaaatcaccagaggccatccggatggaggttggaggagaggacgagatgaaggagaacgtgaagactcccggcgtggtgctgcgcagcactcgccgcggtattcgggccacacccgcgcctcttcctactccggttccggcgtccagtgcgcgcgcaacagcgaggaggactgccgttcgtaagacaggcgaggtggcgccgaccccagccacccgcaggaggacggcgtctcgcaaggccgcgggggcagtggaggctgaccgacacgccgaagatgtatccgaggacaagacatcgaagatgacgagagctttggatcaggaagccgaggtggtggcggtcgcatcaaaggaggagaaggggcagcaagacgaaccgagagctgctctctcggatgtgaaatgtgatgacccaaagggggaggagaaggtgcagcaagaggaaccaaaagccgtggtcttggatgtgaaatgtgatggcccagagcaggaggaagttgtccagtttttggaaggggacaacaaagtggaggaagtggaggagggtgaggaagttgattcttctgatgcaaccacagggtctgcagctgttttgggtaacagctgcaatgatcctaacgtggaggaagtggtggctgtcatggaggaacagttcacagagccccatgaaggaattgtgaaagagcaggaccctatcagtgttgatagatctgcttcagtggaagtcatggatgattcaccattcctaggtgtgattgagaagaaacacgatgcctcatttgaagattgtgaggacttggctgacttctaacctgcaagggaaatgactaatgaag

SEQ ID NO: 1152 - DNA, 624 bp, Zea mays
  misc_feature (601)..(624): n is a, c, g, or t
  Peptide Sequence Number=SeqID_13928
  Probeset Number=SeqID_15555
atcatcactaccaggagctcaatacaaatgaggggagtgtaccatctataccgtcgtgattcaaaattgtgcatattgtcatccatctgttacaaattacaggtcgttttagtttttctagatacatagttttcttatacacctagctacatacatagcaaaagctaaaatgatttgtaggcaccatgtagtcctttcatttggtcggtttgttttgctataaatctgccattagaaattggcagggaattccaacacagatttgtgctcgaccgacttttgtagtgtgtcgacgcttgaagaaggacctaatgtgagcttttacacacttgatgaacagcttgagctcttgagcaaggtgggggcatttttgtacccactggtcgtagttttgttggctattactaatcgtgtgcagatggccccattcacctctaccaacaggtgttgaatgcaggggatgacatgattggtgttgagttcttagaagaagattatggtggcaaggttctatttgtttgaagttgcttcaccattccccaaagcgcaatgcagctaagcctttttgtcttttgcagattcgatgtcgcagtcacccagnnnnnnnnnnnnnnnnnnnnnnnn

SEQ ID NO: 1153 - DNA, 454 bp, Zea mays
  Probeset Number=SeqID_15556
gcggacgtggcggttctacaggggcgacatctacggccggttccgggatggcgacgggcgcctgccggtggaccggcagcaggaggaggagagggagaagggcgacagcggccaacggtaggtaggaagggatgatgaggcagaggagagagcgggagtggaggaggccagctcgcattgttgacttggtcagccgccaatgcggtgtcttgattccactggcgggtttgactggtgtctcagttttctacggctatcgcagctggcgtgggagctaatggtacggcctacgtggtgaggtcacgttagacgaagtgcacagcatcagcggcgcggtgctgcttgctacgccttagtgtacaaagctacaaaagcattacaaaattatacggaaggcggtcgtttgaaggatgacgagtgggggtctacatgtgaatatacttttgttgggttc

SEQ ID NO: 1154 - DNA, 839 bp, Zea mays
  Peptide Sequence Number=SeqID_13929
  Probeset Number=SeqID_15557
cgacaatcgacaacccttttctcgcccaacctccgttctccacgagaaaaccaatatttcagaaaaatggcgaaggaacgttccggtctcgttgtcggcttgaataagggtcacaaaaccacccctatcgagaccaaggctcgcatcagccgcaccaagggccgtctctcccgccgcaccgcctttgtccgcgacatcgtcaaggaggtcgctggtctcgccccctatgagcgccgtgttgtcgaattgttgaggaactcccaggacaagcgtgcccgcaagctcgcgaagaagaggctcggtacaattggccgcgccaaggccaaggtcgacgagatgcagaaggtcatcgccgaagccagacgggctggtcactagaggagttcaacttttttctcaaaacaaaaagaaaaagccatatcttccttttctagtccttgtctctgtttctttttaacgtgcttccgaacgaaaacacactttttttttgtcaaaaaaaccctggcgcaaatgtagtaattttacgcatacttttattctcctcttcacttcccttccactgagatgtcatttgttggccatgcccgatctcctcctcatgaaacaacctcattgaatcgactgcgatgaggggtgttctcattttcttttttatttcaccgaaattacgggccttcagatgatatggcgggctggggagaggagaaggggattgaaatggaatggacggggattgttgaaggatatgatgggttgtgatatccaagtttctctgatcgatcatgttctcatacacaaatacactagatgaaatatgaagatgagatgtcggacaaaaa

SEQ ID NO: 1155 - DNA, 277 bp, Zea mays
  Peptide Sequence Number=SeqID_13930
  Probeset Number=SeqID_15558
cggacccatgggcggtgctcgatagagggttatgcacctggtagctgcagtccaaggcctcaaacgaatgttgagagagacttcttgaagaaatattgggccaggtggaaagcggatcatgtaggtcgttgccgggctatgcctcacataaaaacctcttactcgttacagcggccaaaacatggcatggcttctgcttacctcagcacatttaagcaaagctgcttggcgcgcgctacagaacatcaacacacagctgatgatacgttcatatgag

SEQ ID NO: 1156 - DNA, 784 bp, Zea mays
  Peptide Sequence Number=SeqID_13931
  Probeset Number=SeqID_15559
cgtgacgtttagctttaagcttgctattaatggaactgttaacaatgttgattctgcaagtgtattctggctatgccgtgaggtgcaaagatcctatatctgctcatgaaatgacccatatggaagttcaagtttgcaacaacacaaaggaaattattcggatgaaccttaacatttcatgcaaagatgttgcaggacagaattgcttcgatgaaaatagtgcaactgtcctctgggctggtgttcttagcgatattcacctggaagttccaccgttgcaagaggtggtacatcctttttccatgtacttcctcgtaccgggtgactacacgatccaagctgcttctgttataatcgatcccacagacgttcttcgtgctcgcgcaaaggcagagtcaccagatgaacctatactatgtcgcggatccccgttccgtatcccgggcagtcggtacagagtataggcagttcttttgagttaatgtagaggcctcattttgcaccgtgacatttgtaggtgtgaaatttcttgtacaagtgttccctggccccctgcccgcatgcgatttgtttttatagccttttcgaaggcttcgttgtaacttgtaacagccatgtcatgtacagtgtacagatagtacgtgtggtatatatattaaattatcactatctatcttagatctaatgtcactagttgttttttatattttataaagaacaccgtctgtgatttaatctgtatcaaaaaaaaagaaaaaaaaaaaaaaaaaaaaaaaaaaaaaaa

SEQ ID NO: 1157 - DNA, 599 bp, Zea mays
  Peptide Sequence Number=SeqID_13932
  Probeset Number=SeqID_15560
cggcgaccgaacctctctcccaccacacccaagtcgatcatctgcgaaaatggattcctccaaggcccccgtcaagctcgtcaaggtcacccgtgtcctgggcagaaccggttctcgtggtggtgtcacccaggtgcgcgtcgagttcatggacgacaccactcgctccatcatccggaacgtcaagggccctgtccgtgaggaggacatcctggttctcctcgagtccgagcgcgaggcccgccgcctgagataaagaaggggttgttgggggatgttgagtggagggagagaatgatgggaatagcgttcagctaccttgtcggcctgtttggctcgacagccgcaacgacctgcggctagaggaggggtggaaaatatcagggatgggcgttcggtagaacggtactgcgatcattgctctccacgaattccatgcggcgctgaggctgcgccaactttctccgcatacggtggtgctacggcttgggttttaggtgactttgggcgtccagtcgaagcgcaaattccacctcgttcagcagcggcagttctccatcagcaggaagcgttgagattcccataaaaaaaaacaaaaa

SEQ ID NO: 1158 - DNA, 310 bp, Zea mays
  Peptide Sequence Number=SeqID_13933
  Probeset Number=SeqID_15561
gagtttgctcccaaggttatccgtatagagggagcgtctcatagcaggagggacgatcttccccactccgaatttatttctaaccctaaccccaagtgtagcgcgtgttcaaaggctataatcttcagattttgtctattcacccccctaggcgactctcaaaactccatgtgttatattatatgtgtataaacatataaaccgcacgggaggggtggcgaccaaggcccctgcctgcccccttggttcccccctgctcgtgcggttcgacagcacatcatttattatggaccaccagatagatttaaaa

SEQ ID NO: 1159 - DNA, 423 bp, Zea mays
  Probeset Number=SeqID_15562
tttcccatccagacgttgtaaaagttcggccattatattttattttggtgcccgcaaacaaaaatatatctgttgaatgtcagaggtagtaagtttggtacctttaaaacggccgcccccaattgcttgttggcttcctgtatggttcaaggtctctgttttttatattttttttcgttctttttatttattgtattttttattaattttttggggagggatcaactcattctattcaataagccaaataaaaaacagagcgagaagagaatggactagcccgttcctcagaccacacaccctattagtgtttagaccagcgacgacggatccatcggggcactcgggattaaaccggctaagaattaaaacacggggaccttagaggggcagaaaggacaaaccctccaaaaattatttttt

SEQ ID NO: 1160 - DNA, 243 bp, Zea mays
  misc_feature (35)..(35): n is a, c, g, or t
  Peptide Sequence Number=SeqID_13934
  Probeset Number=SeqID_15563
gaatatcttaataacgctctttgtaatatttattngggccgcacccattaaaatacatctatcagccccatatggcctttaggtagcaaattctaatcctggaccataattttcgccacacacattactgctagatgttgttatcgttattatggacatatttaatttgagaggcagacctgctgtaccccatgacccctatatatatagatataaatatatatatagttgattagtacatac

SEQ ID NO: 1161 - DNA, 275 bp, Zea mays
  Probeset Number=SeqID_15564
accttcttttaactcttgcgtttatggttgatcccgagtttttctactcttgaaatctcactatcattccattaatagatagattgaagaaggtacaacacacccacacacacgccgcaaacaacataccaacggacgcaccacacccctcacaggacacaacataccaaccaacgcaacaccactaccacacttaaccactccgcacatgatacaggactatccccccggatcaagcataaacgcaagagttgaaagcaggttcaaccccttgg

SEQ ID NO: 1162 - DNA, 6234 bp, Zea mays
  misc_feature (1)..(36): n is a, c, g, or t
  misc_feature (6234)..(6234): n is a, c, g, or t
  Peptide Sequence Number=SeqID_13935
  Probeset Number=SeqID_15565
nnnnnnnnnnnnnnnnnnnnnnnnnnnnnnnnnnnngtcacattctggtacgctgttagaagagatctggataatatccaactaaaaactggggctcttgcagcatttgcttttgttagaggccttgctctgctggaatctggtagaaccctcgtgctgagtactgataccttaatatcagtaactcttgatgctgcatgctctgggtgcttgctgcctagagctatgcctgattctccatgtgtgcgtgttgcgagatgccacgaagcgaagcgcccgaggcacagtgcagttgcacatgatgcctaccctgagaggtcatactacggtggccccgaacatgtatgcccatattgccatgctgttttctggttccaagagcatgttaaaaatgaatcctgctccacccagaggaaaattgtgtacaacctttgctgcaaaggagggaaagtgaacctaaaaccatttgagcatccgccgcctttgcttgctaatcttttgagatttgatggaggtactcgctcgagacgtttcttgaggcttatccggtcctacaattcattgtttgcattcacctctttcggtgcagctatcgacaaaacgataaataacggcactgcaccctacgttttcaaaattaatggggtggtgcaccataagattggcaccctacttccacagcgtgggacgcaaccaaaatttgcccagttgtacacatatgacacggaacatgagacccagaataggctaggcatgtttgagaccgatgatggcgctggcggccagccagaccctgaaatggcgtcgtcgctgctcgatatgctgaatgaaaacaactcgcttgtcaaagcgttccgatacgcgagagagcgccttgagcgtgagggtgatcaaaagataacactcagattgctaggctgcaacacacgccatgatgtacaatacaacctaccctcaaatggcgagatcgctgccattatagttggcaactacacggctggggaatacacatacgatgttcttgtgcatgatagagagtgtggcctaaaacatgtttcatgcttgcatccagcatacatggctttgcgatacccgttgttgtttccttacggtgaacatggcttccatcttggtattaggtactttggtgctgacgatgttggttcatcaaagcgaaaatatgttacgatgcttgaatttgtaaggagacacctgcactacaggttggacgagccaaacccatatacgtgttacggtagattaagtgatcaaatagatgtcgatgtgtattcaactatcgagggcaacatgctacagttcatagcaagccatcaaagcgatctacggtcagaaactgtgcagggcatagctgacgccattgataagggctccgttcatgctgattcgattggcggtcgggtagttgttcctgccagcttcacttgtggtagaaggtaccatgtcacgaattaccaggacgcgatggctatatgtagggtatacggaccaccggatctttttgtgacttttacttgtaataccaaatggagggaaatagcagatgccttacgctttgaacctggccaacaaccatgcgaccgttctgacttggtggtgcgtgtgttccatatgaaagtcaacgaattcatagcggatattagagagggaaagacatttggttcgatacttgcagtcctatacactgttgaattccagaagcgtggcttgccgcatatacactgccttgtgtggctagccgatgggaacaaagagtttagtgcttctattgttgacatattcatttgtgctgagattcctgatatcgccgttgaccctttagggtttgctttggtcgatgaattcatgatgcatggtccctgtggtgctgacaatagaagatgcccatgtatgaaaaatgacaagtgcaacaaaaatttcccaaagcccttccaagatgagaccatcttagacggctttggctttactatctataggctcaagcctgatggcagacatgttctcaagaatggtgtgagacttgataatagaaacattgttccatataatacgcacctcctcaaaaagtataatgcgcacattaacgttgaatggtgcaacaagtcaaacatgattaaatatctattcaagtatgttacgaagggaatcgatagagcaaaggtgtactttgaaatcaccgcaaacacgtctaacgcgtcgcctggtgcgcagatagcaccgccgaatgaaatccaggaatacatcaatgctaggtatttgtctacatgtgaggcattgtggcgcgcatttgaatatgacattcactttagagtgccttctgttgagcgacttgttgtacatcttcctgggttaaaccacgtgctctacgaacctggcgcggacctacatgcgttgcttgctagctctgcggccaaaaacacaatgctaactgaatggtttgagactaatttgaggcatgaacaagctagatgcttaacgtattgcgacttcccaaagaaatggacatgggatgcctcagcccgatgttggaaatcgaggtctcgctgcacaaaaattggccgcatgtactatgtacatcctactgctggtgaactatactacttacgcatgctattgatgatagttaagggttcgacaagctatgttgatatcaggacgtacaacagtcaagtgtatgacacatttcgtgatgcgtgtgaggcgcgtgggttgcttgagagcgataatgagtggaagatgttgtttgacgaggcgatcatatctacatcgtcgtaccagcttagacagctttttgtgactatagttatgttctgccctgttagtaatgtgcgtgcattatttgatacatactggctatattttacagatgacattggtcgacaacttagagatgcattgggaaatcctaactacaacataccgcaggaacaactcatgtccctcctgatacgcaaactctcagatgcctttgctaatagtggcgggaacataaatgactatggtctgccaaagatagatgtccaatgcgcttttgtggatgagaacagattaattaatgatgaaattgaccctgatccattaatgatgtcgatgcacgctgattccttggttacacagttgaatgcggaccaacgaaccgtttacgataccatagttggtcgtgtttacagtagttcaccggggtttttctttgtctgtggccgtggtggcacaggcaaaaccttcctatggaacactataatcgcaaggttacgttccgaaaagaaaatagtgcttgctatggcctcctctggtgtcgcatccctactttttcccaaagggcgcaatgcacattcaagatttaaaataccattcgatgtaaacgatgctagcacgtgcaatgtcaataggggtaccatgcttgctgaacttatacaggtgtcctccctcattatatgggacgaggcgccaatgacccatcgttggtgctttgaggctttagataagacaatgcgtgatattctttcagaacatactccttcaaatgcgctcctcccgtttggtggcaagcctgttgttcttggtggcgatttccggcaaatactacctgttgttagaaaaggatctcgctcttccatagttaacgcctctattacaaactctaatctctggcgccatgttgtcctccttaggctgcgcaccaacatgcgcctttttgatccctctttgcaagtagacgcgcgagacgagctcgacatgtttgccagatgggtactatctgttggtgatggtaccttgcctgctgaaagaagagcgagcgagcgtgaggctatgtggattacaatccctgaagatttgttgctccgggttgagggtgataaggtagctgcgcttgtatcaaaagtatacccagattttctgttgaattaccgagatcccacgtacctttccttgcgtgctattgtttgcccaaataatgccacagtcgatgacgttaacaactacgttctctcgcttctccctggagacaccatccaatacctgagttgtgacgttatagcaaaatcatcagaaaacataccagacttcgacgtcctctaccctaccgaattcttaaacttaattgatgcgaacaatttccctacccacaaactcgagctaaaaaagggtgccattgtgatgttgttgcgcaacctgaatcaaaataaaggtctctgtaatggcacacgacttcttgtcactcaactcggtcaacgcatcttgcactgcgtagctcttacaggatcaaatgttagggaagaagtcttaataccaaggattgccctcaacactacagatatgggagacgtgttgatcccagagctccagcgtgggaacacttctgtgaccatatgcgctcgtgtttctcgtttatgggatttctgtgatcctcaggatgaagcaaagttgctccattctgatatggtgctgcttgacgaagaggtacaacatctgcacgcttatctatttggtaaagggaaggtggcattgggaaacggtatccatgctgcaatattcccactagtcatacaaaagttcaagcctctgataaaagaaggagtcgtctacaacatcacatacttccgggtcagagcctcaaacaatttgtacaagcctgttttcaatgagaacatgattacctttacaaactggacaaaattagaggaggttgttgaggttccgccagcatttcctgtgcttacctactcactcacatcgatagaccagctccatttgtgtgttgaccacagggagtactacacagatggactgtgcttgtctaaaggctcaccctgtaagtggtacattaatcctgatgttcctgaagcaggtgccctcatggctagtgcgaggaaagcgcatagtcccattaagtggaacgaggttctatcttcgaaccagcctatgcctcgtgttcctgaggaacagaaaatcgcttacatcagagatctgcacccatttgagaataaggatagggaattcttggtgacagtcactgtaaaaaagattggtgataggtggtggtacaatgcatgcaaaaaatgcacccgcacagctgtggctcatggggattcctacaagtgcagcgatcaagtttgcgctaacattggcacgcccaaccaaaggtacaaactgcttctcactgcaggggatgagacgggtgacacagacttcatcctctttggttggatggcgcaacgcatcatcaagaagtcgtgcgatatgctcattgccaacaatccgatcggctttattcctgatccaatcatagatctgctcgagaagacatatatatggaatgtcaacgtagtcgtggcagagatagatactgcaaaggactccatacaagcatcttcatcggggccaaaacagtcacaaactgtgctattgcaaggtgcccccagtggcattgaagacactcctaccaaagcctctaacttggttatgccttcgaccctgctcacaccacaaagttccgcaaccagtgtgcaagataagactattggtattggcagcgaccatgtggttccaggtgctactcccgctataacaaaggaaccgacaaccacgcctaggaagaggacaaggtcttcgcctgcaaagacagttacaaagaggttgctcatcgacgtagatgaaggaaacactggctccaaggatgccgcggatagcgttgctgcccctagctgctgtgtacaacttctttcagaaggatatatgatacatgttcatgtccacaagctcgatacagattggtctagagcagacttaacaagatcctcgccatcgtgcaatcaacatgtcattgatcgattcgttgttcacctgaaggctttcgataggtttgagaacacatctgatgctcaatctgcggcaacccttattattgatagcaagcctagcaagggtctgcacaagttcttgcagaaacattgtgagggtgaaagattacctggtgttaattctgacagagttgaaaacttgaaatggcaagaccagaaccctgaagttgaagtgttggcaagaaactcagataggtggatgaacgttttgctaactgagatttctaatcatacggaaacaattgaagccgacatggagtacaacacaaaactatctgatttctgtttagcaaaagctggtccttcgggtgataaagctcatgtatctactcaggttgttgccacctatggttgn

SEQ ID NO: 1163 - DNA, 667 bp, Zea mays
  Peptide Sequence Number=SeqID_13936
  Probeset Number=SeqID_15566
ttttaatcgacaacatttgaataatatgggcatagcgttaaaaagcgtatccagctggtgatatcgttgctacatccccatagcgtgtagcatgccttgcaagccccacatattaccttgcggcgagcatcccttttgccgcttcacacatctttgctgccttcgatcggacgcgtgggcaatcattgtttttggcgccaaaatttgctccctaactggaattggcgcgtccattgccatagctggtgttgctatgtactcttacattaaggctaagattcaagaggggaaaaggaaaaagagcgcatgcctgccgtgcataatattttcgagaccttcctcgtgactacaacatcggcgccaatctcgggcctccttctatatcttgttttgttttcatcttgagtccggcggtccccggtttgttcccagtctggtgattaaaagtctgcaaattctgtttgtggaattggcagcgatacaaatttggcttctttaagtaaatccggttgccggtacacagcggtattaattcacctgtaactgaatggaataccgtgatgcaaagggcacaacactctgcctgactaaaataaaagtgtgaaggttcaaaaaaaaaaaaaataaaaagggcggccgctcgcgatctagaactagccacgcgtcc

SEQ ID NO: 1164 - DNA, 543 bp, Zea mays
  Probeset Number=SeqID_15567
ctatttttattttttttacaacaactcagaatattacctcaactcaaaaaggactgggccgggcgctcccattcacacggtagggaatgtgcacatgtaatgaatatagatacaaccttcacccttactctactaactaaaaaagtgagacccagataatacttacatggcatctccagcgccaccagtctgtatagttgcccccaatattcgtcattatccttttgaagggaggtgctggcattatctcatattagaaagacgactgctgcggcccaagcactcgagttcagtcatgggcccactttcatccccatgattttatgtccctggatcatttccatttcaagttggatcggggtattctggcccttgatcaggacctttttggaccttaaggaggaaggaactaagccatccgaaggacggccttccagcaaccacagcaaaagggaaccaaattggttgagggagcctgagcctgcaggggtacttccagctcgctgagggttttgctcttgatactggagagcattgttggca

SEQ ID NO: 1165 - DNA, 498 bp, Zea mays
  Peptide Sequence Number=SeqID_13937
  Probeset Number=SeqID_15568
cagggggcatacattcaattcgagttataagaagatcaataggtgagcactggtgaccagcaatatattgctgcccgtggttgccaagtttaggacagtgccttgagtccacgcctcctgatgatctatggccccatctcgtcatgaaaatacgttcctcgaagcatgcgtccacttcacgacccacgagtcatcatactcctggaaccgtctcgatctccaccgatttgtcttaccatcatactactccgggagaaaacggggatccgcttcctagtagaatgatcctcgaataagtctactcaggatgccccataagaatggccatggtcccttctaactgagttaaaccgggcgcaataagaggagaccagccgtcgcttgtgctctgttgattggggttgaaggcgagtgtccttgggagggtgccggccactcctcattgggtgcgttaaaggtgctctgacagccgcagtgctcccagcatgtaagggcaag

SEQ ID NO: 1166 - DNA, 466 bp, Zea mays
  Probeset Number=SeqID_15569
caatccccaattcgccccacgcgcccacttgtcaccattctgtaataaagaatttatttccgcttagcaagatacactaaaattaaacgcgggtacggaaattaaattaacatgataatgataaatcttatcctaacataaacatgcaactctttaaagactaacctttcatttgtatccactagctgtctgctcgaccaagatctctttttttggacttggaattgatattgtccatccctccaaaggaagggcaatggtcattctctctctctctgcgttatcaacatttgaatgcaaaaaaagcatgttctttgttgattgccatcactgtcttaggctacacaagatcattttttgatattttgattggattcttctattggattttttttacgagggatgaaacttgggatggaaaggatggtttcctttagccaaatattgacaacgatcattcatttgt

SEQ ID NO: 1167 - DNA, 680 bp, Zea mays
  misc_feature (601)..(680): n is a, c, g, or t
  Peptide Sequence Number=SeqID_13938
  Probeset Number=SeqID_15570
ggaccccaaccaccatatttggggggatcgtctcatttcatccggttataccatgcaacccaaacgtcccctaagagcatctccaccaatgtctcaaaaaagtccccccaaattgaaatatggggctctacccaggaaaatctactccaccagtcccctatttcataaatttttgtttaaaaactatagggcaaacaaaatgggtttttaggcatcactaaactatctcaaatcgaatagggctctaagaaaagtgcctcaattcaacaaattttgtcaaaaaactatagggccccctctcaagtgcctcaaatatactaccccgtagtgggctgccctatatttggggctttactgttggagcggggtgttttgtttatgccctaaattctataaaatttacttattttaaaattatagggcatttttataggtcccgttgttggagtgctctaaaagcccccccccgaactttaaaaggaattgctcagctaaccttaaaaatggtattttagcttttttttaaaaaaatgtaaggccaggatgagatgagctaaaaaaaaaaaaaaaaaaaaaaaaaaaaaaaaaaaaaaaaaaaaannnnnnnnnnnnnnnnnnnnnnnnnnnnnnnnnnnnnnnnnnnnnnnnnnnnnnnnnnnnnnnnnnnnnnnnnnnnnnnn

SEQ ID NO: 1168 - DNA, 630 bp, Zea mays
  Probeset Number=SeqID_15571
ctggacgcgccgccctcgggcatcgccgtcgtgtcgaggcagcacgtccgcccggacgccgcgtcggcgcaggcggtcggtgacctcgcgctgtccgtctccgacctgcccatgctgtcgtgccactacatccagaaggggctcttcttcccggcgcccgacctgcccatgccctcgctcgtgctgctgctccggtcgtcgctgtcccgggcgctcgccgccgtcccgcccctcgccggccgcctcgtcacgctgcccgacgacgacggccgcgtcgtcgtccgctgcaacgacggcgccggcgtggacttcctgcacgccgtcgcgcccggcctgtcgctcgacgacttcctcgtccctggcgccgacgtgccgaccaagctcaccaaggacctgttccccatggacatggaccggaccgtcagctacgagggccaccgtcgcccgctcgcgtcgttccaggtcaccgtgctcggcgacggcgccgtcttcatcggcatcgtcgccaaccacgccgtcgtggacggcaccttcttctggcacttcttcaacacctgggcggccatctgccgcggcgactcgcccaccaggctgccggacttcagccgaaacttctttggcgagtccacc

SEQ ID NO: 1169 - DNA, 431 bp, Zea mays
  Peptide Sequence Number=SeqID_13939
  Probeset Number=SeqID_15572
gtaccgcctgcgggttccgggccgcaacccacgcgtccgcccactgcgctagatgtctcctggccgagataaagaagaatcatccactgagacttctggatttatagaatcctccaataatgttgcagatatgcttcctgatcttaatctgaaccattttacttctacggcttcaactcacttcaaaccattctgttagtattgagcccccgggggcgcctgcgggtgcggccgaagccatacagaatgatctgttaccttctatagaattggttccaaaaatgatagaggatgttgagcttctagaagaaaaggctaaagtggccaaacatgaattgtccgttgctgggacaggcattctggcaaaagttgaggagctcagagaaatgataacttatgcgaaggaagcaaatgatatgcatgctggtaag

SEQ ID NO: 1170 - DNA, 600 bp, Zea mays
  Peptide Sequence Number=SeqID_13940
  Probeset Number=SeqID_15573
aagtccgggctcgacccacacgtacgcccacgcgtccgcccacgcgtccgatctttgataggcatagtttgataattgggtgtgtgcaagagtcaaatttaggttcatattgtttacgccccctgccatttagctaaacgcacattggtatgcggtgaatttcagaccagaaggtagatttcttcaaggggaacaatgtggtgtaacttgatcagcacaaccactttactgaaggtgtccggatcatgatgcagacaacaacaactggtgtactcattaccactttgatggtaatcgaaatggggacaaacacaattgaaggaaaaatatccaaagacaaaaggagtgagtttttacttcttcagattccaccaatcagaataagaactagacatcatagagaccaacttttgagattttccttacgatactatgttcgtttggtcatttgttctttgaaagaattaattagaaaagagagaattgattttattgggatccaagagaccaataaaaaatcctttgatgattcttggctgcagtctattagtggtaatagaaattttgcctggttctggtctccagccaaggggagatcgg

SEQ ID NO: 1171 - DNA, 994 bp, Zea mays
  misc_feature (1)..(1): n is a, c, g, or t
  Probeset Number=SeqID_15574
nattcggcacgaggcacgcccaaaccaaaccctagcagatcgccgtcagcccctcccggattgccatccgcccgtattcctccccgacggcaagaccttccttgagttcatccgattcggccacaactccctctcatccgccggcccgctactctcctccgccttccagacgcaggagccccacctccacccgggctcgtcgccggtggaggatcacatctaggagatgcggggtggagcacgctgcgccactccacgtcgagatccgcttctagggcggtccttcgacgacgctcgcatggtagacccgagcaatagtgttgtgcttcgtggtgctgcagcagccgccggagaccccgtcgatggagagccccccgcgaccctctatcggcgccatcaacgccatgagagcgcaagaaggccgacccctatggccgcgaggagggccatggcggcgagaagctcatacacctacatcgggctccgttctaggacccaggccatcctcgccgccgtcaacaagctcgcctccgagctctccttctatcagtgaaaggtgttccgcgtcactgagcacgctggggtcacgctcgccagcctaccgacggtcgcgtcctctcgcgcttcctctgcaacgagtgcatcaaccactccttcgtctacgaggcgccgctccccgtctccaggctcgctgacaagctgcaggcgtggctccatcttcccagaccctttcatggaaccaattttcataaaatttctgactcccgggctactttaagacccggtgaacttgctgtcgggaaagtccagctactgtggtttctgtggcgagcctctgcagttcgtcctccaggtgttttctttgtgtgcaatgaagttgccacagtcgactgcttattgtttggatatcgacttggtcacagttaggcttggttgtgtttagatttatgcaccaactgaagataatgtagcagccttccaccgaacgcggttc

SEQ ID NO: 1172 - DNA, 1492 bp, Zea mays
  Peptide Sequence Number=SeqID_13941
  Probeset Number=SeqID_15575
cattgggtacctcgaggccggcccccgcgccgcgatcatcagaccagacgccgacgccgccgctctccttcctctcccccgccgcgcaggcgctggtgctcgccatctcctcgcacccgctccccacgctcgcggccttcctggcctcccgccgcgacgagctcctccgcgcggacatcacgtccctgctcaaggcgctggagctctcggggcactgggagtgggcgctcgcgctcctccggtgggcaggcaaggagggtgccgccgacgcctcggcgctcgagatggtcgtccgcgcgctgggccgcgagggccagcacgacgccgtctgcgcgctgctcgacgaaacgccgctcccgccgggctcccgcctcgacgtccgcgcctacaccaccgtgctgcacgcgctctcccgcgcgggccggtacgagcgcgcgctcgagctcttcgccgagctccggcgccagggggtggcgcccacgctcgtcacctacaacgtcgtgctggacgtgtacgggcggatgggccgctcgtggccgcggatcgtcgccctcctcgatgagatgcgcgccgccggggtcgagcccgacgacttcaccgccagcacggtcatcgccgcgtgttgccgcgacgggctggttgaggaggcggtggcgttcttcgaggacctcaaggcccgcggccacgccccgtgcgtcgtcacgtacaacgcgttgctccaggtgttcggcaaggccgggaactacacggaggcgctgcgcgtgctcggggagatggagcagaacggctgccagccagatgctgtgacgtacaacgagctcgccggaacgtacgcccgggctgggttcttcgaggaggctgccaggtgcctggacacaatggcatccaagggtctgttgccaaacgcattcacgtacaacaccgtgatgacagcctatgggaatgttgggaaggtggatgaggcgctcgctctgtttgaccagatgaagaagaccgggttcgtgccgaacgtgaacacgtacaatcttgtccttggcatgcttggcaagaagtcaaggttcacggtgatgctagagatgcttggagagatgtcgaggagcggatgcacaccgaaccgggtaacatggaacacaatgcttgcagtctgtgggaagcgtggcatggaggactacgtcacccgggttctggaggggatgaggtcttgcggggttgaactgagccgagacacctacaacaccctgatagctgcgtacggccggtgtggctcgaggactaatgccttcaagatgtacaacgagatgaccagcgctggattcaccccctgcatcaccacgtacaacgcgttgctgaacgtgctgtcgcggcagggcgactggtccaccgcccagtcgatcgtaagcaaaatgaggaccaaggggttcaagccgaacgagcagtcgtattcgctgctgctccagtgctacgctaaggggggcaacctggcagggatcac

SEQ ID NO: 1173 - DNA, 429 bp, Zea mays
  Peptide Sequence Number=SeqID_13942
  Probeset Number=SeqID_15576
ttatatacattaacaaagtaattcagttagaaatcgttcggacccaccaatccagcagaaacgaaccaggcctaagtaggtactacgaagtacagctcgttactggggtggtggtgctgctcccagcaagccagcaacagcgccgccgcgaccaccaccaccatagcgcagataaaaaaccgagccgtgctccgacgacggttcgtctctcttctcttggcgatcccagtcaccttcggacgatgttcagcagcgtcgtcgcatcggcgttcttcgcacggcggcggaggaggatctcgtgcgctgtcagaacaacaacgccggctgctgctgctgctgctgcttgtggcgaacttcaggtcttcggccagcgagtccccggtccgtgtgctccactggaggttcctcctctgctgcgtcgagctgcag

SEQ ID NO: 1174 - DNA, 459 bp, Zea mays
  Peptide Sequence Number=SeqID_13960
  Probeset Number=SeqID_15577
gcaggagatgtccgccccggcgacgtcgtcctcgtcaagtcctcgaagtccgccgaactgcgattcctcggcgaccgcctcggaggtgtcaccgaatgatcgcgctcctgatcgccggcgccgtgtcgctggtgttcacactgctgctcacgccgctgttcatcaagctgttccaccgcctcggctggggacagttcatccgcgacgacttttcgcagtcgcaccacaccaagcgcggaacggcgacgatgggcggcatcgacctcatcatcggcgcggtgctcggctacttcgtgggccacctggtcgagcgtgactcgatcacgctctccggcctgctcgtcctgttcctcatggtcggcctcggcttcgtcggctgcatcgacgacttcctcaaggtgcgtcggcagcggagcctcgagctcggcggctgggcgaaggtcctcgggcaggtgatcg

SEQ ID NO: 1175 - DNA, 278 bp, Zea mays
  Peptide Sequence Number=SeqID_13961
  Probeset Number=SeqID_15578
gcaagacgaagtgacatggtggtgacgtccaacgtccagttacagctctgtattttaacagcaagactcacggttttgcaaaagagattattacagtatacaatgccactggccatgaactgtgcggctacccctccaaaatagggttgaggagatgtggcaagagctgcagacttagatggttaaactacctgaggcctaacattaagcacggggagttcactgagaccgaagacaaggtcatctgcagcatgtatgcaagtataggaagcaggtgg

SEQ ID NO: 1176 - DNA, 322 bp, Zea mays
  Peptide Sequence Number=SeqID_13962
  Probeset Number=SeqID_15579
acgggcagttgtggctaatgcctgcgacagggtctgtcagaacttcctcggccagaccgagagatgcctcaaccgcctccccccgagccatgcagacgactccgtctctcaagaacccacggatgcccggttgctgagcacgctctgcttagtggctgatatctacgctacagccctgcatacggacacgcgcgtagctggatctgacgacaccctagtaagtaagatgcaccctggtggcagaacatatggtgcatccacgcccacacaaggatccactgacggatggactgtctgccactgcctgcaccgatcaatgtga

SEQ ID NO: 1177 - DNA, 271 bp, Zea mays
  Probeset Number=SeqID_15580
ttcttgcgcctgtcgtcgttcttcttcgcttgcgcgccgaccttccctgatgtcgccgcatagcctgttgtcgttcctggcgctgctccgtgtggtgggtttttcgcacgtcgtctaagtgctcgcgctcggcctgcgctgtgtggcggcgccgttttatgttgctctcggcgatccgtttgccgccatctccatctccggcccgctggcgcgcatgaccgtcgaccgcattactgaactcggggcgctggtgatccgcgcggcggagcag

SEQ ID NO: 1178 - DNA, 435 bp, Zea mays
  Peptide Sequence Number=SeqID_13963
  Probeset Number=SeqID_15581
gtgatcggcacgatcctgttcctggcgtggatcgtcctgctgaccgtgtcgacgtcgaacggcgtcaacgtggcggacggtctcgacggcctggcgacgggctccagcatcctggcgatcggctcgtacgtcatcatcggcttctggcagtcgaaccagctgtgcggcagcgcccggctcgacgcgagcaccgagcacgcatgatacaccgtcacgaacccgctcgacctcgcggtcgtcgcggcggcggtctacggagggctgatcggcttcctctggtacaacacctcgccggcgcagatcttcctcggcgacaccggttcgctcgggctcgacggcgcgctggccggcctcgccatcctcagccgcaccgagctcctgctcatcctcatcggtggcctgttcttcatagtcaccggctcggtcatcctgcag

SEQ ID NO: 1179 - DNA, 883 bp, Zea mays
  misc_feature (647)..(647): n is a, c, g, or t
  Peptide Sequence Number=SeqID_13964
  Probeset Number=SeqID_15582
tgcagataacaacaacggccaggcgaatgcgtcagcagaagccggcgcagccgcaggcggcgcgaaagagaatctgccgccaaataatgtcgacaatagcaacattaataatggcagcatgaacaccaacggtgccgcgacttctggtaccacctctggcaatatgtcggccagccaggaacacaaaaataccatgtgtaaagatggtcgctgcccggatatgaataagaaagttgaaactaaggaaggcggtggtcacgttaaacacaaaactgacggcaccacgcagaactgtttcatggccgcgctgctgcttatcgatgatcaccctttagttgaagtcgcgctggaagcggcctgcctcaacgcccctattccattacagctctacgccgccggtgacgaagctcaggcgcgccagctgctgcaacagcatcatattgacctgattgtgctggatatcggcctgccggatagcgatggtctggagctgttgcgccgtctgcgcgcgcgccatccgcagtgtccggtgctgatttactcggcccagcagagccgccacacgctgctcagcgccgcctcgctcggcgcggccggttatgtggtgaagagtcaaagcatggcgcagttgctgagcgcgattctgncggtgctgggcggccagcaggcgtttccgccgctgccggagcgcattgcgctaccgctcaccgagaaagagcagcagattgtggcgctgctggtgcgcgggctgtcgaatattcagattggcgaacagctgcacatcagcaacataaccgtcagcacccacaagaaaaatatcctcgagaagaccggcgtgcagtcggtggtcgagctggcagaactgtggagagcacagcagtga

SEQ ID NO: 1180 - DNA, 318 bp, Zea mays
  Peptide Sequence Number=SeqID_13965
  Probeset Number=SeqID_15583
atgaaacggacaaaaaatattcgtcatgccgctttccgtaaaagctggcaggcacgccatttaacgccggtcgcactggcggtcaccgccgtgtttatgctggcaggctgcgaacagagcgatgaaacggtttcgatgtaccagaacgccgatgattgtgcgaaagccaatccgggccagagcgcccagtgcaccaccgcttacaacaacgcgctgaaagaggctgagcgcaccgcgccaaaatacgccacgcgtgaagattgcgtcgcggaattcggtgaaaaccagtggcagcaaaactccggcacaggcggggcg

SEQ ID NO: 1181 - DNA, 382 bp, Zea mays
  Peptide Sequence Number=SeqID_13966
  Probeset Number=SeqID_15584
ctgcagcgaagtcgtccacgtcgtctaaattatttatgccgttgtttaagcagtgtgaagctatattgaagaagattatggaaatgaagtaatgtattcaatgttccggttgatgttgagaagctgcaaattcatgattattttgacgatgtcaagaccccaatggatcttggtacagtccacaagaagctccaatctggctcatgcacaagtccatctgattttgctgcggatgccatgctgacctttaacaacgctatggcttataatccttgggggcatgccgtgcacgacagcacgacacggacattcagttggaacaagatgtttgagcgtcgatggaggccaaatgagaagaagctagcttctgctgccactgaga

SEQ ID NO: 1182 - DNA, 797 bp, Zea mays
  Peptide Sequence Number=SeqID_13967
  Probeset Number=SeqID_15585
aaaccttattccatgctatttccgatgctcttaggcatgtctttgcgagtagaatcatggatatcaaggactcccctgtatggagcaaactttcatatgtctcatgtgcatctaatggtgtagtactcatggacgagtcgttgcaattgttacctgcaactgaaaccttggaccttagtcgcaacaagtttgcaaaggtggacaatctgcagaaatgtacaaagttgcgaaatctggatctcggatttaatcatttgcgttcgatttcatccttgagtgaggtttccagtcgaatcgtaaaacttgttgtgagaaataatgctttaactacagtaaacgggattgaaaatctcaagtcactcatggggcttgatctctcttacaatatcatctcaattttctcagaattggaaatcctcggcactctacctctgttgcaaaacctctggttggaaggcaacccaatctgctgtgcccggtggtatcgagcacatgtgttcagtttttttcgtaatccagagaatttgaagctagatgataaaggtatgaacacacaagaatactgggaaaagcaagtattgtttgcatgcaggcaaaatcaacctgctggttatggattttattttcctgcaattgatgatcatgaagatgaagacatattgaatttgaagatgagaaaattttcccgacttgtgagcatagtggaggaagagagaaatctctgtgatggtgtagagcagccgtccacccactgtgatagtgacagttccaagaaggatgaaactgcaggcatgcaa

SEQ ID NO: 1183 - DNA, 326 bp, Zea mays
  Peptide Sequence Number=SeqID_13968
  Probeset Number=SeqID_15586
ccaaaacggataaacatggataacacaccttcgacgctgcacgcggcgcgctggcgcggcctcggcggctggaacttttactttctgatcaaatttggtctgttgtggtacggctatctcaacttccatgcactgagtaatctggtgtttctggcatggttgctgtttccgctgccgtcagcgcggctgcatcgtctgcgccagtggatttcgctgccgattggcttcgcgctgttctggcacgatacctggctgccgggtctgaactcgctgctcagccagggcagccaggtggcgggattctcgccggcctatttgctggattt

SEQ ID NO: 1184 - DNA, 380 bp, Zea mays
  Peptide Sequence Number=SeqID_13969
  Probeset Number=SeqID_15587
atggcgtttggtctgctctggctcgtgtggattctttatacgacgttgagccttggggtcggcggtctttcgctgtcgctcttcacgcaatcgacgccgcctcccaataccgatggcggcgggttggccaacgccatcgtcggcacgttgatgctcgtcggcgccgccacggtcgtcggtacgccgatcggggtgctggccggcgtctatttggccgagtacggcggtaaggggtggctcgcctcgacgacgcgcttcatcaacgacatcctgctgtcggcgccttcgatcgtcgtcggtttgttcgcctatgcggtggtcgtggccaagatgggccacttctcgggctgggccggcatcgtctcgctcgcgctgctgca

SEQ ID NO: 1185 - DNA, 242 bp, Zea mays
  Peptide Sequence Number=SeqID_13970
  Probeset Number=SeqID_15588
tctgaccccgatcggtacggtgtcgacaccagcgcgccggtagcgacgtcggagaccgtcgcccaggactcgcccaccgaacgcaccgatctgctgaaggtccccaccagcgcttcccgccgggtgcgggcccggattgcgcgtcgcatcaccgctcaacgcggtgccctgagcccggtgctcgaaccactggtggcggtgcaccggcagtactaccccaaagccaacctggcgctgctgca

SEQ ID NO: 1186 - DNA, 811 bp, Zea mays
  Probeset Number=SeqID_15589
caagctggccgctgcgccggcgccagcgctatcggcttaaacaaggcgtgcgttatggagaagaaactgatgacgctagatgaaggggcgggtaagccgctggcgaaatatgcggcgtggcgacgcgtcggcgactttatttttctctccggcattattccggtgaatccgcaaaccgcgacgatcgtgcgcggttacagcgatgttcccgaagcagcgcaacggctgctgggacgcagtggtgaattttctaccgatttcaaagaaggtccaatcctggcacaaagctggtatgtgctggagagcatccgcaccacccttgaaagcgccggtgggcagatgagtgatgttttcaaactggtgcagtactttcgcaatctggaccatttcccgcactacagccgggtgcgcaagcagttcttcccggacgaaccgccggtgtcaacggtggtgcaggtcagtgaaatgctgccgagcccggacgtactaattgaagttgaagccacggcgtgctggaccgacatcgccacactggataataaagccaacacggtgattgtgttaccgaccggcgccatcgaacagcacggtccccatctgccgtgtgccgtcgacagcgtcatttcatcgggcgtggtcgggcatgccctggcacgtttacccgcggatatcccggcttatgccattccgccgatcacctatggcaaatccgatgagcacctgcactttcccggcacgctgacgctgaccggggaaaccttgttacataccattctggagattggtgaatctctttatcgcgccggtttcc

SEQ ID NO: 1187 - DNA, 545 bp, Zea mays
  Peptide Sequence Number=SeqID_13971
  Probeset Number=SeqID_15590
gctggatacgagactattatgatgaactccaatcctgagacagtctctactgactatgataccagtgatcgtttgtactttgagccactgacagttgaggatgtatcaaatgtccttgatttagagcgcccagatggtataattgtgcaatttggagggcagactccattaaagcttgcgctgcctatccaacagtacatagaggagaacaaaatggtgtctgcttcaggcactggtaatgtgaagatatggggaacatcaccagattccattgatgctgctgaggacagaaaaagatttaatgcaattcttgaggagcttggaattgaacagccaaagggagggattgcaagaagtgagtctgatgcattggcaattgcctcagaaataggctaccctgttgtggtccgtccatcatatgttcttggtggacgggcaatggagattgtgtacaacgatgaaaagctgatcaagtacctcgcaaccgctgtgcaagtagatccagaaaggcctgttttagtggacaaatatctaattgatgcagt

SEQ ID NO: 1188 - DNA, 238 bp, Zea mays
  Peptide Sequence Number=SeqID_13972
  Probeset Number=SeqID_15591
gcttcgaagtacgccactgcccgtgctgaaaatacccgccagcggaatcgaactggcggggctaaaggtggtcatcctcgacgacgtgcttgccaccggtggaaccctggccgcggcgtgtcgcttgctgcaccgcgccggcgccgaggtggttgcggcggctgtggtgctggagctggccgggctgggcgggcgcgcgacggtggcgccgttgcggcttgagcgcctgcaccagatt

SEQ ID NO: 1189 - DNA, 457 bp, Zea mays
  Peptide Sequence Number=SeqID_13973
  Probeset Number=SeqID_15592
tcgcaacgcgaaatacgcctgaatgcctttgatatgaactgtgtcggtcaccagtcgcccggactctgggcccatccccgtgaccgctcctggcagtataaagatctggaatactgggttgatttggcgcgcctgctggagcgcggcaagtttgacggcctgttcattgccgatgtgctcggcatttacgatgtgctgaacggcaacggtgacgcggcgatacgccaggccactcaggtgccggtgaacgatccgctggcgttgattacgccgatggcgctggtcacagagcacctcggtttcggcttaaccgcctcgctgtcgtttgagcatccttatccgttcgcgcgccgtttgtcgacgctggaccatctgaccaaaggccgcattggctggaacatcgaaacatcctatctggagagcggcgcgcgcaacattggtcataaagcgcaaaccg

SEQ ID NO: 1190 - DNA, 289 bp, Zea mays
  Peptide Sequence Number=SeqID_13974
  Probeset Number=SeqID_15593
tctagaggaccccctgatcttcttggatggagagcgacccgaacagaccctctcgacacgccgaccagcccgcccagcattgctcacttttccccagtaccctcctggcggcggggcggggcggggcggggctggcctgggctcgcaaacagcccgcaactctactgcgctcaggctagcagcgtcctacacccgaacggcgttctctgaaaagaagcttccctttcagggcgtgcgcctgcgcccttcgttcacaggcgtgcgagccaccgctcacgtgttcgattga

SEQ ID NO: 1191 - DNA, 786 bp, Zea mays
  Peptide Sequence Number=SeqID_13975
  Probeset Number=SeqID_15594
cccatcgcagctcacgaagcgagcacaggatgactatacctgatacacatatcggatgtgagtccgcatgccggcatggcgctcctcaccctgagcaacgtcggcgacatattagtaacgccgattggcatgagtttcagtgtaacgcagacttacctacttggcttgacgagcgctccctgaatgagcctcattgctgacattcggacacagataccgcttgcccgaaggtcccttcaccctccgaaattcagctcgacgacctatgctgcacacattgctagacccatctggcatactaggagaggactatatatatgccgttttgcaagggggccaactcagaccacttcggctagcatgccaagacctattttctgtgaatgtacctacacaggatgtaacagctccccccacagagtatgatgaggcttctagccgtgtggattttatagaccatacatgacaaggatattcgacgaggcgctactatgggtcctgaggaagggataccttctgtgcgcccacaacagatgtgaaaggtgagctttcagtgccattctcatcaccatatcttgcctgtaaagctgagtgcgctttgcactgggaagagacatacaacataacttcatgctgacattggttatctggttcgtacactacccatggacctaaatactttgctatgcaaggaaaaccaattgatgggaatgcttgagtatgcgaggaggtgcgctttcaaagatcatcttcagaagctagggcacgaggacagcgcacagcaca

SEQ ID NO: 1192 - DNA, 648 bp, Zea mays
  Peptide Sequence Number=SeqID_13976
  Probeset Number=SeqID_15595
tgcatgcctgcagccgggccagtgcaatgcgcatatcctggaaaatatcggcggtgagtggctggcagggacggtcgccggcacttactatgccaacggctggggcgcggccgctgattttcccggcatcgtactggatgagcacggcgcgcgcgtgccgggttatctgttcatctcggaccggctggcgctgcactggccgatgctggatgagtttgaagatggctacgaccgggtgccggttgaggtcaccacgaccgacggccagcagcggacggcgtggatttatcagctgcaaccacagcaggatgaacgccagtttgtgtcgcccggcgggcagcagtggatcgatcagtctgcgctgcgcgcctcgcatcaaaaccagtggcaacagctggagtccgggctgctcagcctgcaaaccgtaccggattttgccatcaaccagcgcgccttagtgctgcaaacgccgcacggcaatatcctgtgggattgcatcgcgcatctggatgacgccaccgtcacgctgctgcgtgcgctcggcggcctgcacgccatcgccatctcccatccccactattacagcaccatgcaggactgggccgacgccttcgacgcaccggtgtatctgcacgccagcgacagcga

SEQ ID NO: 1193 - DNA, 498 bp, Zea mays
  misc_feature (58)..(58): n is a, c, g, or t
  Peptide Sequence Number=SeqID_13977
  Probeset Number=SeqID_15596
gacctgcagcccgcgccgttgtatatcatgccgggcacgcacgccaagtgggtgcagnagtaactttatcgcgtcatcgatttccgcaccgagatgaccggcgagctgcaccatttattgctgaagcagtcgctgattggcgccggtttacccgcgcaggaagccagtccggacgcgttccgggacggtttgcagattggcagccacgacccatcaattctggcgcgcctgtttgaagtgcgtgccagccacgtgctcggcgcgcgcgatcggcgccatatcagtgattttctctctggcctgttaatcggccatgaagtggcgcagatgacgcatcagttaacgcatagccgccagccgattgtcattatcgccggcagcgcgctggcacagcgttatcagcaggcgctggcctttatcggaacagattcagtcacgctggagggcgatcgcgctttccagcacggaataaggagtattgcgcatgtcctggcccac

SEQ ID NO: 1194 - DNA, 396 bp, Zea mays
  Peptide Sequence Number=SeqID_13978
  Probeset Number=SeqID_15597
gcgttgctagaggcggcaagaccgccacgttccagtgtctcacgttttcagacctgggtgagtggggcttgaccggtcagtcacgaatggaagacaagagagcccggattatccagcaaagacgagacagcaggatgtgccggcacgtcggcgccacaaatcccggacacacaaaaccacgcgggataggaataaagatcggacgatcacgtcgaatggctgggcctggaagaagtgcgaagaaaaagaagaaagttgctatccggattattgtcatagttgttgtggttgtagcagttctggtcgtcatcggcattatttctggtattgttttccgtaagaagtgcaagcggccgagagtgacaacgccgccggtcgggcctgtccaagttccag

SEQ ID NO: 1195 - DNA, 632 bp, Zea mays
  Probeset Number=SeqID_15598
gttcaacggggttcggccccggcccgatgaggagctcaacgtcaagggtcgtttgttgctgagcaacactgtgccggtgcgcagtcagggacgcattatcggcgcggtctgcaccttcagggacaagaccgaaatcagccagctgatgcagcgtctgaccggcatggtaaactatgttgatgccctgcgtgagcgctcgcacgagttcatgaataagctgcatgtgatcctcggcctgctgcacatgaaaaattatgcgcaggtagaagcctatattctgaagaccgctaataactatcagacggaaatcggcttcctgctggagaagatcaaatcaccggtgattgccggttttctgctcagcaaaattaaccgcgcctctgattgcggccatcgtctgaccatcagcgatgccagttacctgccggacagcggcaacgagcagcagatggcggcgctgatcaccgtggtcggcaacctggtggagaatgcgctggatgcgatgagtgagcagaccgagggcgaaatccacgtcatgctgcactatcagaacggctggctgacctgtgaagtgagcgatgacggaccgggtattgcgccgcagcatctggcaaccgtgtttgacaagggct

SEQ ID NO: 1196 - DNA, 431 bp, Zea mays
  misc_feature (55)..(55): n is a, c, g, or t
  Peptide Sequence Number=SeqID_13979
  Probeset Number=SeqID_15599
ttgcttgtgctcatgagggtggatccgtgtttgtccgagtaccgggccgggctcnctgggcggtatcctctttatatggttctttgcaatctgggagtatttcagcatgttcagtttgggcttcatcaggtagctccagtctgtggcgtaatagacgagccacggatagctagtcttctagttgggtgccctgccctgtgtatggcaggatctctccgagactgttaataagcaagtcgtgcccttatgcgtcaaggatagctttggttttgttctggcaggatggacagtatcgcccttattaggcagaatgccctccgcagtaggttatcctcctacccctagctgaggaaggggttcttcgcgagaaagctttacgtctaccacatagggctctattggttcgcttccagcagcatatgtgcctgcag

SEQ ID NO: 1197 - DNA, 539 bp, Zea mays
  misc_feature (63)..(63): n is a, c, g, or t
  misc_feature (245)..(245): n is a, c, g, or t
  Peptide Sequence Number=SeqID_13980
  Probeset Number=SeqID_15600
tgcaggttgaatttaaaggattcccctgaagccagcaactggtgaaatggttatgctgttggnttaggagacttaaaagaagattaacacggccacccccaaagatggaagccataatggttcagccaaaagaattcctaattaccagcctgccgtcaataagcctagttcctaataagaactgaatggaaacatcaagggtagcctaagaagtggttcggcccctacccaggtccaggctggtntggccttcttcaccctttcttcccagagaagttaagaaaggttttctggaggctttttttggttgggttggttaaggaattcccaaaaagggtgttaaaaaccaaaaggaccttgcaggttgtggggcaaaataagggggccaaaaccttttgggttagggccattagggttttggttggaaagcgcacccttaaggcgttaaagaaggttccggtggtcttcaaagccttttccaaggaaaaaatcttggccaaggaacccattgtggattggtccaataaggctgtcgcaaa

SEQ ID NO: 1198 - DNA, 536 bp, Zea mays
  Peptide Sequence Number=SeqID_13981
  Probeset Number=SeqID_15601
atgggaaaaaaacagagcagaaaaactggaaactctaaaaatcagagcgcctctcctcctccaaaggaacgcggctccttaccagcaatggaacaaagctggatggagaatgactttgacaagttgagagaagaaggcttcagacgatcaaactactacgagctacaggaggaaattcgaaccaatggcaaagaagttaaaagctttgaaaaaaaattagatgaatggataactagaataaccaatgcagggaagtccttaaaggacctgatggagctgaaaaccaaggcacgagagctacatgacaaatgcggaagcctcagtagctgatgcgatcaactggaagaaagggtatcagtgatggaagacgaaatgaatgaaatgaagcaagaacgaggagtttagagaaaaaagaataaaaagaaacaaacaaagcctccaagaaatatgggactgtgtgcaaaggccgaacctatgtctgattagaaaacctacagtggcagggagaatggaaccaagttggtaagcactctgca

SEQ ID NO: 1199 - DNA, 789 bp, Zea mays
  Peptide Sequence Number=SeqID_13982
  Probeset Number=SeqID_15602
cacctcgctgacccatacacgggcgctgtacgatcgtctcagcaccgcactcacggtggcgcaggtggctggcgtgcagcggctgtgcaatcactactcggcgcggcttaatccgctgccgggaccggattcttcgcgcgaaagcaataatcgcctgacgcaaatcacccagtatgcgcgccagctggcgatgcagcctgagctgattaccgccagcagcatcagcgcgctggatgcggtaggcctgactgaacccgatatcgttacgctcaaccagctagtaggctacgtcagctatcaggcgcgcgtggtcgccgcgcttcaggcgatgatgggcctgccggtgcgctggatccctggcgtcacgccgcccaccgacgccgatgcggtgctgttcagtcaggctgctgcctggcagcacgccctcaagccggttgagctgcgctatgccagcgctgaccagctggcggcggtgaccttttgtcagggtatggccggactcgacgacgctgtctggctgctggtgcacgatgcccaggcgctgtatggctgggcgacgctgcgtcagcggcttgaggcttatggtggggaagaggaacagctggcgcaggcagtcagcgcgcgcgtactgggctgccgacgccagttcgcgcagctggcgaacggctggcgcacgcgtttgctacacgatgtggatcaggccagcgatgacagcctgacgcaacaaagtaaaagcgctgagcgcccagctgacccggctgccggagcgcttcagtgccgcccggttgc

SEQ ID NO: 1200 - DNA, 944 bp, Zea mays
  Peptide Sequence Number=SeqID_13983
  Probeset Number=SeqID_15603
gcggcgggcgattcggtgtggtggcactgcgacgtgattcatgcggtggcgccggtagaaaatcagcagggctggggcaacgtgatgtacattcccgccgcgccgatgtgcgataaaaacgccgactatgcgcagcaggtggcgcaggcgctggcgaccggtgtctcaccgggcgatttccccaaagaggattacgaagccagctggcgcgcaggctctatgaacgcacgtcatcagcacattattcaactggtcagcgagcgcggcagcgtcagcgtcaatgaactggcgcaaaccaccggcgtttcggaggtgacggtgcgccaggatttgaacctgctggagaagggcggctttctgcgccgcgtgcacggttccgccgtggcgccggaaagtgatgacgtaggcgcgcgcatgcaaacccgctttgcggtgaaaaaacgcctggcggagtacgccgccgggctggttaatcccggcgaaacggtgtttattgaaggcggcagcaccaatgcgctgctggcgcgagagctcagccatcggcaggacatcaccatcatcaccgtcagccattacatcgccggactgctgcgtgagcagggcggcgatgtgattatcctcggcgggctgtttcagaaaagcagtgagtcggtggtcgggccgttaacgcggctgtgcattcagcacctcaactttcataaggcgtttattggcattgacggctgggatgaggcgaccggtttcaccagccgcgacatgctgcgctgcgatgtggtgaacgccatcatggaaaagcccacccacaccgtcgcgctcaccgactcctccaaatttggtcagattcatccctatgcgctggcgccgctacagccgtttaagcaggtgatcaccgacacggaactcgccgcaggctggcagcagcagctgcgcgcgcagtcgctgca

SEQ ID NO: 1201 - DNA, 276 bp, Zea mays
  misc_feature (157)..(157): n is a, c, g, or t
  Peptide Sequence Number=SeqID_13984
  Probeset Number=SeqID_15604
cgggctggatctgccagcactctacctggcgctagaacgaatcgtgcccgcatatctgacggtgatggtggtgccggtgtgtcagctgcagctgatggtaatcctctggccacagcttaactggccggtgtgcccgtcagatcgtctgctggcaacncggtctcaggtgatcctacagtgatgtccgccacggttctgcatcagaagggtcccgctctgtttcgcttcctgcatgcgcctgtcgtgtacacctgcgtgcacctgaccaccctggcg

SEQ ID NO: 1202 - DNA, 561 bp, Zea mays
  Probeset Number=SeqID_15605
ccagcagaagggcaaccaggtgtggattgaggtggccaacaccggcacgccgattccggctgaagagcaggcgatgatctttgagcccttttatcaggggagccagcagcgcaaagggccggtgaaaggcagcgggctgggattaagcatcgccaaagattgcctgcgcaggatgcagggtgatttgcaccgatttctcgtcggcgcactgatcgccatcggcctgagcgcctgtcaggcgccaccccagagcagtacgccgcgcggtgcggtgaacctgccggagccggacgtgcgcctggcggattatctggccaccgattgccagaatgtctggcagattgaagcaccggcggccatgagcaatccactttactggcagcgcgctatcgactgcggtgagcggctgtcggcggccgaagcgcgggcggaagcgcggcgctggccggtacagaactgggcgcgcgcctttaagcagggcatcctgctggcgaacggcaacgtgacgccggtggagcgccgtcagtacgttgatacgctcgacagctacggcgcggttta

SEQ ID NO: 1203 - DNA, 335 bp, Zea mays
  Peptide Sequence Number=SeqID_13985
  Probeset Number=SeqID_15606
tactgggcgcgaacaccctatgagggcggcatagtctggctggtaggggccggaccgggggatgtggatctactgacagtcaaggcgctgcgcctgctgcaacgtgcggatgtcgtggtctatgatcgcctggtcagcgaagcggtgatggcggaagtcgccagcagtgcactctgtatcgacgtgggtaaacagccgggtcatcacggcctgaagcagactcagattaatcaactgctggtggccctggctgccagcgggcgcaatgtcgtgcgtttataaggagacgatccctttatctttggccgtggcggtgaagagatggtcagcctgca

SEQ ID NO: 1204 - DNA, 202 bp, Zea mays
  Peptide Sequence Number=SeqID_13986
  Probeset Number=SeqID_15607
tagttagggtagtggggttttttggtaaggtttttgtaggatgtgaaggaagtggttataatgaggggcaagtgagtttacattttgttgggattttatatttgattggtttttatgaagttgtaatgggagttagtggttgctatatgagaatagttaaatggatgttatgggaaatgtttgatgtttgttggggtttatt

SEQ ID NO: 1205 - DNA, 406 bp, Zea mays
  Probeset Number=SeqID_15608
ggtgctggtgcagggtgaccgagtgattggcgagggctggaaccggccgattagccagtgcgatcccaccgcgcatgccgagattatggcgctgcgtcagggcggcaaagtgattgataattaccggctgctcgacaccaccttatacgtgacgctggagccgtgcgtgatgtgtgcgggtgccatggtgcacagccggattacccgtctggtctatggcgcgaaggatgagaaaactggcgccgccggttcgctgctggatgtgatcggccatccgggcatgaatcatcagattgagattgcgcatggcgtgctggccgaggagtgcgccacgctgctgagcgacttcttccgtatgcgccgcgaacagaagcgcgcacagcggcaggcgctgcgcgccgattag

SEQ ID NO: 1206 - DNA, 1124 bp, Zea mays
  Peptide Sequence Number=SeqID_13987
  Probeset Number=SeqID_15609
tgcaggcgattgtgcatatcaccgccgctggcgaatgccgcctcaccaaccggggcaacgtgacgcgcgtgctgctcaatgacatcccgctggagcgcgggcgtcaggtggaattacaggatggcgacgtgctgggcatcgatgattaccagctgctggtcaacgatctcaacggcgcgcagcagccgcaggccgccacgctggcaccgcagccggtggtgcaggctccggtaatggctgatgtgccaccggcggaaaaggatgccagcaccgccgcgatccccagcgagatctgggacagcctcgccaaagagttctcgatctccgatgatctgtcgaagcgcaaagcagcggccgaggtgctgacggaggccaatccgctcaccgcgccggccagcctcgatcgcaacccggcggatccgctggctcagctggtgaacgatgcgccgctggatattggccagcagccgaaaaacaccagcctgttcgatgaaggcgatgcgctgttcgcacaggaaagtatcttcgacgatcgcacccccagcacgctatcggcgcagcagaatgccgccgcgcagccgcaggtcgagagtgccaccgagctcgatccgctcagcctgtttggcagccagagcagcagcgacgtgcgcaaccacgacgatccgctcggcctgatgatgggcaatgcggttccgctggcgcagccggagatcgcgccggcacagacggttcaaccgcagcctgtcgcccagccggaaacgcccagtgaaccctcgccgaagacggcaccggtcgagctggcggatctcagcagttcgccactgtttgatgacaccgaaacccaggccacgtcgccgctgatcgaaccgcaggcggagcagccggagacggtcgcgccgcagatggattacggcggcattacgctgcccacgccgcaggcggtgcaacgtgtaccgtcgccgacgccgaaagggcggctgcgtatcgatccggtggcttcaagccatcagaacgcggcacccgccagccaggcgacagccagccacagcagcggcgacgcgctgaaaggcgaactgctggatgcactgctggaaggcatggggtgcgcgatctgcaggcatgca

SEQ ID NO: 1207 - DNA, 1254 bp, Zea mays
  misc_feature (1)..(197): n is a, c, g, or t
  misc_feature (1254)..(1254): n is a, c, g, or t
  Peptide Sequence Number=SeqID_13988
  Probeset Number=SeqID_15610
nnnnnnnnnnnnnnnnnnnnnnnnnnnnnnnnnnnnnnnnnnnnnnnnnnnnnnnnnnnnnnnnnnnnnnnnnnnnnnnnnnnnnnnnnnnnnnnnnnnnnnnnnnnnnnnnnnnnnnnnnnnnnnnnnnnnnnnnnnnnnnnnnnnnnnnnnnnnnnnnnnnnnnnnnnnnnnnnnnnnnnnnnnnnnnnnnnnnnctagcgcgcgcgatcgcaaagagagcggtgaaagatgaaggtgcagtgcgacgtgtgcgcggccgaggcggcgtctgtgttctgctgcgccgatgaggccgcgctgtgcgaggcgtgcgaccgccgcgtgcaccgcgccaacaagctcgccggcaagcaccgccggctctcgctgctcggcccggcggcgccgtcctcgtcggcgcagcagacacccgccgccgcctccgctctgcgacatctgccaggagaagcgcgggctcctgttctgcaaggaggaccgggcgatcctgtgccgcgactgcgacgtgccggtgcacacggccagcgagctggccatgcgccacacccggttcctgctcacgggcgtgcgcctctccgcagagcccgccgcgcgcccgccgccgtcggaggaggacgagaacgacagcagcggcagcagcatctccgagtacctgaccaagacgctgcccgggtggcatgtcgaggacttcctggtggacgagaccgccgccgccgcaactaccattggcgtctccacagacgtgtcgtatcaggcgggagggctagctcggacaggcggcccgcaggacggctactactccgcgtggatggcgccggagcagatcttctgcgagggcaagggcagcaggatgccgcagatggcgatgtgcagcagcagcaagagacccagagccacgtcctcctcctattcttactggtgaacaacccaacaggagacgaccgtgtcagagccgtcagccgtctgtctgtattattatttcgttcatgcatatgcctcggctggtscagtgcattattcttaccgctagtctgcctgctaactgaagttgtttcgtgctcaactgcccgcgtgcattttttttccgcctgtggaacgaggaggatcagacatcagtgtatgcttgcgagcgtttgcgcttttttgaggcgctagagaatgaatacctccgcgcctttgtatttctctcccctctttttttttttgctcgttgcaaaaattcaaagcctacctatctatcgatgtttatcatgn

SEQ ID NO: 1208 - DNA, 425 bp, Zea mays
  Peptide Sequence Number=SeqID_13989
  Probeset Number=SeqID_15611
ctaagcggacgtgccagcaagaaaagaggagcccactgcggctccttttttatgcgctaccgcgcagcggcccatcgccctcacgttttgctggtcgcggttcttgcggaaagctgctacactgccgctcttacgcatggtagtttgtgcccttttcacacgcaggccttgaggctgcgtcatatcccccctgaaaactacatcgcgcagcgcgatcagggcggttcggagtaatacacctgcatgtcttttgactctctcggcttgaatgccgatattttgcgtgcggtagcagaacagggctaccgtgaaccgacgccaatccagcgtcaggcgattcccgtggtgctgggccgtcgtgacctgcttgcgagcgcccagaccggcacgggtaaaacccgccgtttcacgctgcctctgctgca

SEQ ID NO: 1209 - DNA, 796 bp, Zea mays
  Peptide Sequence Number=SeqID_13990
  Probeset Number=SeqID_15612
gctttatcacccatattgataccgtggatgtcgggctatccccggatatccatccgcaaaccctgcgctttgagggcgcggatctgtgtctgaatgcgcagcaggacatctggctgcgggtggcggagcatccggaaatcctgccgtatgtcggtcaggagattgtgttcagcgacggcaccagcgtgctgggggccgacaacaaagcggcagtcagcgtggtgatgacgctggtggagaacctgcgtggcgagcacggtgatgtggtggtggcgtttgtgccggatgaagagatcggcctgcgcggcgccaaggcgctggacctggagacgcgctttaacgtcgatttcgcctggaccattgactgctgcgagctgggcgaagtggtgtatgagtgcttcaacggcgcctccgctgaaattaccttcaccggcgtgccggcgcatcccatgtcgggcaaaggcgtgctggtgaatcccctgctgatggcgcacgacttcatcgcccgcttcgaccggcttgccacgcccgagcataccgccgggcgcgaaggctatatctggttcaatgatatgcaggccaatgccagccaggcggtattgaaagcgtcgattcgcgatttcgatttaaaggggtttgatgcgaagaagcagcagctggtggaagtcgccgatcagatcgccgcgcactatcccactggtcacgtcgcgctgaagatcaatgatatctatagcaacatcagtaacgcgataggtgaggaccggcgggcaatcgatctgatttttgctgcgctgca

SEQ ID NO: 1210 - DNA, 556 bp, Zea mays
  Peptide Sequence Number=SeqID_13991
  Probeset Number=SeqID_15613
tgcaggagaacgccagcgaagcggatattcagagctggtacgatcagcacaaagccgactattcacagccgcagcgcaaccgttacagcatcattcagaccaaaaccgaagccgatgccaacgcggtgctggatgcgctgaaaaagggcgaggatttcgccacgctggcgaagagcaaatccatcgacccaatctctgcgcgtaaaggcggcgacatgggctggctggagccgaacaccacgccggatgagctgaaaaacgccaacctgacgcagaaaggccagctgtctggcgtgatcaagtcctcagtaggtttcctggtggtgcgtctggacgatatccagccagagcaggttaaaccgctggcggaggtgcacgacgcggtggcggataaagtgaagcaggaaaaagccgtcgacgccttctataagatgcagcagaaggtgagcgaagccgccagcaacgacaacgaatctctggcgggcgccgcacaggcatctggcctgaaagtagtggaaacgggctggatcacccgcgataacgtgccggccgatct

SEQ ID NO: 1211 - DNA, 396 bp, Zea mays
  Peptide Sequence Number=SeqID_13992
  Probeset Number=SeqID_15614
cagtgtctggcatcatatgctgtgcatgtatgccgacaaggccaagaccgccatgatcgtagtcgtatctagcgatggcaccgcggacatactggtcgtcaagcaccgcagcacagttcccatcgtctctgttgtggtagccgtgctaatcatggaatctatatgggtcctcatcagctggtagggcacagctaggcacagcctgatctatagaggcgtcattcccatcctctgggagggctccaggaagggtatggattcagagtcaaccgaggtgcatcttgtagtatgcgctcaagtcgtccgtgcataagcaactttgcaagtctggtgatgccattgtggatctcgtattgtaacggcgttgcatccgtcatcacgatttgcatcggtaag

SEQ ID NO: 1212 - DNA, 316 bp, Zea mays
  Peptide Sequence Number=SeqID_13993
  Probeset Number=SeqID_15615
cacgttcttcagtgaaacgggcgcagggaagcacgttccaagggccctgtttgtcgacttggagcccactaggattgacgaggtgaagaccggggcgtaccgccggcttttccatcctgagcagctaatctcacacaaggaagatgctgcgaacaacttcgcctgtggacattacacaggtgctcaaaatgttcttggaaacaaggggactgaaattgcaaaggttgtctcgggaagcttacatcgacgaactgatgcggaggcgggcgtggaggcgctcgatgccgtccagcaatcagtagttgtcactacatcg

SEQ ID NO: 1213 - DNA, 312 bp, Zea mays
  Peptide Sequence Number=SeqID_13994
  Probeset Number=SeqID_15616
gccttctggccgggtccggccacctatgtggcgcctgcttcgccgcatacgccgcgctggttaaccggcctttttgattcgctggcgattcgcgtcagcgatcatccgcaggtccaggcgctgtgtcgcggatttggcaagccgctggtctcaaccagcgcgaatttaaccggtcagccgccgtgccgcagcgccgccgaagtggcagagcagtttggctcgcagttcccggtgttgcaggcggccaccggcggtcgcctgaatccttctgaaatccgcgatgctattagcggtgaactcattcgtcagggc

SEQ ID NO: 1214 - DNA, 705 bp, Zea mays
  Peptide Sequence Number=SeqID_13995
  Probeset Number=SeqID_15617
cgcaatcctgaggtgcaaatcgaagcggtgcccgaggcgctgagtgccagcaatatcgcgcaggcgctggcggagtgcgatctggtgattgatgccgccgataacttcgcggtgacttaccaactgtctgatgcctgtttccaggcgggcataccgctgatcagcgcctcggtgctgggtcgtcagggctatgctggcggtttttgcggcggcgcaccgagttatcgtgcgctgtttccgcagctgcctgcttccgcagctaactgcaacaccgccggcgtgatagggccagccgtggcggcgctgggggcgatgcaggcgcagatggcgctcagcatactgctcggcctgcaaccctcaccgctcggttgcatggtcaactgtgacttcgtcagctggcactttcgttcgttccgctttgatgcggcacaggaaccggcccagcccggcgtgccgtttattgatgctcacctgttacagcccggagactgcattgtggagctgcgcagctgcgaagaggcgcccgccagcgtggccgatcgggttgagcgcgtattgccgcacgaactggacgcctggcagccaccggcggatcgccgcatcgtactggtgtgtgccagcggcatccgggcggcgcaggcggccagcgcgctggcgcagcgcggcttcaatcagctggcgattctggcggcgcggcggccatga

SEQ ID NO: 1215 - DNA, 215 bp, Zea mays
  Peptide Sequence Number=SeqID_13996
  Probeset Number=SeqID_15618
atggaggaggagaggagggatggggcgggtcggcaggtggaaggacggatcactgatgatgcggcggaaggagacgcaggcaatggaggcataggcgaggtttgcgggggaggcaacgcggaggaagatctagatggaggagaggaggcggtggaaaaaattacagtgaccaagatgaaagacaagacgaaagacagcagtggagcacaggagag

SEQ ID NO: 1216 - DNA, 455 bp, Zea mays
  Probeset Number=SeqID_15619
gtctcaggtcgcatgagggataaagtccgcgcccggcttcactcaggtactaggtttaccggttaccatttttcccggcatgtgctgttacttcactgaaactagaagatgcattcgatacgaatagagtgaagtgtgttgtggataatctgggctacgtgatattttttaagagggctgattccattcaataaatcagggaacgtcaatccaaaaaatccatatcttcttcatcttggaatcgcaggctttcattcaagatttttgaagatctatctagaacttccaccaatagtccaataccattacaaatggaagaggatctagagcaactgaaagttcttgaaaacagctatcggatgaaggtgctcaaagtggacaaagattcccatggtgtggatgcacatgagcacaatgagaaaattgaagcagtgatgtgaacaagaaacattcag

SEQ ID NO: 1217 - DNA, 415 bp, Zea mays
  Peptide Sequence Number=SeqID_13997
  Probeset Number=SeqID_15620
gcatgacccagagatctccggatgcatttgatggcttgatgttacagctgctgctgaaggcatcccaagacatcaggtttgtgtgtgaagaagctgacagggcacttggcttaatggttggttccatgacccctcttccactgtttcagaaaatgagggtatatgggagtcacaaaaaccttagggtcagggctaaggatgctgtttctctctccagatgtgtctccaagatggggcttcaagaaatggagcagtttgggttggttgaactgattgaagtggcagctgatttactgaatgatagacttccagaggcaagagatgcagcgcgtagtgttgcaacttcaatgtatgaagcactgacaaaggactcggaagagaagatggagctgtggcagagcttctgccaatccaa

SEQ ID NO: 1218 - DNA, 414 bp, Zea mays
  Peptide Sequence Number=SeqID_13998
  Probeset Number=SeqID_15621
gatcctgccgagccggggacgggcgagtcgtcgtcgccgccgccgcgccgccggacgacgagcactaggccgcaccgcaggcaagttggcgcgctccggcggtcgccgtcgcgcgcgggccctggaccgacttggccacgtctggacccagcgagcgtcgtcgcgcgattagcgttattattgctgacccggctggctgctctcgctcgcccccatcttgttggggacggggacggtcgtcgcgtggaaaattcagcggcggccgcgacgagcccggtcatcagtcagcgacgtaattctggtacccgccaggccgccaccaattctccgcgcccgccacaccgacggccggcgtccagcttgccgtgtgtgtgcagtgtccccggcgacgcggaactcgcatcagggcagtaa

SEQ ID NO: 1219 - DNA, 294 bp, Zea mays
  Probeset Number=SeqID_15622
atgtcttacacgttcctcgtgccacaaaagaatctagtctcagttagccgcgggggctgggaagcccggcggcgcgccggccgcgggggacatgcccgccaggggcgcggcgagggccgccctgtaggagagaggaaggggaaggggagggaaagggtcgccggagaagggagggggcggcggtcggccggccatggagaggcggcggcggcggctggaggggtggggtgggagcggcggcggctggaggacctagagctctggtaccatgttggattgaatgaacagtcaacg

SEQ ID NO: 1220 - DNA, 488 bp, Zea mays
  Peptide Sequence Number=SeqID_13999
  Probeset Number=SeqID_15623
ctgttgctgcaacggacgggtgggtgacgcggacgacgatctggaaagcgtcggagcggttgcatggtcggcaggctgagcacgtcacccctactctgctttgctcacgacggacatgcatatggtgcatttgctgcccgccggtgaagccgaagatgaggagaagcttcgtgtcctcgatctggcctgtggcactggcaggcacaggacggtgtctgctggcctcgtctcgtctcgtcttgtctcgtgggaaacatgcaattaagcagcagcgcatgtcgcgtgaatcgtggacgagagcgaggtccatcatcaatcatcggcttgggaagatccccagcgcgctgaacttcccaactcatgattcacggtcagccccggcgtgcgagatgtggacttcacacgagcaacgcatcctgattaatgactgcacacaggccacattactacgggcttcatgtcaggaagataagaccagggcgacatga

SEQ ID NO: 1221 - DNA, 804 bp, Zea mays
  Probeset Number=SeqID_15624
atggagcaggtcgcccccgatttcccgaaagcccagttcattgcggtgagcggcaatgaggggcaagccccgaacgtcatgtcgatcgactggaataatgcgcagttcggttgccagctcggcctgcttgctgcgcggatgagcaagacgcataaggtcggcggcgtgtacggcttgcagggcgtgccgaacattaccgcccaggccggcgccttccgcgtttgcgccgagaaggcgggcgcgcatgtcacgatcatctatatcaaggatatggaggattcgggcgaggcaaaggaagccgccctttccatgatcgcccagggagtagatgtgttgaccggtaaactcaacgcggccgaggccgggcttgtggaagccgcgaaggagcgccacgtctatgtgacaggccgcggctacgaccagacgaagatcgcgccagatctcgtactgaccaatattctggaagactggccggcgatgatcggtcatgcggcggaggaggtgaaggccggcaagctcttcggcaccttcgtgcaatacggctataacaccgccccggtgacgggcgcgaccttgggctataagccgggcgagacctttaaccccgtggtgccggcatccgtgcagaaggagatgaccgccatgggcaaagccttcgcggagggcaagctctcgatcatgcgcggcatcgtgcgcagcttcggcacgctgcgcgcgaatgacggcatcagccttgacgttcataagggcgagatcctggggctgcttggcgagaacggctcgggcaagagcacgctcatgaag

SEQ ID NO: 1222 - DNA, 388 bp, Zea mays
  Peptide Sequence Number=SeqID_14000
  Probeset Number=SeqID_15625
tgaagatcggcagagtagtattctggcaggttttgagcagtgcgaagaacgtttacattgtcggcccaatccgctctggagttggttttgatattctgcaagtgaatgatttgcatgttgagagcaagaacattacggtctcagaagtgtaagttcggtacattgtgtagtatccgtcaccgatcgtttagcaagatgcaggcacgtcataagattgaactagatagccgcagacatcaatagtggtaaaaccactttcacactagcctctatacagttatctgcggatgagggttgatctagctaggccggcgacatcgcatgggcgtgaccagatatttacgattcggcgtgctgtgatgcgctacttaatctacaggttgactct

SEQ ID NO: 1223 - DNA, 395 bp, Zea mays
  Peptide Sequence Number=SeqID_14001
  Probeset Number=SeqID_15626
tgcagagttactgctcgagccggcattcgctgtagagctgcgtcattgccgagcacggcggtgacatggagcgcgactacgcctacaccatcggccgcgcgatgggcgatctgcaaagcgctgactgggtgggcgcggagtgcgcgcgccgcgtgctgtcacgtctttcgccacgtaagctgccgaccatgaaagcgccggtgctgtttgcgccggaagtggccactggcctgttcggccatatggtgggcatgatcagcggcagcagcgtttaccgcaaatccgccttcctgctcgacgcgctgggccagcacattctgctgtggtggctcgcgattgaagacaagcagcacctggtgaaagggctggcctcgacgccgttcgacagcgaaggc

SEQ ID NO: 1224 - DNA, 227 bp, Zea mays
  Peptide Sequence Number=SeqID_14002
  Probeset Number=SeqID_15627
aaagattttatgccattctggaggagctttcaattgcaccgcccaagggggggattgccaggaggtagttttatgccttggccattgccttagaaggaggttaccctggtggggcccgtcctttatttgtttttggggggcgggccatggagattgtggtccacgaacaaaaactggtcaaggtccttgccaccggggggcaagtaaaacaagaaaggcctggttta

SEQ ID NO: 1225 - DNA, 400 bp, Zea mays
  Peptide Sequence Number=SeqID_14003
  Probeset Number=SeqID_15628
tgcaggagagccagcgcgcgcgcgacggcgccgagtggcacaacttcataaaactgcttaagcgctaccgcacgcgccagccgatcaacggcgtgatcatgaccatcagcgtggccgacctgctgaccgattccgctgaggcacgtcacgcccaggccagcgcgctgcgcagccgcatggttgagctgcatcagcaaaccggcattcacttcccggtgtatgtgatggtcaccaaaaccgacctgctgaaagggtttataagcttttacggcaacctgagtaaaccgcagcgcgatgccatctggggcttcaccttcccgtgggaaccgggcaagccgcacaaagatgactggtaccgcagctttagcgagcgctttcagcagctggagcagtgtctgca

SEQ ID NO: 1226 - DNA, 453 bp, Zea mays
  Peptide Sequence Number=SeqID_14004
  Probeset Number=SeqID_15629
atgctcatccgcatcgcattagccggaatactgggcggactgattggcctggagcgccagatgcgcgctaaagaagcgggcctgcgtacccacattctggtcggtattggcagcgccatgttcatgctggtgtcaaaatatggctttgccgatatgctgactaacgaccatgtggcgctggatcccagccgtattgcggcgcaggtggtcagcggcatgggcttccttggcgctggcaccatcatcatacaaaagcagattgtgaaaggcctgacgaccgccgccggcctgtgggtgaccgccgcgattggcctggtgatcggtagcggcatgtatgaaatcggtatttacggcacggtgctggcgctggtggtactggaaacgttccgccgtatcagccactggctgattggccgccatcacacccttatcgtccatctcaaagccaaaagc

SEQ ID NO: 1227 - DNA, 588 bp, Zea mays
  Peptide Sequence Number=SeqID_14005
  Probeset Number=SeqID_15630
gtgagtcccgtgagccgccggcggaacccagctgccatttgttgttgcttgtctggcctgcttgttgcggaagctcccggtccctgcgtagcttggtgttcaacgtaccgctacggtggtggtggtgatggatgcagtatggtaggcaacttggaaggatgtgtttttataaggggggtgtcgcgcccagcgcatgatttggtagagcccgcgcacgggcgggttggcatggttgtcatgccgctgccatccaggcctgactggtcgatgggaaccttacggaaggatcctgccttggcactggggggcatgcgtcttcctaatgagagagtggcgctcgcccacgtgtggcttgtccaagtgcctccagtcggcgtttgtcggtgcctggggtcccgcgccctccgcttggtgcgccgccggccggcccatcttgcgcacagctcacgccgggctacgggacattctgttcaatgtcagtcatgtccgccgtgcccgtcggtgtcgcggcacccgtgcaccagaggtccagagtcctggggcaggcacaccctcccacaacctaagcgcaggaacgggccccggtag

SEQ ID NO: 1228 - DNA, 538 bp, Zea mays
  Probeset Number=SeqID_15631
acgatgccggcatcaaatatcgcatcaatcagcgcctggtgcgcggcctcgactactacaaccgcaccgtgttcgaatgggtgaccagcagcctcggctcgcagggcaccgtgtgcggtggcggtcgctatgatggtctggtggagcaactgggcggccgcgcgacgccggcggtcggttttgccatggggctcgagcgtctggtgctgctggtgcaggcggtgaatccggaatttgaaccgacgcgcattgttgatgtctatgttatcgcttcggggcagggcgtgcagtccgccgcgatgcaactggcggaaaaactgcgtgatgccgacccggcgctgaagctgatgaccaacttcggcggcggtaacttcaagaagcagtttgcccgtgcagacaagtggggcgcacgcattgcgctggtgctgggcgaagacgaagtgaaagcgggccaggtggttattaaagacctgcgcaccggcgatcagcagacgctggcgcagagcgacgccgccgcgacgctgcacacgctgctgca

SEQ ID NO: 1229 - DNA, 503 bp, Zea mays
  Peptide Sequence Number=SeqID_14006
  Probeset Number=SeqID_15632
ccaccccctagacccaccactcatatcgcctcaccgagaggcttgacaatgcggccgctcatgaactcgctaatccttgtgattagtcgagactcccactcggggaggccttataaatcgtgaaaggtccgatatagtcggtcagaggccactatcttgtcggctttccaaatggacagcattcctgcttttttcatttgtttggctttttttactttttttttttttttttttttttttttttgcaagcaagttgttaaattcacaaggagagcgacagattatccaaacatttgacttgctacccagcagcaacatcattgatcgttgtgggaagaaaaggaaggagagccaccagaaaagtgacgtgcggcctgtgcaaggatgctgtgataaatttaaaaaggagaacctcatttgaaagacttggatttccaaggttgttgttcattaatcatgaccagaaatcacctcactgcttcaccaggtgttggtggccaacc

SEQ ID NO: 1230 - DNA, 419 bp, Zea mays
  Probeset Number=SeqID_15633
tgatcaagaacaatccgaagttcaaggtgatcgcatcgcaaagcggcgacttcacgctcgccggcggcaagcaggtgatggaagcgttcgcgaaaacctacggcaagcagatcaacgtcgtctacgcgcacaacgacgacatggcgctcggtgcgatccaggcgatggaagaggccggcatcaagcccggcaaggacgtgagcgtcgtgtcgttcgatgcgacgaagggcggcttccaggcgatggtggccggcaagatcaacgtcgacgtcgaatgcagcccgctgctcggcccgcagctgatgaccgcggtgaaggacgtggtcgccggcaagcagctgccgaagcggatcgtcacgaacgagacggtgttcccgatgaacgtcgccgcgcaagttctgccgacccgcaagtactga

SEQ ID NO: 1231 - DNA, 397 bp, Zea mays
  Peptide Sequence Number=SeqID_14007
  Probeset Number=SeqID_15634
tgcagcagcggcgtgagcggttgcagcgcgagcaggcggagcgcgccaacgccgctaaaagccagtttcttgccaccgccagccacgagctgcgcacgccgatgcaggcgattctgggtctgctggagctggagcagcagcagcatccgagcgcgcggctcgatttaatgcacagcagcgcccggtcgctgatgacgctgctgaacgatttgcaggatcatgcgcgcattgagaatcacagcttccgcctgacgccgcgcccgctcgatctcacgctatggctacagcagcaacagcagttttaccacccgctgatgcgcgatggcgggccacagctgcacgtggcggcgctgaccccgctgccggccagcgtgatgctcgacagcgatcgcctgca

SEQ ID NO: 1232 - DNA, 570 bp, Zea mays
  Peptide Sequence Number=SeqID_14008
  Probeset Number=SeqID_15635
attgtacttctcgcacttcgtccactacgcgcaattgccgaacctcgcgttcttcgcgaacagcggcttcccgtttacccgtttcgccgatctgtcgcagacggccgtcgtcgtgcccgaccggccgtcgccgcaggagctcgaagcgtacctgacgatgctcggccacatggggcagtggaccggcttcccggcattgcgcgtgcaggtcgcgcggcccggcgacgtcgccgcgctcgcaggccgcaaggacctgctcgtgatcgacggctcgcccgcgtcgccgctgctgtcgcgctggcgcacggcgctgccgctggcgatcgaccggcagggcggcaccggcgcgacgcgcgtcgcgttctcggtgaaggagcgctggcgcaacggcgtcggcatggccgacggcggcgcgcatatcgaacagacgggccagctcgcggcgctcgccggtttcgagctgccgggcagtcacggccgcagcgtcgtcgcgctgacggcgaccgaccagtcgcgactgggcgacctgctcgacgtgttccagaagccgggcctcgtgtcgcagctgca

SEQ ID NO: 1233 - DNA, 422 bp, Zea mays
  misc_feature (370)..(372): n is a, c, g, or t
  misc_feature (384)..(384): n is a, c, g, or t
  Peptide Sequence Number=SeqID_14009
  Probeset Number=SeqID_15636
tgcaggacatcaagcccggttcgttcgtgggtaccgccgcgacgactggggtcgacggcaagctcacggccacggaagtactggtgtttcccgaagccgcacgcggcacgggtgaaggacattacgcttgggatctcggatcgaacagcacgatgaccaacgccaatgtggatcaggtcgtgcaaggcacgagcggccgcgatttgaaactctcgtacaagggaggatcgaatgccgtgacggtgccggagaacgtgccggtcgtgaccttcgcgccggcgacgcgggatgatctgaagtcgggcaagcaagtgttcgtggtggcgagccctgccggttcggactataaagcccaacgcatcgtcgtcgnnnaggatggggttncgccaccagttaatcgggatggggtggcggcgatgtag

SEQ ID NO: 1234 - DNA, 665 bp, Zea mays
  misc_feature (601)..(665): n is a, c, g, or t
  Peptide Sequence Number=SeqID_14010
  Probeset Number=SeqID_15637
ctccgcaagcacacccaggcatgggcaacgttgctgcgtccggaggagtgcaggtccgtcggcggccgcctgcggtggacgagcgcctcacgcggccgcgccgcctcgtccgcgagctgcccgaccttgacgccggccgcctgcgtcgtctcatccgcactggcgatctcgcgccttgctttgaccccgccgaggacgccagcgccggcctcaccgaggagtgcccgatttgcttctttttctacccgagtctgaatagatccaggtgctgcggcaaagggatctgcactgaatgcttcttacagctgatgccatccgaggcttcaaaacttgtccactgccctttctgcaaaactaaggcctatgcaattgaataccaaggcgctcaaatgacaagcggcaaggaaatcaaacaagagggagaaccgaacgtcaatgagaccaaaccgagtgtgtacatttgaaatytcagattaccggcgaaattgctcggccttakwattagctagtccaattttacacttccgcaagttttytgacctgccgacaagttttttttttcttttctggrctgccatgatgactcatcctgactgaattnnnnnnnnnnnnnnnnnnnnnnnnnnnnnnnnnnnnnnnnnnnnnnnnnnnnnnnnnnnnnnnnn

SEQ ID NO: 1235 - DNA, 509 bp, Zea mays
  misc_feature (47)..(48): n is a, c, g, or t
  misc_feature (50)..(65): n is a, c, g, or t
  misc_feature (68)..(72): n is a, c, g, or t
  misc_feature (74)..(74): n is a, c, g, or t
  misc_feature (77)..(78): n is a, c, g, or t
  misc_feature (83)..(84): n is a, c, g, or t
  misc_feature (465)..(465): n is a, c, g, or t
  Peptide Sequence Number=SeqID_14011
  Probeset Number=SeqID_15638
ctctgtacccctgctgggtgaaaattcattagcattgagaaaatcannannnnnnnnnnnnnnnnaannnnngnaanngactnnaaattcttgtatggtcttgtctcgggaatgcaaaacaaattcacagaaaaagttccaaacagttatgtcttttgaatatctttcttcttctgcctcactatgtcatggtgcaagtcattctgctctctggattcctcttgatctggtgctggaggattccatggatggctatcaagttagtgcaacaagttctattgaaacaattagtggtttgataaagaccctgcgagcaataaatggcacctcttggcatgacacttttttaggcctttggttagcaactcttcgtcttgttcagagggaaagagatcccattgatggcccaatgcctcatcttgatactcgcttatgcatgctcttgtgtatcatacctcttgttgntggtgatcttattgaggaggaggaagaaaggacaccagttgatg

SEQ ID NO: 1236 - DNA, 261 bp, Zea mays
  Peptide Sequence Number=SeqID_14012
  Probeset Number=SeqID_15639
tgcagccgctcgccatcacgcgccgaagcttggacgagtggcccagggccggctccgacgacgtctgcgagtggcccaaccccaccacgcccggcgcgtccaaggcgggcggcgggccctcctccgccaggccaggggaggggctccggctcgacctctcctcgctccgctcgcagggacgcaaggaccagatcgccttttttgacaaggagtgctccaaggtcgccgaccatgtatacctcggcggagacgtcgtctttt

SEQ ID NO: 1237 - DNA, 254 bp, Zea mays
  Peptide Sequence Number=SeqID_14013
  Probeset Number=SeqID_15640
tgcttgtgacgtcgtcgacggatggctgcgcccccggcgacgacggcgatggggacgacatcgctgcctgccggtgcgccaagaagctcgggcagcctgtggcgctggctcggcaagaggcggcgtctgctgcgtcgccggctggtggtgcgcaccgcgtcgccgcgcaccggaggttcatgttcggcgggttccgccggcggctgctcatgcggaggccgtggcggccgatgctcgtcgccatcccggagtga

SEQ ID NO: 1238 - DNA, 407 bp, Zea mays
  Probeset Number=SeqID_15641
ttggaacatgtttcaaccaccacgctcattatcacgctgatcattatggtgctggtctcggcctacttctcgggttcagagaccggcatgatgacgctcaaccgctacaaactgcgccacaaagccaaaagcggcaaccgcagcgcgcgtcgcgttgagaaactgctgcgtcgccccgaccgtctgattagcctggtgctgatcggtaacaacctcgtgaatattctcgcctcggcgctcggcaccattgtcggtatgcgcctgtacggcgatgccggcgtggccatcgccaccggcgtgctgaccttcgtggtgctggtgtttgccgaagtgctgcccaaaaccgttgcggcgctctatccggaaaaagtcgcgtaccccagcagttttctgctggcgccgctgca

SEQ ID NO: 1239 - DNA, 618 bp, Zea mays
  Peptide Sequence Number=SeqID_14014
  Probeset Number=SeqID_15642
atggcggcccaacgcaacgcgcgcgaggcgtgtacgtgcaagtccaagtcgtcgtcgcggccagtgatgagagtgacgaccgacgagcggagggagggagggagcacggcgaggcgagccggtcgagacagccgcactggggtctctcggtcggagttcgtaccgacagccaggcacatgatcgatgaagcacaagacaagactagaactagaagcgctgctccagttccagttccatcttcgacgacgggcggcagcggcggggacagaccgagcacgcatgcagggagagaagagaacacgcacgccattggtgtgcagcagcactactatcactatgcggccgttgacttccgctccagtccgttcatctccctgccctcgggtcggctgcctactcacccgctcgtcagactagaggattccagccggccgggacccgtgcttacgtccagctcggtctacagtccacggagacgaacagtagaggtagagacgacgactacgactacgactacgacctctcttgtccggacgcgcccatgcaccgcgctcacgtgcttcctcgtggccaacctgccggccgccccgccgcccaattacaacaccccctagcag

SEQ ID NO: 1240 - DNA, 461 bp, Zea mays
  Probeset Number=SeqID_15643
tgcagaggcagtgcgagttcctcgctgtcctgcactccagccaggtctccagaggcggcgacaacacagcagccgccatttcgtcgatggggaagagaggggtcctggagctggcccagcgcatgatggcggatttctactcggctgtgtctggtcccgtcacccagccgtcgagcagcatcgacgagtggtacggcagcgccggcgccaggaggaccgacaccgccgtgcgcatggtgacctcgaagaaagccggcaccgtggccgaccttgtgctgagcgccagcaccacggtgtggctgccgaacactccgccgcagctcgtgttccgttacctccgcgacgaccagcgccgtggcgactgggacgccttcttcgccagtggcgcagcggtgacggagctctgctctgtgcccacgggccatctcaatggcaacgctgtctccgtcctctactccaat

SEQ ID NO: 1241 - DNA, 426 bp, Zea mays
  Peptide Sequence Number=SeqID_14015
  Probeset Number=SeqID_15644
ctggacttgagactgcagcaacatctgggagcattctcgctcggacagcagacatgacagggaatgtattggctaggtctcaatttgccattttcttgattgatgtgagggggggtcttcaacccctggatcttgaaggtgggcaatggctgcccaagccttcctttggtatacatacccttgttgcaatgaacaagtcccaatcacttgatgaacatggatttctgactgctgctgctggaaaaacacaccagttggggtttggtgaccctggtgcaatattcccaaaaaccagcctggggatggcaaaactttattaaatacttaagccattggttgaagaattcctggttcaacttccaaataataagcctggagcaatatattggatgaattggtccattctcacttcgtcccaaaataaat

SEQ ID NO: 1242 - DNA, 1162 bp, Zea mays
  misc_feature (1)..(1): n is a, c, g, or t
  misc_feature (1027)..(1162): n is a, c, g, or t
  Peptide Sequence Number=SeqID_14016
  Probeset Number=SeqID_15645
ntggagttccctcacgccggcccctggttaggctcgtcgccatggccgacgtacgacttcgcgttcgccaaagctccctggcccgactctgcccagttcgcgcccagccgaagtcccctgcgcgcagccgtggatttctctgcacagcgttcctgctccccagcctccgtcgtgctcgacagcatgtaattcatgtcgaagcagtagctgcgatcccttgcgtcgctctcgtcagatcgagtctcgcgttgtcgatctgtgcagatcggtttcgccggttgtcgatttcctattcgccatggttatcacgtcggctgttcgtatctaagctagtccagctcgccagccgtcgcgccctttttacccgttgggccgtgtgttgccgtgttcacctcattgtgtcgtcgtggctttatcggcatattgctatgatacctggatcgcgctcgcctcaactcgaacgagtcgtactgccatcatcgtcgtcaaatggaaattgttgcgctggcatgtcgatattgttgatcgccatcctcgtctacgttaagtcctaagccctgaagacgctcttgtgctggccacgcgtcaccagctcgacaaaaaggaattccatgagtatacggccaagagtagaagttgtgtgcatcgctcgccagacatgtgtgatcgaagacatcaacgaaaaaccgtcgtcgtgcttccgactatcgtgtcgaattagtcagggtacgataattaatcgcgtgatgcggaggaccggagctgagttgaccccaagatgacgtaacaggtagactactccgtatagtgaagctgatggacgaatctgaagagggacagactgaacaagagccaacacaaaaggctgatcgccaagtggtcgccacctaacaagacactaacgttacgagtcacttttattgtgattggtgctaagtcccgatgggctcgaccttcttataagtctaagtactccttctatacttcttattgaggatggtcacttgagctagcatatatttcaaannnnnnnnnnnnnnnnnnnnnnnnnnnnnnnnnnnnnnnnnnnnnnnnnnnnnnnnnnnnnnnnnnnnnnnnnnnnnnnnnnnnnnnnnnnnnnnnnnnnnnnnnnnnnnnnnnnnnnnnnnnnnnnnnnnnnnnn

SEQ ID NO: 1243 - DNA, 947 bp, Zea mays
  Probeset Number=SeqID_15646
tgcatgcctgcagggcaggccgcgcctgttcagcaaagcaccatgatcgcgcgtggccttaagttccagggcgacgtccgcgatctccttgatattgaagccagcggatacggtctgtcctggcgaagtgacagcagcggcgtttatttctatctccaagatacccgtacttttcagctggttatcctgaatacaaaggttaacagcagcgcctcgattaattccggttcaggcaatcagctgggcagcggcggcgggacgaccggcgggacgacgggcgatatcagctctaatcagaaaactgattacggcatgaacagcgacctttacgatgatatccgtaaaacggttgagcagatgctgaccccgaaatccgggcgattctggctttcggccgccaccggcacgctgagcgtgacggatacgcctgacgtgcttaaccgcatcggtcgctatatcgagtatcagaacaaggttctgagccgtcaggtacagctcaatatccagattgtcagcgtcagccagacacgcaacgagcagctgggccttgactgggggctggtttataaatcccttcataactttggcgccagcctgacagggtcaatggccaatgcctctacgtcagccgccagtgccggtatctcaatcctggatacggccacaggtaatgcggctaaattctccggatcaagcctgcttatcaaagccctttccgagcagggtaatgtcagcatggcactgaaccagattgaccctaccgccaacctgacgccggtggcgtatcagctttcaagccagaaaggcatcctgtccagttccagcacaaccgcaacggcgaacgtgggcgtcacctcatcgatgacaaagacgaccaataccaccggcctgttcatgaccatgctgccgttcattcaggaaaacggcgacgtgcagatgcaggtcga

SEQ ID NO: 1244 - DNA, 507 bp, Zea mays
  misc_feature (465)..(465): n is a, c, g, or t
  Peptide Sequence Number=SeqID_14017
  Probeset Number=SeqID_15647
gagcaggttacccagttttctccttcaattcttaaatctgagggagtgcctgtgtatcgcacagttcagcattctggggaattcgttattacctttccaagggcatatcatgctggcttcaattgtggcttcaactgtgcagaggcagtgaatgtggctcctattgattggttaatgcatggacaaagtgctgtcgagctttacaggttacaatgccgcaagacatccctgtcacatgacaagctgttgtttgggtcagcactggaatctgtacgagcccttgcagagctagctcttggaaaggaaactccaaaaaatttgaaatggggaagtgtctgtgggaaagatggagatcttaccaaggcagttagggcaaggataaagatggaagaagaaaggctggactgtcttccaactcatcttaagttgctgaagatgaacagtaactttgatttgtacaggaanagagaatgcttctcttgcttctatgacttgcacctatctgct

SEQ ID NO: 1245 - DNA, 272 bp, Zea mays
  Peptide Sequence Number=SeqID_14018
  Probeset Number=SeqID_15648
tcagccgccatccagccattcgccaggaaaccaaaactgcagcggaaaccaggcgccagcagccgcaagctccgccgttcgcccacgcgcccagccagccggccgttcttcttccaccgttccaccagcgcccagcggccccgccgttcgcccagtgccagcggccccgccgtcgaggccacaggccaggagcctagcccaggacccagccaccgagcgtccattggtgagcgcaaggtgttcggcaaaatgctccagcccatagaattcaa

SEQ ID NO: 1246 - DNA, 455 bp, Zea mays
  Probeset Number=SeqID_15649
agcccgatccgttcgcgctggtcgaagcggcacgcattttgtgcgccgacggcttcctggtgtttccctacaccacggaggatctgatagtcggtgaaaaactgctggccgctggctgtgaactgctgatgccgtggggcgcgcccatcggctccggccagggattgcgaaatattgacgggctgcgggcgatgcgtgcctggttcagcgatattccactgatcattgatgctggcatcggcgcgccgtcacaggcagcgcaggcgatggagatgggcttcgatgccatcctgctcaataccgctgtggcgaaagcgggcgatccggtggcgatggcgcgcgcgttcagccaggcgatcgccgccgggcagggcgcgcgcgaggccgggctgatggagaagcgtgatatggccgtggcctcaacgccgatcttcggcctcgctaacctgaactaa

SEQ ID NO: 1247 - DNA, 316 bp, Zea mays
  Peptide Sequence Number=SeqID_14019
  Probeset Number=SeqID_15650
ctgcagcaattcttggcctagcagtcctcttaatctcagggtcgagctggtgcgttgcgaacgcggccgttggggacgcgcggctgcaggccgcactggactacgcgtgcggccacggcgctgactgcagcaccatccagcccggtgccacgtgcttcgaacctaacactaaggtcgcgcacgcctcgcatgcgttcaacagctactaccagcgaaatggccgagccagcgggacctgcgacttcgccggcgccgcctccgtcgtctaccaagcgccaggtgaatatatatttgtcatcatatgcgatgatcatgc

SEQ ID NO: 1248 - DNA, 367 bp, Zea mays
  Peptide Sequence Number=SeqID_14020
  Probeset Number=SeqID_15651
tgcaggcgcaggctccccgtgcccggcgggtggccgggatctgcaccggcgcgttcgtgctgggtcaggccggtctgttatcggagcgccgcgccactacgcactgggtacatgcccagagtctgcaactgctgcacccgacgacgcggatagaagaagaccgcatctttattattgacgatcacatctggacctcggcgggactcaccgccggactggatatggcgctgggaatggtggagaaagatctcggtgccgaagtggcacgcagtgtggcacacctgctggtcatgcatcaccgccgctccggcggacagacgcagcactctgagatgctgatgctctctccgcgcagcgaccggctgca

SEQ ID NO: 1249 - DNA, 660 bp, Zea mays
  misc_feature (563)..(563): n is a, c, g, or t
  misc_feature (572)..(572): n is a, c, g, or t
  Peptide Sequence Number=SeqID_14021
  Probeset Number=SeqID_15652
gtggatgaggggcatcggttgttaaacaaagattccaagttgtttggtcagcgtaaagattataataccaaacatcgtgttctattaacggggaccccagtccagaataatcttgatgagcttttcatgcttatgcacttccttgagggtgaaagttttgggagtataactgatctccaagaagagttcaaggatataaaccaagacaagcaaattgagaagcttcatggaatgctgaagccacatcttcttcgaagattcaagaaggatgttatgaaagaacttcctccaaaaaaggaattgattctacgagttgaattgacaagaaaacagaaggagtactataagccaattctcaccaagaattatgatgtgttagcccgtcgtaatgggggacatacatctctaataaacgttgtaatggagttgcgcaaactctgttgccatggattcatgattgatgaacctgatcttgaacctgccaatccagaagaaggtttaaagacgcttctatattcatcaggtaagatgcagctgctgcacaagatgatggagaaactganagacaaggncatagatctctaatttattcacagttccatcacatgttggacttgctggaggactatttgaattacaggaaatggacttatgaacgca

SEQ ID NO: 1250 - DNA, 286 bp, Zea mays
  Peptide Sequence Number=SeqID_14022
  Probeset Number=SeqID_15653
ggggatcctttaaagtcaacctgcaggcttccaacctgggccctgcccgtgtttttacaccgtggggacgggaaaacccctggggtaccccaactaaatggccttgaaaacatccctttttccacatgtggtaatatcgaagaggcccgacccattcgcctttccaaacagttcgccaccctgattggcaatgtggccttgatccggattttcttctttcacccttttgtccggattttaacaccgattatggggcattttaagtccattttgttttaagcccgat

SEQ ID NO: 1251 - DNA, 253 bp, Zea mays
  Peptide Sequence Number=SeqID_14023
  Probeset Number=SeqID_15654
ccctgctggagagctacccctgcctggggggcggggattgcgtgcttgtgctctcccgtcttttcacttgcaggggccttggtagccgactgccgatgccgttttcatgggccagctcggtgccggcggggacaacctgtccgccgctgacctacgggtggtcagcagagggcagggccatgagcgagcgtggagccggggtcactgatcgcaacgtgctcgaccggctcaacgacgcatgctgtgcgccgac

SEQ ID NO: 1252 - DNA, 230 bp, Zea mays
  Probeset Number=SeqID_15655
ttgctgcctgcagttcaagaacttgtgaggaagcttactgacaaagatcccaatgttacggtcaaccctgatgaggttgtttctcttggggcagctgtgcagatctcagttagtgttggacaagtttttcttcaactggtgctatgcctagcacttatatcatcatttcagactagatcccttcttgtatggccacaaatcaaacgcaacatgcatattttcacaacaat

SEQ ID NO: 1253 - DNA, 1165 bp, Zea mays
  misc_feature (1)..(149): n is a, c, g, or t
  misc_feature (897)..(1165): n is a, c, g, or t
  Peptide Sequence Number=SeqID_14024
  Probeset Number=SeqID_15656
nnnnnnnnnnnnnnnnnnnnnnnnnnnnnnnnnnnnnnnnnnnnnnnnnnnnnnnnnnnnnnnnnnnnnnnnnnnnnnnnnnnnnnnnnnnnnnnnnnnnnnnnnnnnnnnnnnnnnnnnnnnnnnnnnnnnnnnnnnnnnnnnnnnnnggaagctcatctgggtgttggcctcatcccctgcacaagctgaggaatggggcaaaaggactccaagccttcaaatggatatggctactcttctgattacgggggtacttcatcgggatataacttgagaaatactggaagtacgtcctccagttatggcgcgaggtatgtgccttcttcagagaacaatgtacagccagaaacacatgccaggttgcagaggaagtattccaggattggtgatgactatcgttctctgagtcaggtgactgaagctttggcgcaagcaggccttgaatcttcaaatcttatcgtaggcattgattttacaaagagcaatgaatggacaggtaaaatttcatttaatcgccgctgcctacatgatattggaaacactccgaacccatatgagcaagctatatctattattggaaggacactttcagtatttgatgaagataacttgattccctgctttggatttggtgacgcatcaactcatgatcaggaggtattcagcttttacccagagaaccgcccatgcaacggatttgaagaggcactagacagatacagagaaatcgttccaactcttcgattagcaggacctacatctttcgcgccgatgatcgagacagcaattggaattgttgacaagcactggtgggcaatatcatgttcttctgagaatcgccgatggacaaggtaccccaagtgtggatacacactcttggcaagtgagtgcacnnnnnnnnnnnnnnnnnnnnnnnnnnnnnnnnnnnnnnnnnnnnnnnnnnnnnnnnnnnnnnnnnnnnnnnnnnnnnnnnnnnnnnnnnnnnnnnnnnnnnnnnnnnnnnnnnnnnnnnnnnnnnnnnnnnnnnnnnnnnnnnnnnnnnnnnnnnnnnnnnnnnnnnnnnnnnnnnnnnnnnnnnnnnnnnnnnnnnnnnnnnnnnnnnnnnnnnnnnnnnnnnnnnnnnnnnnnnnnnnnnnnnnnnnnnnnnnnnnnnnnnnnnnnn

SEQ ID NO: 1254 - DNA, 350 bp, Zea mays
  Peptide Sequence Number=SeqID_14025
  Probeset Number=SeqID_15657
cttgcatgcctgcagccgggcgacctgatctataccggcacgcccgaaggcgtcggcgcggtcgtgaagggtgacgtgatgcgcggcggcgtggacggcatcggcgaattcgcgcaactgtcatacgactacgtgccggtgcatttgctgcgcgacggcggcgagcagttgaagcccgaataccggtgcatgaatcaggacggcatcgtgccgacgctggtcgacgacgacgcgcacgtgatccagcagtcgctcgcgatcatcgagtatctggacgaaacgcatcccgagccgccgctgctgccgggttcggcggccgaccgcgcgcatgtgcggtcgatcgcgctgca

SEQ ID NO: 1255 - DNA, 675 bp, Zea mays
  Peptide Sequence Number=SeqID_14026
  Probeset Number=SeqID_15658
cgtacggcgctacgctaccctgccgattggcattcagttgggtcacgccgggcgcaaagcgtcctgtgctgcgccatggcaaggcggtgcgcagctctctgaggaacacggcggctggcagaccgtggcgccgtctgcgcagccgtttgcacaggatgaacgtccgccggccgcactcagcaaacaggatctggcgcagctgaaacaggcctttgtcgatagcgccctgcgcgcggtacgcatcggcattcagctggtcgaactgcatgctgcgcacggctatttgctgcaccagtttctgtcgccgctcagcaaccagcgtgacgatgaatatggcggctcattagagaaccgtctgcgtttcccgcttgaggtgtttaaggcactgcgtgctgcgctgccggcggaaatcccggttggagtgcggctgtcggccaccgactggatcgagggcggctgggataatcagcaatcgattgttttcagccagcagctcgaagccgcaggctgcgcctacattcacgtctccagcgggggcctggcaccgcagcagcaaatcagcgtcggtccaggttatcagttgccgttcgctcgcgagattcgccagcaggtctagattccggtgattggcgtggggctgattaccaaaccgaaacaggccgagcaggcgctgca

SEQ ID NO: 1256 - DNA, 377 bp, Zea mays
  misc_feature (269)..(269): n is a, c, g, or t
  Peptide Sequence Number=SeqID_14027
  Probeset Number=SeqID_15659
atcaccaatcagtcagtcacagctcacagcaaacaccgcgaagccgcccccgctcccaaacccgaccgagcaaagcgcaaagccccccaaccgcggatcaatccgcagcatcgatggcgcccaaggcggagaaaaagccggcggcgaagaagcccgcggaggaggagcccgcgaccgagaaggcggagaaggctcccggcaggggcggcttcgcggtgtttgctgtgagcagtgagggacaattagttgttatcgtttgagttggaatntattgtttggtttgcaattttctcaaggtgaactttgtaatcggttaggatgtgttgtggaccattatcttatcctacaatattatcgtatctgtttaagaaaaaaaa

SEQ ID NO: 1257 - DNA, 373 bp, Zea mays
  Probeset Number=SeqID_15660
cccgaggaggatttgcacgagatctgcccgcacgccggcggcacacggagctggccggccacggcctacaatccgaagaccaagatcatctacgtgcccctggtcgagtcctgcatggtcttctcccggaccgggcgcgacgccaaggccatcgccgaaggcggctcggacctgcgctggatcgtcaaggcgcgcccggactccgacggcaacatcgggcgggtgcaggcgatcaacctggagacccgtaagacggtgtggacccgccgcgcccgggcgctggagagcgcggggctcctcgacaccggcggggggctggtgttggagggcaagcgagaccgtatgttccgcgccctggaccaggcctacggca

SEQ ID NO: 1258 - DNA, 330 bp, Zea mays
  Peptide Sequence Number=SeqID_14028
  Probeset Number=SeqID_15661
atgcattcctacacgccaccgctgccctccgctgggccgcccgccgcggctcaactcctcgtcctgatgctcgcctacttccgcttcctagctgacagcgactgcgacagggaggagatgcttgccctcgcttgtggcctgccaacctacatccaatcgctcccggcccgcacgcccgtcagcatcctcaagatgacgtgggtctcgtattcggtgagctgtctgatggcggaggaggcgtcagccgagagccgcgcggccggcacgaggctcgcgacgctgctggagcagaccgagagcgtggagcgcgcctacacgcaccaccccacc

SEQ ID NO: 1259 - DNA, 272 bp, Zea mays
  Peptide Sequence Number=SeqID_14029
  Probeset Number=SeqID_15662
gacgccgcctcctgctggaacagggatgggcagcaaccttgctgatgatgaatgatcaccctctcagactcatcagatcgtgaacgggcaggtgcagcttctgagagttcatcatttgacaaggtgctgtgccacctcctctttcgttataagttcggaatcaaaaggagatcccgccagcaggaaggaggccctgccctgctagatctctctcatggagaaggaggaggaggaggaggagcttccggcggctgtgctcgagccgaattccg

SEQ ID NO: 1260 - DNA, 636 bp, Zea mays
  misc_feature (1)..(35): n is a, c, g, or t
  misc_feature (636)..(636): n is a, c, g, or t
  Probeset Number=SeqID_15663
nnnnnnnnnnnnnnnnnnnnnnnnnnnnnnnnnnncaggagccgagcgctgtcaaggcgacgcaataactctagcggcgtgggcgacggccagggctggatgagcggcatcgactacaccgactggaccagcggcaagacgttcgcagtcggagacaaactacgtgactacgggagccagtacaacactgtgacggaagtgagcaagagcgcctactacgcctgctccgggcgcgacgcgctcagcgacgacgacaccagcggctggaccgtcgtcgcgctcacggcgcccggcacgcgctacttcatctgcggcgccccgggtcactgcggcaacggcatgaagctcaccgtcacggtcgccgccgcggccgccaccaccaccccggagacgtccacgtctacgcccgccgcaacgacgacgcccaccacgaccaacgctgacacgcccaacgctgacacgcctccggagacgtccacgtctacgcccgccgcaacgacgccgcccaccacgaccaagtccacgtccacctcgagcactagcagcactggtgctgcctgcggtggggaggcccggctcggtatgggcattttggccgcggccgcgggcctcgccgggctcgccctgatgggctan

SEQ ID NO: 1261 - DNA, 357 bp, Zea mays
  Peptide Sequence Number=SeqID_14030
  Probeset Number=SeqID_15664
tgcagccgcgccactggttgcgtgctgcgccggatggcagcgcgatcgcctttttgcaggctgacgagcagggcattgtgcagctgtggacggtttcacccaacggtggcgcggcgcgtcagatcacctcactgcgcagcagcattcagtctgctttcagctggcagccggacggcgcagccatcgcctttatctgtgataacagcgtgatgcgttgtgagatagccagcggacagtgacgcgccttaccgcgcgcagcgcgcaaccgccgggcggcgacgcggtggtgtggtcgccggacgggaagcagatcgcctacatgcgcgaggttgacggctggcgacagctattctgcgt

SEQ ID NO: 1262 - DNA, 602 bp, Zea mays
  Peptide Sequence Number=SeqID_14031
  Probeset Number=SeqID_15665
ctcgatctgtagtatgcacaccagcaacctcctgagatggcaacgcctcatcagagtccttgaccaccacattgccactattcgtctcttgttccttcaacacaacggtagcaccgacgcctttcacctctggttcctgtatctcaggcactacaggtgtttcgttgaccaccaacacttcatcaacccttggctcagattcaagcaccggatgcaccttggtcacctccaaagcctccaccacctctggttcctgcaccaccatagcgtgcacctcctcctctacctcatccaccatgccctcacgttccggcgacgtccgcctcgacggcaccatcaccacatcaaccatcatgctactccttgacgggacagatgtagctagcaacaccctatacatgtccagatggatcgggcttaccgggtggtccaaaaccgtgctcgcacatctataccagcggcacataggcgtccacggagacgaatcacctttggtttggagcagagctgcgagtgtgcgactggcgaccgaacgcttgcgcttcaatagaagaaaccgtgtacggaccagcgctcgcggccacgcgtcgactgcaggcatg

SEQ ID NO: 1263 - DNA, 248 bp, Zea mays
  Peptide Sequence Number=SeqID_14032
  Probeset Number=SeqID_15666
tgcgggcttgctatctcggcactagcccgttgtgtacagcgtaaatactggaatatcccaggagataccctgttatttgccttgcaacacatcccgctttcgacagctgcattaataccaaataggatcgacccgatcggccctaccatcaattgacccagctgtatggctaacggcgcctgatgctggattgtgtccttactcatctgttctggatttgacaccgtatattgtgcgccctcaacaca

SEQ ID NO: 1264 - DNA, 327 bp, Zea mays
  misc_feature (15)..(15): n is a, c, g, or t
  misc_feature (34)..(34): n is a, c, g, or t
  Peptide Sequence Number=SeqID_14033
  Probeset Number=SeqID_15667
tggatataatgtttnccatattttgctttttggnaacaaacccatttccggaaaaaacacacactatggaaggatcaagctatgatcggggtttatatgctcgttgttttgaggagttgtttgatttagccaatttagatgcaacatctacttctcgatataaattctgtgttacagtttgtgagctatataacgaacagacaagggatctacttttggaggcagggaaaagcgcgcctaaactctgcttgggatcacctgaatgtttcattgaactggtgcaggaaaacgttgataaccctcttgagttttctgaagttttaaaaa

SEQ ID NO: 1265 - DNA, 365 bp, Zea mays
  Peptide Sequence Number=SeqID_14034
  Probeset Number=SeqID_15668
atggcgggcgagttgtcgacgcatctgcgtaccgatacccggcggccgctcgcgtcgcagccggcttaccgacatacggcgccgtacgcgtctttaaagcccatcgtcgacgacacccaccgcctgctcaacgcggtgttggtgcgcagcgcgcagagcatcgcgctgaaggatttgagccatggcatgcacgacgcggtagtcgatcccgccgatatgcgcggatttactgcgctcgtgttggccgtgcatgccgcgatgccgcctgacgtactgcaacagcagtttctcgcgcaagccaaggtcgggccgtccgacaagctgcctagcctcgtcggcagtcatttgccgggtatcggcctgca

SEQ ID NO: 1266 - DNA, 231 bp, Zea mays
  Peptide Sequence Number=SeqID_14035
  Probeset Number=SeqID_15669
attcaaccgtatacatggaatgaggaaccgactatgattgaatcctacaataataagagaacaattggctgatctggtggcgaaggagaggatgaacacgatgttgtctggttttggttgcaaaaggattaaccgcatgagtgcccagtttactcacaatactttgtgctcaaggtcattggtgatggtggtgatccaaacggccactatgacaaggatgatcatcaatga

SEQ ID NO: 1267 - DNA, 271 bp, Zea mays
  Peptide Sequence Number=SeqID_14036
  Probeset Number=SeqID_15670
cggtactcttgccattgctctatcactgactcgtttcgctttgttgttttgctttgtcgagcgttatacctctttcaaaggcaagctttcaattatccactcaatttagggataacatttaaaactatacgtgaccataaagccaacaaaactgcattaaacctgataaaatgacgtattgctccactttttctcatagactgcttctccctctttagacattacaaaaatacgactctttaataataggctgttaatcccaactggaata

SEQ ID NO: 1268 - DNA, 219 bp, Zea mays
  Probeset Number=SeqID_15671
atgggggaccctccggtcggagtcctcatcttcctcaccatggccatcgttgcttcgtcaaaatccaccgccgcggaaaccggatctcgccagcgaattcgacacgcggccattgtccagccatcctccggcggctttggattccacagcaagagcaccggtggctgcgcgaatcgtattcctgggacccgctcgcatgacgcgcacgccgagggctag

SEQ ID NO: 1269 - DNA, 753 bp, Zea mays
  Peptide Sequence Number=SeqID_14037
  Probeset Number=SeqID_15672
atgactgattaccgacgcgtaggaaattccggactgaccgtctccgccgtaggcctcggctgcaacaacctgggccgggccggcaccgccaccgagacgcaggagggaacagacgccgtcgtccacgccgcgctcgacgccggcatcaccttcttcgacgtcgccgacgtctacggccgcgaaccgggcctgagcgaaaccatgctgggcaaggccctcgccggccgccgcgacgacgccgtcatcggcaccaagttcggcctcgacatgaacggcgccaacggcaacgacttcggtgcccgcggctcccgccggtacatcatccgcgcagtggaggcctccctgcgccggctcggcaccgactggatcgacctctaccagttccacaccccggacccgcagacccccatcgaggagaccctcgacgcgctcaacgagctcgtggccagcggcaaggtccgctacatcggccattccaaccgcgccggctggcagatcgccgaggccgaatacgtggcccgcgcccgcggcggcgcccgcttcatctccagccagaaccactacaacctgctggaccgccgtgccgaacaggaagtcacccccgccgcggaggcctacggcctgggcgtcctgccctacttcccgctggccaatggcctgctgaccggcaagtacgccaagggccaggcccccgagggctcgcgcctgagccacacccgcaccaacctggtcaacgacgccgactgggaccag

SEQ ID NO: 1270 - DNA, 233 bp, Zea mays
  Peptide Sequence Number=SeqID_14038
  Probeset Number=SeqID_15673
tgctgggagcagatggtggataggtggtggtcgtctaagtgggacgtggcgcacaacgctagccaggaacgccgtatgatgatgcaaggtccctcccaccaccaaggcagtcatagcctaggcaaatatgcagaagcatggtcggcatcacatggtggctacccttgctccatcttctcggcttatgctatggcccacaagggcaaggcgacgtccgacgtcacctacaaccc

SEQ ID NO: 1271 - DNA, 457 bp, Zea mays
  Peptide Sequence Number=SeqID_14039
  Probeset Number=SeqID_15674
tgcagtcgctgcgcaatcaggggaaaaaaccacgcgttggctgggccgggggctccagtcataccggcgatctggaaatgattgtcgatgtggtgcgccattttgctaatgacgtggaatgggtgttttttggcatgtgcccgccaaagctgcggccttttattcatgaatatcaccacggcgtagaaattgagcgttatccggccaaactggcctcgcttaatctcgacctcgcgttagcgcctgtcgaagataactttttcaacacctgtaaaagtaatctgcgcctgatggaatatggtgcctgcggcattccggtgatttgcagtgatgtggcgtgttatcgcggtgatttaaccgtcacgcgcgtgaagaaccgccacaaagactgggtggacgctatcaatatgcatctgctggaccccgcagcgagtgcccaaatgggcgccaggctgca

SEQ ID NO: 1272 - DNA, 335 bp, Zea mays
  Peptide Sequence Number=SeqID_14040
  Probeset Number=SeqID_15675
ctagcacgtcggccagacagtttgcacctgcctgccacgtttcgagcccaggaacgtattggagtccagcgacggggactggcccatggggtgcgtcaccagctcccccataccatacgacgccgacccgtacttgaccggctctggctccggcaccggcctaggagttcgcttcgccatcctccagggcgtgaagcggcccagctcataggcataagcaaccacggggacaaagggccgctcataacatcgagctcgactattgctcgacggtgcgtcaacccaccgatgcaccggcccttcactgcgccaggctcgctggacatagaccgctc

SEQ ID NO: 1273 - DNA, 289 bp, Zea mays
  Probeset Number=SeqID_15676
tccagtagatattcatggtaatcgtgatcacgtcgtggtctctctaattgatggcatcaagattatcacgtccgttatgatacataccactgagccgagtggacagcactcatagccaaggcatgtacctgcatctgtgatgcatggtcacaccatgccggtccggatgagagctctgtcctacatctctacctcgctgtaccatgtcatatggctcggcactgtcatctcagatcctgcctgggcatgggccctgcgatcgccgtcgcatacacagctcgtgccgcaa

SEQ ID NO: 1274 - DNA, 317 bp, Zea mays
  Peptide Sequence Number=SeqID_14041
  Probeset Number=SeqID_15677
aagacaaggcaatggagaagacgataatgacgccaatgccttaagacggctttcattaggtgatgtaaaaaatgctagccaaggtgatgcgcaatccaaaagggaacttgttcagtgtagagtagctgttgtattgatgttacaaaaggggaaagttgaagtgcagcttttgcaagctatgtatagctcgcagctcctttcctttactgaaagttgcatctgtagccgtccaaacagccggctttaatccgcagcgagccggggatatatattaaatcaaacagccggactttattccgaaaaaaaacacccccaag

SEQ ID NO: 1275 - DNA, 359 bp, Zea mays
  Probeset Number=SeqID_15678
tgcagcagttcatgctggcgcacacccggccccaggagatcgcgctgatgctgcgcgcgggcaacctgcccaacccggccgaccagtcccatcttcagctgacgacgatcatcccggcgttcgtgctctcggaactgcgctcggcgatgatcatcggcttcgtcatcttcatcccgttcgtgatcatcgacctggtcgtgtcgtcgtcactcatgtcgctcggcatgatgatgcttccgccggtgtcggtgtcgctgcccttcaagctgctgctgttcgtcctggtggacggctggggcctcatcgtcacctcgctcgtgcagagctatcacaccggaggggcggtcgcgtcaccatga

SEQ ID NO: 1276 - DNA, 375 bp, Zea mays
  Peptide Sequence Number=SeqID_14042
  Probeset Number=SeqID_15679
cagcagggcctcaaggtttgcaccgcggagaacacgcaaggcccggggcaaaagccgccgcagggcaacgcggcacagaaccggatgagcaagcagaacaccgccagcaacaccgactggagcacgcaaccggccagcagcaagagaagcccacagcacagccccggcgcgggagacgccagggcgaacgcccccacccagcaccggaccgaagaagcgcagagccacgccgagcagaccgaaacccaccgggccaacaagaagccgaagaaaagcagcggcaagaggccccagcgcccagtcgcccacatcggcaaagacagagacaccaaccacgaagcgagcaacaccggcgcacgccaacacgagcagtga

SEQ ID NO: 1277 - DNA, 340 bp, Zea mays
  Probeset Number=SeqID_15680
atgccgggaggacgggcggcagaggcacctactactactcgtcatcaccggggcggccccgcggcgccggcaacggcaagaggccgtgacggcggtggcgcgccaagtgcgccggcatcgcacgggccgtcgggtccaggctccaaaggtctgtcgtccggaccgtcgacggtggccgccggcgcactacgccgccttcgtcctcatccgctcaccgcgggtggtgccaccaccaccatcaccgcggccgccagagcttcgcggccgtctacgtcgacgacctctacagccacagcctacagccggcagccaaggcccaccgcggcgtcgtcgtgcaggg

SEQ ID NO: 1278 - DNA, 219 bp, Zea mays
  misc_feature (198)..(198): n is a, c, g, or t
  Peptide Sequence Number=SeqID_14043
  Probeset Number=SeqID_15681
ctgaagttgacttggaagcaagaaagatgcatgtggaagatgttgctgaacttgtcgagctcattccactgagaggaggattggtggggctgccaggagtgaatggtttgtctaccgaacaaaggaaaaggctccctatagcagttgaggttgttgcccacccatcccttataattatggacgaacccacttcggganctagatgcgacggcaggggta

SEQ ID NO: 1279 - DNA, 259 bp, Zea mays
  Peptide Sequence Number=SeqID_14044
  Probeset Number=SeqID_15682
tgccaactgccaagcctcgtgatggtatgtgtgcatttctcatttaaaaccatttcaattgtgattacgattcatttgataaccttattagttcgtgaacttaggggattacgtgattcgtcagaaaaaagaatgatagctacttttttctctataacaggatttttagtctctcgttacggcctcacacgttcctgggcaagcagaagcatggttagctcctacttatttagcatgtcttttcattatgtctatcatg

SEQ ID NO: 1280 - DNA, 304 bp, Zea mays
  Peptide Sequence Number=SeqID_14045
  Probeset Number=SeqID_15683
tcgttcaggcgaggctttctccatctctccagtcctccaggttcctacgcgcgccattgcagtcagtggagggagtagcagtgaggactcctttctgtaacccgcatgcctttctggactcgctcttcgacctgccgtcaagcacgatggagcagatcgataccgggaaggtcgatcagtacctgcagcagctccccttgatggctgtcatagtatccgccaccgctcggcggcttgcgctgttcagcaccagcctcgccagctatgatgctcagtctcatagagatgcagagctgcttgtccg

SEQ ID NO: 1281 - DNA, 231 bp, Zea mays
  Probeset Number=SeqID_15684
aaagaaggctctgatgtcctgaatttcgggttcgaacctctgggactgggcaaggaactggggtacctccagtggaactgatagaaggaactgatcatcggtcgtttcatgatgcagacagtgatgggcctcttcgtaggccacgcgaaagttggcattccgtagcactaggacgggcaggagcagagggccatagcgccctacccctttaggttggagctgagcacgcag

SEQ ID NO: 1282 - DNA, 321 bp, Zea mays
  Peptide Sequence Number=SeqID_14046
  Probeset Number=SeqID_15685
tgcaggcattccaggagcaagggatacctaccaccccacaaatcctcgggcaggcaggcccaccgtgcaccacagtaccacacttgcagttgcagcatccccacagaattatgctagtgctttagggctgcagtaggatgattctctcttgttcctgattcaggttcagcattgttcaattttgggttatatacagggcttggattgaacgaagaggttcggcccaacatggattcgaagacaaagttcagtgatgtcaagggagttgacgaagctaaagctgaacttgaggaaattgttcactacctacgagatcctaag

SEQ ID NO: 1283 - DNA, 498 bp, Zea mays
  Peptide Sequence Number=SeqID_14047
  Probeset Number=SeqID_15686
atgtgtgactgccgcagtgccactgccgcctgcctgcctgcctccatttttcccttttttcggtgggattttgccgggggatgtgtggatggcgttgggggctgccgcctgccactgtgcgacacgcaggcgcggccccgcgcgcagagaggtggatccaaggcggctgcggctccagactcgactcgactcggggacccggatctctagctctctgcctcgcgatcgcgattcaaggttaaaaaggggtgtgggtccagggttgcgcgacggacggctgctcttggtcgaggaagatatgggaacgggcccaccggccactgcatcaacggagcaaaggtgcaaggagccaaggacgagtcgtgttgctttcgcctgcctgcggatgctgatgcctctgctcggccctgctgaattctggaacaatctgcttagatctcaccgtgttcttgagcgtatccaggcacatgatgcagaaaatgagacacgtggcatccc

SEQ ID NO: 1284 - DNA, 236 bp, Zea mays
  Probeset Number=SeqID_15687
atggaattgcgcgcgctgcggtacttcgtcgaggtggttcgccagcagagtttcacggcagcggccgaccggctgttcgtcacgcagccgaccatcagcaagatggtgaaggcgctcgaggacgagatcggctcgccgctgctgctgcgcgacggccggcagatggtgctgaccgacgccgggcggatcgtgttccagcgcggccaggacgtgctcgccgcgcaggcgcagctgca

SEQ ID NO: 1285 - DNA, 206 bp, Zea mays
  Peptide Sequence Number=SeqID_14048
  Probeset Number=SeqID_15688
tatatcggtagtgggatcccgcgattcctaaaacagctcatgttatctgcccccgttggccaccatcgtacagcattttggcatcctgtggcgaaccagcgtggagcgcttggcgcagctctctcaagggcaggcggtgaagcgcattcacctgttgcccgtctcagtggagaaaacaaagcccaccctggcgctcgatccgcggg

SEQ ID NO: 1286 - DNA, 743 bp, Zea mays
  Peptide Sequence Number=SeqID_14049
  Probeset Number=SeqID_15689
tcggtacccctgttggccagcatacgaaatcaagcatgcaccatagactgaaaatatggatcagcagtgggcataatggcataatgggaaaatatgggaataagttggaattggttatgccccatgaagctaggccattattattagatgaacatgcaaaacctggatggccagattggctcataaatgtggcaccagaggcagtgcgaggttggtttcctcggcgccaagattcatttgagaaattagacaaggttggacaaggaacttatagcagtgtctacaaagcccgagatcttaaaactgacaagtttgtcgcactaaaaaaggtgcgttttgtcaatgtggaccctgagagcgtgcgctttatggctagagagattcttattctacggaaactcaatcatccaaacatcatcaagttggaagggatcataacatcttctgtttcacgaagcctgtatcttgtatttgagtacatggaacatgatcttgttggtcttgctgcgactcctggccttaagtttactgagccacaggtcaaatgtttatttcagcagttacttagtggcctcgatcattgccatagcaatggagtggtgcatcgggacttaaagtgttccaacctcttgattgataacaatggtgttctgaagattgcggactttggtctagcaacaacatttgatcctgacaatcagcagcctctgactagccgtgttgcaacactgtggtacagacca

SEQ ID NO: 1287 - DNA, 357 bp, Zea mays
  misc_feature (257)..(257): n is a, c, g, or t
  Peptide Sequence Number=SeqID_14050
  Probeset Number=SeqID_15690
atatctcacctagtctcctggtttaagaaggagaagttagtgcttaaccccaccgtcacgaatagtcctacaagttgggccgggccgtccagcacggccctaaagcacggcaggcttgcattgagcgtgctggcccatacccggcccgtaacactgtcgctgttcacggcgggcgagggcgagcccgtggccgtcaagtcggccgacgtcgcgactgcggcggcgcatctgcggcgcgagggcgagatcatggcctngctcagctccccgcacgtgctcccctgcctgggcttccgcgccgccgcgggaggggagttccagctgctcctcgagttcgcggctgtggccactcgctag

SEQ ID NO: 1288 - DNA, 605 bp, Zea mays
  Peptide Sequence Number=SeqID_14051
  Probeset Number=SeqID_15691
tgcagagcgcccacgggctgtacctcaacggcatcatgctgatcagctcggtcctggacctcgacaccgtggacttcgagtaccgcaacgaccgcgcgtacgtcgactacctgccgacgtatgccgcgacggcgcaccaccacggcaagcacggacgcaaggccctgcgcaccgtgctcgccgaggccgaggagtatgccgcgcgcgactacccgtgggcgctcgcccgcggctcccggctcaccgccgccgagcgcgcggagcacgtgcggcggatctcggagctgaccggcctgtcgccggagtacgtcgaccgggccgacctgcgcatcgagcacgtccacttcctcaccgagctgctccgcgaccggggcctggccgtcggccgcctcgacacgcggttcagcggccccctgcaccagggcaacgccgccacctgggacgccgacccctcgatggacgcgatcctcgggccgtactcggcagcgctcaaccactacctgcgccaggagctcggctaccggcaggacctcgcctacaccgccagctcgtcacgggcgtacaaggagtggtcgttcaaggagttcgagggcaagccggtcgac

SEQ ID NO: 1289 - DNA, 343 bp, Zea mays
  Peptide Sequence Number=SeqID_14052
  Probeset Number=SeqID_15692
cacatccatactgtttattttaattaatgactgtcaagcttttgtgaaagatttatacaatcgattatttttcatgtgctctgtggttcctgtctttctaggtatttggaggtgaatatgcaagctggcttcctgctggtcgggccctcctggttgcgggaaaacactaatagcaaaagcagtggcacatgagggcaggagccaattttattcatataaaggggcctgaggtattgaaccaatatggtggggaagaaggaatccgaaaggtaagaaaaaaatccattggggaaggtatacttccccaggccatcgtattttttgatgagggggtatcaaacag

SEQ ID NO: 1290 - DNA, 520 bp, Zea mays
  Peptide Sequence Number=SeqID_14053
  Probeset Number=SeqID_15693
ctgagaagatactcttcgcggtcaagcaatactgggccgttgcaaagcgcaatgcagctaaccttattcgtgttgtatttttttctccagtcccaggtaacttggtccctggatgtgtttattggggggagaatctgccggtttgaaatgtcatcatcccatgtttgttactgaaaatagaaaacaagcttccaatcgccctggaggatggtaagttatgcgggtcctatgttgtggacctgtgatttgcttattccactgttgcacagatgccgaacccatgcctaaaggatcaactgtccttgcactagtgagtcagatatgatcggacagatgcagctgcttataattggaaccctgcggcagtccaggaagttatgaactagcagtgggcggacagttttggataggatcgtcgtttccctaaacacgcaacctcttttttattgttgaggtctcgccgcggccccccccttgagcccgtcatagtgagtcgtattagaagggcgagattgctgca

SEQ ID NO: 1291 - DNA, 424 bp, Zea mays
  Probeset Number=SeqID_15694
atgcggagctatgatgggccacagaccacattcattctgcacgtggaccgagccaaccatgaggacatgcagggaggttacagcaccgcggacagagaggtggacctcagggactacattgtgcatggggacctgggcgtactgaggaacaccaacccccgcaacctgagccagggcaaggagatcaacgcccggaaccagatagcggcacccatacggctgcggaggacggccctcacaccaaagcacgatcgagcgaagaccccacacactgaagaaggaccggcgcatactggggctgacccaaggccagacaagggcaccaggctgggaggtcgctcgggcagcacaaccacacaggcacaggacaaggagccgggtccgccatggcgaaaaacacgaccacacaggccagctgtggcac

SEQ ID NO: 1292 - DNA, 388 bp, Zea mays
  Peptide Sequence Number=SeqID_14054
  Probeset Number=SeqID_15695
atgaccgctggtgctctcagggccgctgacggctcgcagcgcgcggtgacctcgcgatacggcgcgcacggggtcggggtccttcgccgccaggaccggatgaccatgctggcgctggaccagcgcggctcgctgcgcacgatgcttgcccgcgaccggccggtaccgcaggtacccgatgcagagctgatctcattcaaggcgcaggcggtcgccgcgctggcgtccgatgcctcggcggtcctgctcgactcgacctatggtcgcgctgcgatggcagccctgcccggcgagacgcccctcatcctggccgctgaccagttccgccagcaacccggcggcccggtcgatcagtccggctttgacgagctcgtcacacccggaactt

SEQ ID NO: 1293 - DNA, 218 bp, Zea mays
  Peptide Sequence Number=SeqID_14055
  Probeset Number=SeqID_15696
ttgggggagaactccctttaggagaaaacgtatttacttcttatattccctgcgaggttttttatcctgaatacgcagcactaattcttgggcgtctgttataccaggatatttctccttctttacagatccagaaaattataaaacatagacagttaccactagttaaggctccgctattaaaatcactaatacaaataccacatcaagaagaacat

SEQ ID NO: 1294 - DNA, 562 bp, Zea mays
  Probeset Number=SeqID_15697
cgtgcagattttgttgggaacgacgcagaatcaaaatttcatttaccctaggagttcaggttggaaggaccttgaaatatttgcaagcccctatttttggctattgtctcagaaaggttgaaactgtcgactatacatgaaggctgagacaagctggcatggttgtagactatgttaaagattgatgagtgatgactgatgaggaaccaaacaaatgggcatataaagagcattttgtgctggaggcgatcttgctgcacttgtcattttgacaagcctgaaaggaagcaacccgcacaaaggctggcaacgaactgcactcagtgagctccctcaagtaatcaagcactgtcaccaacacaaccttctctcttgcagttatcaaagatggaagtgacgagtgttttagtagagaacggggtgaaccatgacatgtttaagttgggtctcagtaactttgcaactaactatgctgcctccaacagaaaggaagacgaataacctcaaggaatacacagaagaaaataccttcgaaacattgtgctcgtatttcttgtaatca

SEQ ID NO: 1295 - DNA, 1248 bp, Zea mays
  misc_feature (1237)..(1248): n is a, c, g, or t
  Peptide Sequence Number=SeqID_14056
  Probeset Number=SeqID_15698
ggtcctccattcgagctctcccacccatacttctctatctctcttgcttccattgggcaatctgttcgtcaggacttaggaagccgcgcgtcgggcgtgacttggtagagtgagagactcggggagagaagagaagatgatgtcaagggagcgcaagaaggcggctgcggctctccaggagaagctcaagatcctccgctccaccactcattcccacgctctgagcaacacatcgataatcatggacgcgtcggcgtacatcaagcagccgcagcagaaggtggtgaggctgaaccaggagattgcctgcgcgcaggacgccctgagacacaagtcctcctcctatccgacggtgagcgtggaaaccctaggagtgcaggggttcctcgtcaacgtgttctccgacaagagctgcccggggctgctcgtctccgtcctggaagccttcgacgagctggggctcagcgtcctccaggccaccgcgtcctgcgcggccgactccttccgcctcgaggctgtgggcggggagaacgtggtggacaacgtggacgagcacgtcgtgaagcaggccgtcctgcaggccgtcaggagctgccccgagagcggctgcggcggcgagcacgacgacgaggagtcgctaggctgagcgcgcgcgtaagcaggcacacacgcacacgacgcctctacttgcatttgcattggccgtcgtgtgtcccacagcacgccgagctggaccgcgtgtagctagtcgatcgccgtctgaactctcaggagaccccttgttttgctagctaatagcatctcggtttccctctcttccatttgatttttttcttatttatttatgcttctatttcatctacctatcggtcagtggcggacccaggaattactgacagcctaggcgaaattattaagcagcatgcagcagcagtgcaaaagcctgagctgacagagaaatggactgtaattttttagacttcttacatgcactctcgtggcgtggcaggctggcagcccaggcgacggcctgtactgcctgggcactcggtccgccactgctatcggtggcatgcaatgcaagctgaaatatatatatatagccgatgatccggtgagttcgttcgttcgtagcatgcaccaccaccactccctagctgtgtaataatagtattagaatgatgatgcaaattacatgtataacgatcatgcatgtatgtaagaatgatgatgggannnnnnnnnnnn

SEQ ID NO: 1296 - DNA, 361 bp, Zea mays
  Peptide Sequence Number=SeqID_14057
  Probeset Number=SeqID_15699
atgcctgcagagtccgtaacgctgggcgtgcagattgcgctcggacgacttcggcaccggcttctagaagctcagctatctgcgttcgttcccgttcgataagatcaaactcgacaagtcatttatcaatgttatgggcgacagccgtgaggcgctggcgatcatccgtgcgattaccggcatgagccgcagcctggatattcagatcaccgctgagggcgtggagagtaatgagcagtttgtccgcctgcgcgaagagggctggacgctgttccagggctacctgtttggccggccacaggcgtcggagctcacactgaaggcgctggagtaagcacaaaaaaacgcccgacagggtcgg

SEQ ID NO: 1297 - DNA, 480 bp, Zea mays
  Peptide Sequence Number=SeqID_14058
  Probeset Number=SeqID_15700
tgcagttcccgctggcggacaagttcggaaaagcggcgctgcgcggcatcggcggcacgcgcaactgtgactggtggttcaccaacgaagcggtgctgctggataccgccggtcgctataccacccaggagagtcagcaggagcgcgacgccagcgagtggcatcattttctcgacctgctgcgtaaatatcgcggtcgtcagcccgtcaatggcgtgattgtcacgctcagcgtctccgatttactgacgcaatcgccggaagctcagcgcaatcaggcgatcgcactgcgtcagcggctgatggagctgcatgatcgccttggcattcgcttcccggtttatgtgctggtcaccaaaaccgacctgctcaaaggtttccgcagctatttcgctgcgctggataaaacccagcgcgagcaaatctggggatttacctttccgtgggcgcaggcgtcgaccgcagagtttgagctcaaca

SEQ ID NO: 1298 - DNA, 740 bp, Zea mays
  misc_feature (1)..(87): n is a, c, g, or t
  misc_feature (688)..(740): n is a, c, g, or t
  Peptide Sequence Number=SeqID_14059
  Probeset Number=SeqID_15701
nnnnnnnnnnnnnnnnnnnnnnnnnnnnnnnnnnnnnnnnnnnnnnnnnnnnnnnnnnnnnnnnnnnnnnnnnnnnnnnnnnnnnnngcacgaggccgaaaccagccatcgcccgtcgctcctcaagctccgcgaatcccccgccgcgcctcaagcttccctcctccttatcccgtcgttttgtagtggcttcgtctttagcttgggcctcgcttccacttcgtaactgcctacacgctcacgactcgcctggtcgcttccggttgaagggccaggccgcaatggacgaacaggtcggcgccgccgggcggcagcaggttgggctgtccttagcacagatagaagagtttgcttttgtgcttttgagtcgtgcctcccatctccatcttgttggggggaaaatgtatctactattagtgggaacaattgcccttagcttggtaacaactcctctcattttcaaactaattcctgtggtaatgcaccttggcatccttatgtgttggttcccctcgaaaaacagtatgcagagtgaggtatcctttactaccctatttgctgtttttttattaaaaaaacttgacatatggacattgttggctggagcggtaaaggcgtaacgcctctgttcaaatttcatggtctaaaatatttgacatgttaggttttgaaagaagtatcacatttnnnnnnnnnnnnnnnnnnnnnnnnnnnnnnnnnnnnnnnnnnnnnnnnnnnnn

SEQ ID NO: 1299 - DNA, 478 bp, Zea mays
  Peptide Sequence Number=SeqID_14060
  Probeset Number=SeqID_15702
gggaaactagtaaaaaaggaaccccttttattattaaatgggggaataccaaaaatcacaaaaaattggggggaacaacagctcctttaattttgctctaaaaacttttttaagttcccctagcacaaaaaaaacttaagggcaatccagattatgaacgatgctatagatggaccatgggaaaagggggaggggggattcagcccctaattggttactgacaaggatctatttttttcctctacactttaaactaacaatagggcctgaaaacaaggaaactactggtaagggggcatggaccacctgggttttccatggagctacatttttaaaaagcatgacatgtaaagcatccactcaatgaactcatttgacccttcttgctgaggtttggcccccttttgaaagttctggaaaaagctgaacctgaattgcgggtgaagtactgcgaaccacctgggttttcccaaaacca

SEQ ID NO: 1300 - DNA, 515 bp, Zea mays
  Probeset Number=SeqID_15703
tgcatgcctgcaggtttttgcccttgcgaggcaataaattccatggacttcatgatactagcaatttaatgattgcctctataatttttttgctccattttcaggtagatctggagcataatcaatataggtcatttcagggcttgacctgcttgatgcagatttcaacaagaacagaagactttattgtggacactcttaagctacgcatatacattggtctctatttgcaagagcctttcaaagatccaacaaagagaaaggtaatgcatggtgcaggtcgtgatataatatggcttcaacgagacttcagcatatatgtgtgcaacctttttgacacaggccaggcttcaaaggtcttacagatggaccgcaacagcttggaacatcttttgcaccatttctgtggagtgtctgcaaataaagagtatgtgattctgtttacctccttaactcttccagtttacaggttccatgtcatgggaactgtaaagcatgatatacattttcctgca

SEQ ID NO: 1301 - DNA, 481 bp, Zea mays
  Peptide Sequence Number=SeqID_14061
  Probeset Number=SeqID_15704
agagggcatcacgccttcccgcgatggtgcctcccgggccggatacaccgatggggctgtttgcgttgcgtctggcgcgcggcagcggccagtatttgattcacggcaccaatgccgacttcggcattgggatgcgcgtcagctccggctgtattcgtttgcgcccggacgatatcgaagcgctgttcaacagcgtgccgcagggtacgcgcgtacaggtgattaaccagccgatcaaatttgccatcgagcccgacggcaaacgctacatcgaggtacaccagccgctgtcgcgtaatgaacaggacgatccgcagaccatgccaattgcgctgagcgcgccgctgaaagcctttataaagagtgcgaagagcgacagtgtgctgattaaggcggcgattgaacgtcgttcaggcatgccggtgctggtgagcagtggggaaccagtgaatgaggcgacgccgctgccggcagtgctgca

SEQ ID NO: 1302 - DNA, 403 bp, Zea mays
  Peptide Sequence Number=SeqID_14062
  Probeset Number=SeqID_15705
cggacgcgtgggcggacgcgtgggcgcaaagtacgcctacctgtacacgatgcttaacaagcagagctgcacagggcagaatggcatgtggcattacagatggcaaatcgcacggacgagtcaaaatatgatgctctcccgcgaccctgacggtttgtgacttctaaaataatagcaagaaggctcgaagacatttttttggataaagttaggaaagtaccatgcatcccactttcagatggttcatttacctctatttcagatggtcgtatatggttgccatatgatgttgccaatttcattcctgaatgcaggagcattccgaattttctagctctatatggcaatcttcgaactgtaagtacaaaccttcttcctgcttgctgcaaaaataaatatctta

SEQ ID NO: 1303 - DNA, 675 bp, Zea mays
  Peptide Sequence Number=SeqID_14063
  Probeset Number=SeqID_15706
atgcgcccgctgctgacctcggtcagtccactgctgggccagctgcgccacagcctgcatctgtcagggctggccgcctcgctgctaccggcggtgccgatggtgatgatgggcgcggtggcgctgttcagcgccaggctgatgcagcgcgaggccttaaagcccttactgctggccgggttgacgctattgctgctggcactggcggcgcgcggcgtgatcgacagcggcagcgggctggtgctcagcgcgctgtttgccggcatcggcgtcggcgtggtgcagatggcgatgccgggactgattcgacagcgttttagccggcgcagcgcggcggtcaccgggctgtgggcaggcgcactgatgggcggcggcggactgggcgcggcgctgtcgccgtggctcagcgcgcagcttggcgtaccgctggcgctcagcggctgggcgctgccggtgctgctggctatcctgctgtggctacgggtgcgcgtgcctgccgcgccggatgccgcgcaggtaacgctgccgccgctgtggcgtaagccgcgcgcctggtcgctggcgctgagctttggcctggtcaacggcggctatgccacctgcgtggcctggctgccggatgcgtatcaccggctgggctggtccgcgcaagccggcggctcgctgctgggcgtg

SEQ ID NO: 1304 - DNA, 305 bp, Zea mays
  Peptide Sequence Number=SeqID_14064
  Probeset Number=SeqID_15707
tgacgacatgaagaagacaccctaagctctgtccgggggggagagggggctcctgctgtctggctagctgatgatgcacaagccaaacatactggtgatggactaaccgacttaccacctgcatatggagcggaactgatgactgaacatggcgctggagattacgaaggcacgctgattttcctctcgcacgacccgtgagatcgtcagtgtcgctggcgacgcacgtcatcgagatgaaaggcgatcgcatcgttgacttcaccggcaactactatcattacctgcgctgcccgggcattgac

SEQ ID NO: 1305 - DNA, 920 bp, Zea mays
  misc_feature (1)..(200): n is a, c, g, or t
  misc_feature (917)..(920): n is a, c, g, or t
  Peptide Sequence Number=SeqID_14065
  Probeset Number=SeqID_15708
nnnnnnnnnnnnnnnnnnnnnnnnnnnnnnnnnnnnnnnnnnnnnnnnnnnnnnnnnnnnnnnnnnnnnnnnnnnnnnnnnnnnnnnnnnnnnnnnnnnnnnnnnnnnnnnnnnnnnnnnnnnnnnnnnnnnnnnnnnnnnnnnnnnnnnnnnnnnnnnnnnnnnnnnnnnnnnnnnnnnnnnnnnnnnnnnnnnnnnnnaaaaagctcggtctccttccctactccgttcactccccaaatcccagactctcaccgcttccctcgtctcctcagtcctcccccgccatggtcacggacaagtccaacctcccacagcagcagcagcctcctccctccgcttcctcagcaccctcctcgctcaagtccctcaacaaggcctcctacaagatctccaagcagtcgtcttccgcctctcccgctcccgttcccgcctccaccatgcgagcgccttccccgccgccgccggctccccgcccacctcctcctctcccgcagccgccgcaggcctcctccgtccctgccgaccacccgcctccccagcccccggtgtacaacatcgacaagtcggacttccgcgacgtcgtccagaagctcacaggctcgccgtcccacctcctgccgccgcagccagcgcccattcccgcccgcgcccccctcatggcgccgcctcctcctccgccgccgctaccgccgatggcgataccctccgcctccaccgcatccggccaccgccacgcacgggagagggagggacgccgcctctacgcgcgctggagagggatggggcgtcgtcgccgtcacgcgtggtggagagattggggcgccgccgtgtgcgggcagggaaggggcggtcttggtgagaggtgtggagcggaggagtttgttgcggcgaggcgaggcatggagccttcccannnn

SEQ ID NO: 1306 - DNA, 242 bp, Zea mays
  Probeset Number=SeqID_15709
ctggctttattgcagacgcactatgtattgctcctttgctcattcaaggagcagttgcagcagcatgtacgtgttcatgcaatggaagcagtgatgggttgctgggagcttgaacaatctttacaaagcctaacaggtggatcacctgaactgaaattgtgagagcagctaatagaacagtgcgatggaaatcgtcaatgtcagacaaaactgagtgattctaggattggttctgcaggtcg

SEQ ID NO: 1307 - DNA, 251 bp, Zea mays
  Peptide Sequence Number=SeqID_14066
  Probeset Number=SeqID_15710
aggatccccctgcctgccgggaggaagagtcgatcactaagggcttggacgttcttattttgacaaactgcaggggctacaggactaatgcatttaatcttctggcggggatatgggcaggaatcaacggatactttatcacgggcccatgaacggacccctttggctaatctaatttggaggacagataagcccgaggctctttccattgcgcaagcaagcattgtcggatcagcccacttttgcgtggg

SEQ ID NO: 1308 - DNA, 216 bp, Zea mays
  Peptide Sequence Number=SeqID_14067
  Probeset Number=SeqID_15711
atgccgctcatcgccctcaccggaggcatcgcctcgggcaagtcgaccatcgccgcgcgtctggccgagcacggtgccgtgatcgtcgacgcggatcagatcgtgcgcgacgtgcaggggccgggatcgccggtgctggcggcgatcgccgcggagttcggccaggatgtcatccgcaccgacggtgcgctggaccgggcggcgctgggcgccagg

SEQ ID NO: 1309 - DNA, 513 bp, Zea mays
  Peptide Sequence Number=SeqID_14068
  Probeset Number=SeqID_15712
atgctgatcatctggcgggcggccgacgaccctggttaccgggccgagcagatcacccgcttcatggcactcgcccggcagaccggccgaatcgccctcctggaggcgatcacccgaccggctgcgggtgaccggttccccaccgccgccgcgcacggcgcggccgtgatcgcggccgcgcgggaactgaccgcctaccagccggacgtatacaaggccgaggttccggcctacctgcccggtcagctcgagctggtggaggcatactcccgccgcctctccgagcagattgcccagccctgggtcgtcctgtccaacggggtgcgagcagaggacttcgcggacggcgtgcgccgcgcggtaaccggtggcgccagcggattcctggccggccgggccatctgggaggacgccgcccgcagcggcaacccggccgaggcgctgaggtcgatatcggtgccgcggctgcgagcactggccgccatcgcccggcaatcggacccggagaagtag

SEQ ID NO: 1310 - DNA, 515 bp, Zea mays
  Peptide Sequence Number=SeqID_14069
  Probeset Number=SeqID_15713
caaagccggtgcgctgaccgcggcggtggatcgcttcgatatccgcatcaccggcaccggcagccatgctgccaaaccgcatcagggcaacgatccgatcgttatcgcggcacagattgtctccgcggcgcaaacgctgattagccgtaacgccccctccgctgacaacgcggtggtgtcgatcacccagctgcacagcggcagcacctggaacgtcattccggacagcgcctggctggaaggcacggtgcgcaccttctctcagtccacgcgtgagcgactggagcagcgcttccgcgaaatcgtgctcggcctcggtgcggcttttgccgcagaggttgagtttaactggcacgccggtccgcctgcggtggtgaatgatgcgcactgggcggattttgctctgcaacaggccaccgccagcggacttgaggcgcgcgtggtggaagccagcccgatcggcgaagattttgctttttatcagcaacagctgcccggcgcctttgtgatgatcg

SEQ ID NO: 1311 - DNA, 732 bp, Zea mays
  misc_feature (632)..(632): n is a, c, g, or t
  Peptide Sequence Number=SeqID_14070
  Probeset Number=SeqID_15714
acagcgcgcgagaaacccacccccgtcgccgtcgtcggcatccgccgccgcaggagaagcaccaccaccgcgggccatggacttcttccccgaccgggcgttcgtgcggctgcggaaccgcgcgtacggcacgtacctctacgccgacgacgacggcgcgggcgtcatcctgaagccgcagcgcggctccctgcaaacggcgtggcaggtgcaccgggtatggcgccacgaccgcatctacatcctcctccacagcgccccccccgccccccgcctccccgcctcccgcctcgcggcgggcctcggcacccggctccgtgcgccccgccccccccggcgcgtccccccccccccgccgcggggcgccgccccctgggcccccgcctaggcgggcaacctccccgtcctctcccgccgcgccgccctccgccttctccgcgcccgcacccagggcccacctcctcctgtgccgtctgcgtcctcaaaggtctatctttcaaccgcgttttttctttccggtggaccagacacccccaaaaacacaccccccctttctttacaaaaaaccaaccttaccggaccaacacaaccccgggaccaatttttttaacggggcactcttggatgggatnctgggaacggatactaaacccctttttccccgccgcgaaacatcatccaattggcccattgggcctttttaccaatccaagagagcaacttgccccccgt

SEQ ID NO: 1312 - DNA, 389 bp, Zea mays
  Peptide Sequence Number=SeqID_14071
  Probeset Number=SeqID_15715
cgcagcatgaaagacggcaaagagatgaggggcttataaaacactctatacgcgccgcgaaacacgattacgcaccagacagaatcatagacactattggtagcacgactagcgccacgaaaagcaactaccaatgtaggagtgaaaaccagacgtgctccaaacggatcaacacgcgcagctcctgctggaatacgacctaaacctggaagagaactagccatccgctggctataagaagcatgccaaaatcgttcgcgtcctagcacggctacaaaattaagccccgaatcaggagacgctgccaaagggaggggggagcgccttgccgcgcaacggaagcggctcataaacatggcgaaaggcaacataggagatcattggcacaa

SEQ ID NO: 1313 - DNA, 421 bp, Zea mays
  Peptide Sequence Number=SeqID_14072
  Probeset Number=SeqID_15716
ctgcagcgacccgcaggccctgcccgacccggacgcggtggccagccagctgcgcaagccgctgctggaaatcttcccgccggcgctgctcggccgcctggtgacaatcccctactacccgctcagcgacgccatgctcaaggccatcacccgcctgcaactggagcgcatccgcaagcgcgtggaaggcacgcacaaggtcggcttcgcctacgacgaaggggtggtggaactgatcgtttcgcgctgtaccgaaacagaaagcggtggccgcatgatcgacgccatcctcaccaacggcctgctgccggacatgagccgcgagttccttacccgcatgctcgaaggcaagccgctggccagcgtgcgcatcagccgccgcgaaaacgacttgcactatgacttcggcgcagccgactga

SEQ ID NO: 1314 - DNA, 498 bp, Zea mays
  Peptide Sequence Number=SeqID_14073
  Probeset Number=SeqID_15717
aaaaccgaaccggcggatttctggagcacgccggcgattgccggttacggtaaaattcactttgttaacacgccggattacaacccggccaacacgcccgggctgagcaataagattgtgtttcagatcaaccgcagcgaaggggatatccatcagccgaacctcggccttgagcgcgtggcacgcgtcaccaacctctattacgcggctggcgtaccgctgaatcagctcaactttgtggtgtcaatcaacagcgatgcggtgccggcagcgctcaataacgatcaattccgtaaagcgtacggcagcgataaccctaacctgaagctgattgatgagctgaagaaagccggggtgaaagtgaccatttgcgaccagtcggtggccttccatcagctggagcgcgactggattgacacccgcgtcacccatacgctctccagcggcaccaccgtcgcgtcgctgcaaaatgaagggtacgccttcctgatgctgtaa

SEQ ID NO: 1315 - DNA, 209 bp, Zea mays
  Peptide Sequence Number=SeqID_14074
  Probeset Number=SeqID_15718
ctggtaccccagtgcgagggcttgataattgggctcatgaccattaagcgttccagggcctgcttttcactgacacggcgaacgtcgcaggcgcgcacacgatcggcgtggcccactgcaacaccttcgcggcgcgcctgtcgggctccaccaccagcgccccgggcgggggcgcggacccggcgctgaacgcggcctacgcggcgcag

SEQ ID NO: 1316 - DNA, 453 bp, Zea mays
  Probeset Number=SeqID_15719
gcacaacctcatctccatcaacatgagcgagtgtcaggaagcccacactgtttccacccttaaaggcgcaccgccgggctacgtgggctatggcgaagcggcgtgctgactgaaacggtgcggcgtcgtccctacagcgtggtgctgctggatcagattgagaaggcgcacccggatgtgctcgagctgttcctccaggtgttcgataaaggctggatggaggatggccaagggctccacatagacttccgtaacaccatcattatcctgacctccaacgtcggtacgcagctgagcagtccgatgtgcgccgatccggagatgatgccggatccggaagcgctgagcaccgccctgcgccaaccgctgctggaggtcttcccgccagcgctgctgggtcgcctgctggtggtgccgtattacccgctgagcgacgcgatgctggcgggaatt

SEQ ID NO: 1317 - DNA, 425 bp, Zea mays
  Peptide Sequence Number=SeqID_14075
  Probeset Number=SeqID_15720
cgagttgagccgttttttcgagagctcggctcgttgcatgagcgagccgcagcgagccggaccgtttccatccctagtggcaaccccagcggccagggctcttaggaggctaaggacagcctgcgagagggcgaagaggaccctctcctacgtcttcgaaaccacgattcagatcgactgtttgtgcgaggacattgacatctacgcaaccatcactcgtggcaagttcgaggatctcaacatggaggataaaatggacgtgtggtcagttcactatgtcatccttgttgttggatcctctaggatcccaagggtccagcagcttctccaggagcgcttcaatgggaaggagcaatgcaagagcatcgaccctgattaggcaactgtccaggctgccatcatgagtggtgagactgcaggcatgc

SEQ ID NO: 1318 - DNA, 524 bp, Zea mays
  Peptide Sequence Number=SeqID_14076
  Probeset Number=SeqID_15721
gcctgcagcgcgcgctgggcagcgaacaaatgctgctggatcatgatggcgcggcgcaggggagcgatccgctggacccggatcgcaaatttggcaccgtgggcgcggtggcgctcgatttgcagggtaatctggcggccgccacctccaccggcggcatgaccaacaagcaggcgggccgcgtcggcgattcaccgctggcgggcgccggctgctatgccaacaacgccaccgtggcggtctcctgtaccggtaccggcgaagtgtttattcgtacgctggcggcttacgatgtctcagcgcagatggaatatggcggtcgttcgctgcaacaggccaccgccagtgtaattcatgacaaagtgcaggagctggagggcagcggcgggctgattgccgttgatgcccacggcaacgtggcgctgccgtttaacagcgaaggcatgtaccgcggattcgcttatgtgggcggcgaggttgaggtggcgatttaccgcgacagctaaggagcaggcatgacggat

SEQ ID NO: 1319 - DNA, 610 bp, Zea mays
  Peptide Sequence Number=SeqID_14077
  Probeset Number=SeqID_15722
ttagtgactatagatactatgacgcgcatgccgcggtcgtagcttccgggatttcggctcggagctcatggttagaactgcctttaccgtcactgggtctattcaggggtggtatcatcgccggaacatgccacagcgcttaaatgaataggaccatcattgctcgcagggattatcttcacttcggcaagaaggaccagaggtatgagaagagccactccaccatccctgcgcacattgcaccatgcttccgtgtcaaggaaggagatcatgtgatcattggccagtgcaggccagcgtcgaactactgtaaggttcaatgttgtcgatgttattcctgcaggttcgaagagtggaccactcgaagaacgctttcactgccgcttaggatcatgaccagtccatcatccatggcccgcaccagctgtgcgttataacgttctgatgctgcctattagccttttcccccgtgactactatatgctgtactcggaattgcactggatctacatccagaacttgaaatcctgaaaaaaaaatcataaccctttgtttgaaaaaaaaaaaaaaaaaaaaaaaaaaaaagggcgagccgccgactagtgagctc

SEQ ID NO: 1320 - DNA, 361 bp, Zea mays
  Peptide Sequence Number=SeqID_14078
  Probeset Number=SeqID_15723
cccacgcgcatgcagacccgtggactatcatcatataaagcacaatggcgtaccaacaaaccccgtcaaatgattgcaggctgcgtatgcctcctgggcttactaggtgaaccactccctccaccataaactccgactgttcaacagctcctatagtttctcttccttaccccatagcctgtcaccagcgttgaaccaagcctgggaaaacccagttcttcatccctacacgatccaacatgcggtgacggatggcatcttatctttatcaccactgataataccacaatcatgacgcctattacatgaatttcctttggtgcatggacaggcacagaacattcaggtacaacaactacca

SEQ ID NO: 1321 - DNA, 341 bp, Zea mays
  Peptide Sequence Number=SeqID_14079
  Probeset Number=SeqID_15724
atggcggctgacacacagctgaactcgttcggtgtgtccctgacacaccagctggcagagcgggggacgtgttctcgtgtgatgggtggcgcgccgatccgtcacgacgatgtccagatggccgatggcgccccagacgatttcgccttcgggagcggcggcggcagcggcaacgctgggtcgcctagctggtcttgtgaaggcgtgggagggggagtggatacacgaggatccacgaccacgaggagtgcgcctcggacgatcatgagctggagctcacccttgcttgggacctcaagactcgtgcagcagatctctcctgatcatgctgcaggagccaa

SEQ ID NO: 1322 - DNA, 545 bp, Zea mays
  Probeset Number=SeqID_15725
cgccatcgccgacaattactacgcgaccaacccgtcgggagcgatccgcgcctacgacgtgcgcaccggcgcgatcgtgtggaagttcgacgccggcaagcccgacgacaccgcgccgctcaaaccgggcgagctctacgagccgaactcggcggtggcctggacccagctctcggccgacgagggtttgggccaggtctacgtgccgttcggcaaccgctcgcccgaccaggtcggcgtgtcccggtccaagacggacgaggccttcatcgacgccctggcggccctcgacctcaagaccggccggctgatctggaagttccagaccgcgtatcatgacctgtgggaccgagataacccgtcccagccggtgctgctgaccctgccgcacaagggtgaagcggtgccggcgatcctgatcccgaccaagatcggcaacatctgggtcctggatcgccgcacgggcgagccgatcgtgccggtggagcagatgaaggtctccacccagaccgacatcccgggcgagaccctgtcgccggtccagc

SEQ ID NO: 1323 - DNA, 458 bp, Zea mays
  Peptide Sequence Number=SeqID_14080
  Probeset Number=SeqID_15726
gacggcaggtcgatgaacgtatctactcaggttgcagaacaacgtaaagtgttggaacaggctgtcgcgcaggcgctggaactggcgcaagccagcaccgacggagcagaagtggcggtcaccaaaaccaccggaatcggtgtcagtacccgctacggcgaagtggaaaacgtcgaattcaacagcgatggcgcgcttggcatcaccgtctatcaccaaaaccgcaaaggcagtgcttcctcgaccgatctcagcccggacgcgattaagcgcaccgtgcaggcggcgatcgatatcgcgcgcgtatacctcgcccgatccctgtgctgcgccggccgagcgcgatctgctggcgtttgaggcgccggatcttgatctctatcaccccggggagatcgacgccgatcgcgcccaatgagctggccgcgcaggtgagcaggccgcgctgcaggcatgca

SEQ ID NO: 1324 - DNA, 325 bp, Zea mays
  Peptide Sequence Number=SeqID_14081
  Probeset Number=SeqID_15727
tgcagattcactggcagcagcccgatttcgctttgccgttcggcccgcagccggcgcgttttatctggctgatgctggcgataggttagttctgctcatggctggcggcgctgtgctggaatgccagcagtcagcgtttgccaacggtagtgatggggccgctcatcgtattcgaaacgctctctggcctgctgtggacctttatttaccgccagagctggccaccgctgctcaccagcatcggtatcggctgtctgattgttggcgtgatctatgccatgcgcattaaaccgcagcggttgaccgcacttccttaaccctgcct

SEQ ID NO: 1325 - DNA, 571 bp, Zea mays
  Peptide Sequence Number=SeqID_14082
  Probeset Number=SeqID_15728
tgcaggcccccacacggcactgagtacgagggtggaggacaggagaaggtttggtttccctcgtagccaccttgccaaggccgcagagagtgggggaggtttccctcgtcaccacctcgccgaggctgcggggctgctggtcaggtcctgactgctctgcctacacggaggcctaggtacttcattttcgccatcctcgattactataagcttgatggggaaatttggggtattgaggtattccgacttctgaaattgcatcacaagagtcaagggatcaactgaaaaacatcctaagccaagtgctctatgttgcctgacacaacgagagatggatgtgttgttcatggcaagtgtagcgacatgggtgatgagctccctcctcgccaagctcgctgagctgctcagggaggactacaagatgtagaaggcatgaggtgtgaggtcgtgttcctcaaggacgagatgagcagcatgaacgcgctgctggagaggctagccagctcggatgcgcttgatccgcagaccaaggagtggagggaccaggtgagggagatgagctacgagatcg

SEQ ID NO: 1326 - DNA, 405 bp, Zea mays
  Peptide Sequence Number=SeqID_14083
  Probeset Number=SeqID_15729
atgcgcggcgtgacgctctcatggctgctggcagcgctgctggcgctgccgctaacgggccaggccgccagcggcgcgtggcaggccagcgccagcggcccgagccttggcgtgcgcggcaactggctgctgtcgccggcgcttaaagcgccctcggcggctccagggactatttcggtggtgaactggcgctacacgctgagccgacctgcgccatccggtctggtggtgcggctgtgcgccagtcagcgctgcgtggagctggacggcgcaagcggcagcacgcgcggcctcgccaacgtggcagccgatgaaacgctgcatctggctttcggatttcaggggcagggcgcgttgccgcccggcctgcgggtggtgagcagtgaagtgatggtcaattaccaa

SEQ ID NO: 1327 - DNA, 438 bp, Zea mays
  Peptide Sequence Number=SeqID_14084
  Probeset Number=SeqID_15730
tcaatgccgcgcgagcggcgggatcaacgggtcgaacaggtccactacgaagccatcgtgatcggacacgccgatggcccgggtccagtcgctggcgctggctgcatcgtcttccacctgcaccggtgcatccagatccgcgcggccgtattgcatgcgcaggaaacgcagccgcgccggcaggttgagcaaggcgtgatccaggacctggaaggtgggtacggtgcggcccggattgccgctgccggccttggtgtaaccctggatcggaccgaagttctcggtgtacaggaacgagtagcgatcgttcgcgggcaccgaatccaccgcgtcccacagtgccggcttgacgatgttgccgccgagtttgagcaggttctggtcatcgtcgtagcgaccggcgaccaggttcaccacgtcggtccagccgtcggtgaa

SEQ ID NO: 1328 - DNA, 512 bp, Zea mays
  Probeset Number=SeqID_15731
attcttgaaccgcgcggcgtcagttatctggcgctgctcggcgtcgcgctgcctgccaccatgctggccattttctgtgccgccgtgatcaccaacttcctcggcaaagagctcaaagaagatgacgtctatcaggcgcgcctggcgaaaggtgaagtgacactgcgcggtgagcaggtttatcacatcaagccgggtgccagacgcgcggtgctgctgttcctgatcggtattgcggcggtggtgctgtacgcgacggcaatcagcgacagcgtgggcctgatcagcaatccggtgctgccgcgtaacgaagccattgtggtgtttatgctgacggttgctacgctgatttgcctgacctgcaaagtggaaaccggtgaaatcctcagtgccagcacgtttaaatccggcatgagcgcctgtatctgcgtaatgggcgtcgcctggctgggcgatacctttgtcaaggcgcacttgagcgacatccagacgctggccggcgacatgctgca

SEQ ID NO: 1329 - DNA, 252 bp, Zea mays
  Peptide Sequence Number=SeqID_14085
  Probeset Number=SeqID_15732
tgcagaaatgaggtggtggtggatttatttgctggaattggatactttgttcttccgtttcttgtgaaggctaatggcaagctattttatgcatgcgaatggaatccacatgctctggaggctctttggcgcaatgtattatacttgaaggagataaccgggtgactgcacccgaagtatgtgctggacaaatttcgcgaggggccacgctttcatcagatgatcagttgatcaccatcccttccctctgca

SEQ ID NO: 1330 - DNA, 256 bp, Zea mays
  Peptide Sequence Number=SeqID_14086
  Probeset Number=SeqID_15733
catgaaacctgcgcttcgtttagccggtgcattgctgttgtcctgtttcggactgtctgcacctgcgtttgctacggaataccccctgccagccgctgatagccgtttgattggcgaaaacaccctgaccaccgtcccggatgacaaacggccgctggagagcattgccgcgcgttataagataggcatgctcggcatgctggaagccaacccgggcgtcgacccctggctgccgaaagccggcacgcagcttacc

SEQ ID NO: 1331 - DNA, 335 bp, Zea mays
  Peptide Sequence Number=SeqID_14087
  Probeset Number=SeqID_15734
ccgccgcccgtccgagaacgccaagcgcgaagcgggaggagaccatgtcacggtggcgcgccgccgcctacagcatctccgcagctgccgcgtcccgcaactctgcggcggaggccggcgccctctccagggccttggcgaaggctccctcgccgccttcgcttcctctccaaaccctcacgagaaactttgccaagtccgctgccgccgccacggccacgtcgcccggccctggcgcttcctctccgcccgctgggccgaggcccgaggatctgatcaatgatttcaagtcgcctagtcgcctggtcgaaccctgggaccgaccaggcgactag

SEQ ID NO: 1332 - DNA, 2311 bp, Zea mays
  misc_feature (1)..(387): n is a, c, g, or t
  Probeset Number=SeqID_15735
nnnnnnnnnnnnnnnnnnnnnnnnnnnnnnnnnnnnnnnnnnnnnnnnnnnnnnnnnnnnnnnnnnnnnnnnnnnnnnnnnnnnnnnnnnnnnnnnnnnnnnnnnnnnnnnnnnnnnnnnnnnnnnnnnnnnnnnnnnnnnnnnnnnnnnnnnnnnnnnnnnnnnnnnnnnnnnnnnnnnnnnnnnnnnnnnnnnnnnnnnnnnnnnnnnnnnnnnnnnnnnnnnnnnnnnnnnnnnnnnnnnnnnnnnnnnnnnnnnnnnnnnnnnnnnnnnnnnnnnnnnnnnnnnnnnnnnnnnnnnnnnnnnnnnnnnnnnnnnnnnnnnnnnnnnnnnnnnnnnnnnnnnnnnnnnnnnnnnnnnnnnnnnnnnnnnnnnnnnnnnnnnnnnttgttcctgcctcgaggttgtgatgagctgatcatggctctgtcgtcgtgccattgatgtccacggtcacacccaccccacaactatgccatcgccatccacctccctcgagggcatcgaagctgcggtacccgctgtggtcggcgagcaaggggaaggcggcggtcgtttccctggcggctgatgctcctcccaccatctctgctccacgacgcttgtagggcctctggacttatgctgatcaacgcggcggagctcatgatggtcgtcccgctcagtgggaggacgcatcccagagacgtaatcgacatggaggagctggctagaggattcacaaaagattgaggaaactgatgaagcaaggaaaaaattctctaatgctaaggcaatttcgtcatctcagttttttggtactcaaaacagagaagagaaagaggctcagctatcccttcaaaaattcgcgggttcttcatccatttcaagctctgatctttttggtcgtaccaatgtggacgattctaacctggacctaagcgctgcagatctcatcaacagtttgtgaggttttaatttgagtggcaatctgtgaggttttgcaagggagatgagctcaccttggcaatggtagttaatcttattaatgcaaacaaagatgattaatttaatgtacttttctatgcctcatggtgcccattctcacaagaatgcatttgaggaatatgcaattaggccaaggcgtcccacatagacgaatgtagttgtcggaagctatggtggatacaacacaagatgggctcttttcttagtatgaacaggcctatcttcttgaacaatatggaaggaaggctccaatgaaagtgcataaatctgagagggagaaacgtaagaaggacaagtagaatgatctcttttgggagctgggaaacatgctaggttctttgattgggctgccatcattttctccgtcgacgaagcatcgtctacagttgtgtaccaaagacgaagtggagtttgcaaaatgaaagatggagagaaaatactccaaggatgagtgtcattgcttgctgacatgtgatttcaagatagtaatataatttgatggctcctattgcttaactgtacaaggatgactgttccatttgctgacatgtgattttacagtcaccattttatgctgctgattttcatgggttgcagtgatttgttcctgtgccacagttatttttaggatcgaattaccatcgttttttccctagtattttcttggggggcggcgtggatccggactactataataaaataaatctcgggggggggggcccggttaacccaaatttcccccctttgtgcggaggtccgaattaacaatttcccggggcccggcgggttttacaaactgctggtgggcttggggaaaaatcccctggtggtgttcacccccaacttttatatccggcctttggggagaaacaattccgccccctttttgcccccaagctgggggggcgatataaaacgtggaaaaagggggcctcgcgccaaccccaaatttcccccctcttttccccacaaacaatttgtggggcccacccctcttggaaattggggccagatatgggcaccaattgttgcacacacgcggtcttacatctctttttggtttaaaaaaataatcgcggcgcaataaatgttttgtggaataaaaaccacgcttcttcttttttattatactacccattcgggcgccgaaatacgggggaataaatcccccttttattatactcccaagataaaactagccccccacaataatagggggtggagggtggtgtctcccccgcttggcggagcaaaataaggatcctcacttatataaaacgacatgggcgccatcccacactctaaagggggggaaaaacccccg

SEQ ID NO: 1333 - DNA, 272 bp, Zea mays
  Peptide Sequence Number=SeqID_14088
  Probeset Number=SeqID_15736
gcggagcacggcgagtgggaggagcaccgcgtcgacggcacgtggagcacgcactcgctgtcgggcctgcgctgcggcacgctgtaccacgtgtacgtgacggcgtccaaccgcgtgggctcgggctcggccagcaagccgctggacctgcgcacgcgcggcggcgtgcccgccaaggcggccgccctggtccggcccaacgtcacctcgctgctgctgcgcctcgacgagtggcccgacggcggctgcccgctcctatacttcgtggtcga

SEQ ID NO: 1334 - DNA, 571 bp, Zea mays
  Peptide Sequence Number=SeqID_14089
  Probeset Number=SeqID_15737
tgcgctacctgaacaagaaggacaaatcgtactggtacatcgacacgcacgcgggcgcaggcgtgtattcgctgcgcgacggctacgcggccaaaacaggcgagttcgacaccggcatcggtccactgtggagcgacaagaacctgcccgaagcgctgggcgattacatcgacgaagtgcgcgcgctgaacgacgacggcgagctccgctactatccgggctccccgtatctcgcgtggcgatcgatgcgcgaacaggatcgtatgcgtctgttcgaaatgcacacgaccgaaatcgacgtgttgcgtcacaactttcgcgacgcggggcgccgcgcgatgatcttcgccggcgacggattcgaaggcatcaaggcactgctgccgccgccgccgcgacgcgcgctggtgctgatcgatccgtcgtacgaggacaagaaggactacgcccgtaccgtgacgtgcgtgacggaatgcctgaaacgtttcgcgaccggctgttatgcgatctggtatccgcaggtggcgcgcgtggaatcgcagcgtttcgcggaacagtacaagcgcctgca

SEQ ID NO: 1335 - DNA, 465 bp, Zea mays
  Peptide Sequence Number=SeqID_14090
  Probeset Number=SeqID_15738
ttattgtttctgacagcatgggcccgcgatcctgcaccgcgtggtcttgctgccgccggccttcgtccctcctccggcggcccacccgcgcagcttccggagcagcctcggccgcccgatgctccacccgccgccgcagtccctcccgcgcccgccggccgccgccgcgaaccccatgcacggtgccgacggcggcgccgtctccacgctgcggcgcggggccgacccggacccggacgacgacgacacggactcggccttgcatagctccacctggttgctcggcggcaccgacgccaccatcgtctcccccttcttcttcttctccttcttcttctcaccctcctcctccggcgccacgccgtctcgaacatcttcgtcgtcgccgccgtggccgccaccgtaggtggtgctgccaggaccgagcaccgcgccgccgtagccgtcgtcgtcgtcgaccagcat

SEQ ID NO: 1336 - DNA, 757 bp, Zea mays
  Probeset Number=SeqID_15739
gcgatggcttggcggcacagatcccgtctctgaccatcttggtggcggcgggtctggtggtgacgcgcgttgccaccggcgaggatatcggcgcgcagatcaaatcccagctctggaaatatccgcaagcgctggcactggcggcggcgatcaccatcgccatcgggctgatgccggacatggcgcatctgcccttcttcgcgctgggtggggcgctgggcttcgccgcctggcgggccgcgcgccaggcgcgcgaggccgccgccgaacccgcggccgcgaccgccgccaagggcggcaaggccgaagccaagccggacgcgctggcggatgtcaccggcgtcgatccgctgggcatgagcatcggctttgccctggcgcctttggtggcggctggcgaaggcaagctgctcggccgcctgaccgccgtgcgccagcgctatggccgcgccatgggatttttgatccccgcagtgcatatcagggattcctcggacctgccgccgaatgcctaccgcttcacattgcgcggggcagcgattggcggcggcgaggcctggcccaatcaatggctggcgattgaaggcaatctggtcatcgacaggctgaaaatcggccggcatgtgaaagaccccgccttcggccagccggcggtgtggattccgcaaaccgccatcgcccaggccgaggagcttggctacacggtggtggatgcctcctccgccattgccaagcattttggcgaaggggttaaacc

SEQ ID NO: 1337 - DNA, 554 bp, Zea mays
  Peptide Sequence Number=SeqID_14091
  Probeset Number=SeqID_15740
tcggtacccctgtgcagttgctacaagagattgaagaggaccggccggagacgcccacgtcggatgctggtgagatggacgacgccttgtacgataagctgaagcgtgcgctcatggaagccgagagcctcaagcacgaggcgtacgaagagactcgccggcgtcagatggccgagcgcgagctcgctgaagcgtccaggatggtcgtcgtgacgaaacttcaccacttccttcctgccgacgaagcagagagatcgaaccagagagaggcgaggcaccggaaggaggtggaggagatggtggcgagagagcgcgcggccattgagcaggacaggcgagagctcgacgacatcctggagaagatacggaaggtcgacgaccggagcgccgagctggagcttcagatcacgagctcggagcgcacgatgaacgacctcgaagccagactgtcggaatcgtacaacctcctccacacactccggcaaggagatccctggtcgactgcgacggagtccgcgtccgagtccacagaggacggcggcggcgagcagaga

SEQ ID NO: 1338 - DNA, 272 bp, Zea mays
  Peptide Sequence Number=SeqID_14092
  Probeset Number=SeqID_15741
atgagcgaagccgcttttaattttcagacgctgaatcccgacgttatccttgatgcgctctgggatgcaggtctgcgggtcgagtccggcttaaccgccctgaacagctacgaaaaccgcgtgtatcagtttagcgatgaggataagcgacgctatgtcgctaagttctatcgtccgcaatgctggagcgccgcgcagatcgctgaagagcatcgctttgctcaggatctgctggacgatgaagtgccggttgccgcaccgctggcgctgca

SEQ ID NO: 1339 - DNA, 350 bp, Zea mays
  Peptide Sequence Number=SeqID_14093
  Probeset Number=SeqID_15742
tgcagagcgatgacgatcgtatggaagcactgcgcgcttatgtgccgcaggcaaaacaggaagactggaagctggtcacggccggtcagcgcgtgcaaatcatcaaaaatgatgagaaagagggcggcgtgctgcgtctcggtaccgaagtggtcacctcggccgacggctcgatctctgcgctgctgggcgcgtcaccgggcgcctccaccgcagcaccgattatgctggagctgatggcgaaagtgttcccggagcagatgcgctcgccagagtggcaaaccaaaatccgcgcggtaatcccgtcgtggggccgcaagctgaacggcgacgtggcgctgaccgagaag

SEQ ID NO: 1340 - DNA, 1001 bp, Zea mays
  Peptide Sequence Number=SeqID_14094
  Probeset Number=SeqID_15743
gcccggctcgagcgtcccatcccacagaatgctccacactctagttaggctaaagaagggatgtctgctgtcttcggagagattagttcaaaacctgtgactgcagggttgcgaaaggttaccgatgacatgaagtctaaaaaccgcgctgatagaagcggtgttgtcagcagcactgctcctgctcctgctgcagctcctgaaaagacttcccgtgcagggtccttctctttcaaatctggaccccctaaactggaacttcagatgggacgcaaatgggtggctgagaatcaggttggcaagaagacccttgctattgatgattgtgattccagacaatctgtctatgtgtatggatgcaaggattctgtccttcaagtacacggcaaggttaacgatatcactggtgacaaatgcactaaggttggaattgtattcaagaatgttgtagcagcttttgagattgttaactgcaaagtcgctcatgtccaatgtcaaggtaagtcacggtcaatatcactcgcccactcatatgtatggcgattatacttaagcatagatacgctgggagcttcaattacttctgccaaatctagtcaaatcgatgtgatggttccaagtagtgacgctcatggtgattgggtagagcatgcattgcctcaacagtacatccatagtttcaaggatgggcagttcaccacttcaccagtttcacactcaggagcgtgaatacaattgttactgctgctgtttttgaagtctgtaaacagatttgggtcttgcagcactggactcggtctgcgattgttgttttttgttgcccttgctcagtctggcagtgtgtaatgcctgcatgcacgtggttcctttcatgttggtgcttttgtgtggcaacaaacctaccaaacttggtatgtaggtctttaagtgatagatctctccgaccccacagctcaataaattctgtattagtttggacgccttgcttttttaaaagctaa

SEQ ID NO: 1341 - DNA, 396 bp, Zea mays
  Peptide Sequence Number=SeqID_14095
  Probeset Number=SeqID_15744
cggaacgtgctgcgccagatcctgcatccggacgggctcgcgtcgcggatcgtcaataggcacgaatggcgtgcgcatatcctgcatcggctgcaacggcagatcgatgcaagcggcgaccgcacgctgcatacgctgcgcgacgaactggccgcgtaccccgcgccggccggccagcccgacgatccgccggcgcgcaccgactacgcggatatcgcggtgccgttgcggctgagtacggcggccggcgagctgacgttcttcagtacgacgacggtgttcggcacgccggtcgacgtcacgctgtcggagctcgcgatcgaggcgttttttccggcgaaccaggagacggccgaagcgatgcgtgcgttggcggacgggatgccgcggaagtga

SEQ ID NO: 1342 - DNA, 216 bp, Zea mays
  Peptide Sequence Number=SeqID_14096
  Probeset Number=SeqID_15745
ctgtcaggtgcctggagtctaaggtcacggcggtgtcctttgatcacagccgcctgaaacaggaggtgaagtacgctcatggactagcactcggggaggtcgggcacctgctcgtagtgcctccggagggtctcgcaagacaggctgatcgtcccgaggagcttcgtctacaggtcgaagcggagctccttgaggacccgttcggcggggtcctcg

SEQ ID NO: 1343 - DNA, 298 bp, Zea mays
  Probeset Number=SeqID_15746
tgtctgcacgatgataaagcccatgatatcgcgcacctgcgccgcgtctggatgagcgcggcccgcattatgcaaaacaccaatgccgatccgctggtggtgctgaccgcctgctatttccacgatgtggtgaacctgccgaaaaaccatccggagcgccatctggcttcgacttacgcggcggaagagacgcgccgcattctgcaacagggattttccggacttcccctcagcgctgctggacagcgtggcgcaatgcggtgcaggcccacagtttcagcgcccgcataacgccaaa

SEQ ID NO: 1344 - DNA, 270 bp, Zea mays
  misc_feature (34)..(34): n is a, c, g, or t
  Peptide Sequence Number=SeqID_14114
  Probeset Number=SeqID_15747
atggaagagatccagcgccactatggcccgcgcnctgacctgcaactggtaccgtgcaagtacgatgcgctgcgcggcgccgatgccctggtgatcgtctccgaatggcaggattaccgtgtactcaacatggtcaaggtgccgcaacaactggccgaccgggtggtgttcgacgcccgcaacctgttcgaacccgagcacatgcccgctgccggcatgacttactacggcatcggccgtggccaggtacagccagcatgcccgtactga

SEQ ID NO: 1345 - DNA, 201 bp, Zea mays
  Peptide Sequence Number=SeqID_14115
  Probeset Number=SeqID_15748
atccggtataccccatgggttgcactttccatctgccctcggcctggtgtgtgggaatatgtgagggtcaatgtcatcaagctcgctgttgaggagctgaaggtccctgagtacctgcagttcaaggaacaacttatggaagaaggcccttgttcaagcaatttggctttggtcctcttcgtgatgctaatgtttgcgttt

SEQ ID NO: 1346 - DNA, 442 bp, Zea mays
  Peptide Sequence Number=SeqID_14116
  Probeset Number=SeqID_15749
tgcagggctgggcgctgttgctggcgggcgacgaaatggggcatcacgccctcaacgaccagcaattccgggtcaatttcaatctcagcaatgcgctgcttgatgcgctgctggccctgattgagaagcaactggctcacgattcgatagaggagagcgacgacgatgaggctgctacgccgctgctgagcggcggctatttccagctgtttacggagacagtaccgccagatgtgaagagactgtatactgagtcggcggagaaggactatccctcgcttgctcagacagcgcatcgcctgaaaggcgtgtttgccatgctcaatttactgccgggtaaacagctttgtgaagagttagaacagcacattaaactgtgcgacgatttaaccattaaaaataccaccagtgaaattgacgcgtacgtcaaccaactgctgca

SEQ ID NO: 1347 - DNA, 619 bp, Zea mays
  Peptide Sequence Number=SeqID_14117
  Probeset Number=SeqID_15750
gcctgcggccacccggcttcaactggaacaggcgctgtttttcagcaaatccctgtccgacggcagtgataatccgctgtatcgcaccatgatcccgcgcaacggcgcgatggagcggcgtagctgctgccagcgctatcgcattccggacgtcgaacgctgcgctttcccgccttatggcagcttttacgctctgtttttaccggagaaaaaaatgagcctggagtcggtacggcacttctttgccgaacacgcaccggatatcgacatcatcgagatgccggaaagcactgccaccgtagaactggccgcacgcgtacatggcgtggcgccggggcaaatcgccaaaaccctgtcgctgaaagtgaaagagagcgtggtgctgattgtcacgcgcggcgacgcccggctggataaccgcaagctgaaggcggcgctcggggcaaaagcgcgcatgctgagcgtggatgaggtggtgaactggaccggccatccggtcggcggcgtgtgcccgttcgggctggaaaatccactgaccgtctattgcgatgtgtcgctgcgcagtttcgatgaagtgttacctgcggccggtttgatttacagcgtggtgagcatttag

SEQ ID NO: 1348 - DNA, 651 bp, Zea mays
  misc_feature (601)..(651): n is a, c, g, or t
  Peptide Sequence Number=SeqID_14118
  Probeset Number=SeqID_15751
tgggttccgacagcactttcgtgggccgcaacagcaccgttcgtcgtgcgcgccagcgagcggatcgtcgtcctcgcaaaaaaacccaaaccccccctctcgatccggattacatctacttccctgtggatcgaagacgttataataatactaaccctgatttaagaggatggttacgaccacctttgacgtgatgacaacctatatctagtaagggaaataaatgaaacaataccttttcccgaccatccaccatcctctttgtgaacgttgacttttaaggcgactctcttggtagttagggtagaaggcgtctcctatgcgacaatctaggagtccttggttaccttcacctatatagagtcctaggtaacctctccctaggttccagacacctctttaccctcctcctctctcttctcgtcgtttatgaagacttcctcgtctcgattagttgcatacacagtcacctcctcccgccctacgggacctggacgtccgtgttactaactctcggcgaccagtgtggggggaaagcaagagctcccagctcacgttaccctgcgggggtcaatcccacggtgggtggctgccgtgcggnnnnnnnnnnnnnnnnnnnnnnnnnnnnnnnnnnnnnnnnnnnnnnnnnnn

SEQ ID NO: 1349 - DNA, 588 bp, Zea mays
  Probeset Number=SeqID_15752
agtctccctgatgtcgatcaaactaacggcggcaaccaggcaagaacgagatgttcaacgtcgcgaacccggctgagatcaggctgttccagcggatggcgttcggcaaccaagatttcccgacggatttcagccagtccagctggaacaacagccagagcaaaggtcttgatgcctctgggtcaaggcccttgtaatcctccccctcggcgtcgtcgtaaatttcgtagatctaaccagctaggggggttcgtgatgattttttttttacctcggggaattctttttgagtgggtcaatagtgattggtcttttgccatccctgttttttaccccctaacatagatcatggggtgaaatctgcttgcttgtgcaaaaactcgttgccttattaaaaaagacttctggggttagtccctattagttagaaatgctggatcgattttttttcccttagattttgcagaagtcctgtaatcagccgttgcttttgaaaccgggggtttggcaagaaactttttattcgagttgaaaaaaaaaaaaaaaaaaaaaaaaaaaaaaaaaaaaaaaaaactcgagggggggccc

SEQ ID NO: 1350 - DNA, 440 bp, Zea mays
  Peptide Sequence Number=SeqID_14119
  Probeset Number=SeqID_15753
tgcagcccagagtgaacaccagcaccctgcacaaactcgagtgcctcgctgggcaggccagggagtacgtcaacgagtcgcatgcctacgtgcacgtcaagaacgccgccgaggcgcacgtcagtgtgctcgaggcgccggtgggcggcggtacgtatgcgccgcgcacaccctgcaccgcggcgagctccgccgcatcctcgtcggactcttcccagagtaccctattccggcggcaagcacaacgcatcaagatataccgaagaggggttacaagtttacgaaccaaccaccattgctgtgtttgttgaaggacctaggcatcaagttcacaccagtgcatattgaataccctgaatggagcagtgagatccctgcaagaaaagggtttcctccagaagatcactgcatgaagatcgcttggacacacggagctgcag

SEQ ID NO: 1351 - DNA, 264 bp, Zea mays
  Peptide Sequence Number=SeqID_14120
  Probeset Number=SeqID_15754
ttgtgtcgagtgcccagaatgccatacagatatatgtatcaactgaggagtgccgtggcacatcatgttgggctgtgacgagtaccagagcttgcccggtgtggaaagagatgctggagacctatctttgcatcggcttgcacataacaatctgtggaggcgtagccagagatgtcgacgtatgattgaactgacacagggctgataccatatgacttgctgttgtgcagtcggcctttcatattctggcacctcaaaacaaca

SEQ ID NO: 1352 - DNA, 381 bp, Zea mays
  Peptide Sequence Number=SeqID_14121
  Probeset Number=SeqID_15755
ggcaatggaacgcagcaccccgccatcacccgcaaggcagccccggtggtagcattggcctgcatcgacgccagggtacaccaccatgtttgccacttcactcccggtgccaccggctttgatcagcgaggttcgggccggttgctccagccaggaagttggcctccagttcttcagtcgacaccccctgctcctcggccagcttggcaaagaaatcactcaccctctccgaggcggtggtggcccccgggcaggcaccgaattcactggtcacccccgggtaccagccaggcgtcttcggccaacccgcgcgacaccgccagcaacgcagtcttggtcatgccgtaatgaatcatctcgttcggaatctgcaggcatgca

SEQ ID NO: 1353 - DNA, 401 bp, Zea mays
  Peptide Sequence Number=SeqID_14122
  Probeset Number=SeqID_15756
tgcagactacgctggacgacgatatttacgccatcggcgactgcgcctcctgcgcgctgccaggcggcggattcgtgccgccgcgcgcgcagtcggcgcaccagatggcgtcgcgagcactggaaaacatcctcgcccagcgcaaaggcaagccgctcaaagcctacgtgtataaagatcacggctcgctggtgtcgctatcccgctttagcaccgtcggcagtctgatggggaatctgatgcgcggctcgatgatggtggaagggcgcattgcgcgttttgtctacatctccttgtatcgtatgcaccagattgcgctccatggatacttcaagaccggtctgatgatgctggtcggcagcctcaaccgcgtgctgcgtccgcgtctcaaactgcattaa

SEQ ID NO: 1354 - DNA, 632 bp, Zea mays
  Peptide Sequence Number=SeqID_14123
  Probeset Number=SeqID_15757
atggcgataaaactgattgcgatcgatatggacggcacgctgctgaatccgcagcacgaaatcacggcgggcgtcaaagcggcgattggccgggcgcgggataaaggtgtgtcgatcgtgctggccaccggacgcccgtttgttggtgtggagcgctacctgatggagctggatctgcgtcagccggggcagtattgcatcagcaacaacggcgcactggcgcacagcgcggacagcggtgaggtggtggctgagaagacgcttggctttgatgactatctctacctggagcagctggcgcgcgaccttggggtacattttcaggcgttcgacaaatccttcctctacacgccaaataaagacatcagtgaatacaccattcacgaagccagcctgaccggcattccggtgcgctatcgcgccgtagaagagatggacccggcgacgcgcttcccgaaactgatgatgatcgataaaccggagctactggataaagccatcgccgccttaccggcgcgcgcccgcgacagttataccattctgaaaagtgcaccttactatctcgaaatccttaatccgctggtcaacaaaggctacggcgtaaaaatgctggcggagaaactcggcctgca

SEQ ID NO: 1355 - DNA, 278 bp, Zea mays
  Peptide Sequence Number=SeqID_14124
  Probeset Number=SeqID_15758
ctgcagtccttagttcctcttgtgaagaggccagagcaccacagctctgagaaatggtatgccctgctgtaaagaaaccacatgggcggagatggtcagacgtacgcgatgctcgacaagacgatctgtgcactgtcaaacgtgttcataggatcatcagggtccaccttcacgcaggacatcttccggctggggagggggggctggggatcagtgtcgcgctgtgacacgagtacctctgccagggtgagctgcctaacttcatagcagagccagat

SEQ ID NO: 1356 - DNA, 314 bp, Zea mays
  Peptide Sequence Number=SeqID_14125
  Probeset Number=SeqID_15759
atgcctgcagcagcagggcaaggcattactgcccgatgcaggccgctatgtgctgacctgcggcagcagcctgctggccagctatgccgtggagcaaattgccacgctgagcggcaaaccggtgcgggtgctggcgggaggcaatgcagcctggcgcgccgccggtctgcccaccgagcagggcgagcagcgcctgctctcgccgcccatcgatcgttatcgccgcccgtacgaaggcaccgatattgaaccggacgtgatgcaggcctatctcgactgggaatatggtctggtggcgcaactggatcgcgacg

SEQ ID NO: 1357 - DNA, 214 bp, Zea mays
  Peptide Sequence Number=SeqID_14126
  Probeset Number=SeqID_15760
cgccggcaatcagtgctgccagcacgctgcggcggagagtggcaaacatagtggttgtccttttttgcctctctttgccgatctcaaaaaccgtccggtgctggtggtcggcggtggcgaaatcgctgcgcgtaaaattgagctgctgcggcgtgccggtgcgcacgtgcgggtagccgcgcgcgagctcggccatgaactgcaggcatgcaag

SEQ ID NO: 1358 - DNA, 375 bp, Zea mays
  Peptide Sequence Number=SeqID_14127
  Probeset Number=SeqID_15761
atggcgttgctgacctcgtttattaccgtgattgttggccacgccctgacgccgggcgaggatcagttatccctgctcagccagaccgacagcagcgcctcatcgctgtttgaaatcgtccagaacatgtcaccggatcagcaacgcattctgctgcgcgcctctgccgccggcacttttgctgccctgattggcaacacgctgctattgggcggcatgctgtgcctgctgccgatggtatccagtggacagcgcgtcagcgcgctgcgcgcgattggcgcctctgcgccgctgctgccgaaactgctggtgcagaccttcctgatcaccctgctggaacagctgggctttatggtactgatggtgccgggtgtg

SEQ ID NO: 1359 - DNA, 268 bp, Zea mays
  Peptide Sequence Number=SeqID_14128
  Probeset Number=SeqID_15762
atgggcacacttacaatatgggatattatctagcagatggtatataccctgactggtctttctttgttatgagaatccgtaatccatacgatgtgaggacgcaacactttgccaccattcaggagtccgctagaaaagatattgaacgagcttttggtgtgctccagaagcgatgggctatagttcaaggcataaaccggggctggcggcggagacggccaatttcctgagccctgaccgcctgcacgatgactagctgcctaactgc

SEQ ID NO: 1360 - DNA, 515 bp, Zea mays
  Peptide Sequence Number=SeqID_14129
  Probeset Number=SeqID_15763
tatctctgtagatatatgaactatgttaggcttattatccatgctagaaaagttctcgcagctacctttgatcgcacagggcgttatgttattactggttctgatgaccgccttgttaaaatatgggcgatggaaacagcgttctgcctggctagctgccggggccatgaaggtgatattaccgatcttgcagtgagttccaataattctgtggtagcatcttcatctaatgatttcattattagagtgtggcgtatgcctgatggaatgccagtctcagtgctcaaggggcatacaggggcagttactgctattgcatttagtccaaggccaggtgctgctttccagctgttgtcgtcatcagatgatgggacatgcaggatttgggatgccagatactctcaacaacctccaagactgtatacaccaaagcccccagatgttgcccctggtaagagtggtgatgcatcttccagcgccgctcaagttcagccaacaaatcaccagatcttatg

SEQ ID NO: 1361 - DNA, 237 bp, Zea mays
  Peptide Sequence Number=SeqID_14130
  Probeset Number=SeqID_15764
tttggcaggacaatgcttcttgctcttcagactcttgctgtggtgtttggagatattggaattggaccattgtatacatttgatgtcatagttaacaagtaccctattcttggaaaagaagatgtcccttgagccctctcaactattctggatactcttatagtggtgccattagtgaaatatgttttggatgtcctttgggcccatgatgacggggaacgtatattggaaggtggg

SEQ ID NO: 1362 - DNA, 630 bp, Zea mays
  Peptide Sequence Number=SeqID_14131
  Probeset Number=SeqID_15765
ttgcatgcctgcaggtaactgtacaaacagagtctgaacgccagcttgataagattaggaggaaagaggaaagacgtagcaagcgcagtgcagacagtggcaataatgatattggtgttgatgatttttcatcccttcttttggcaagtgaacggaaggaggcatttgatgacgtgattggtagtggagaagggtcagacagttttacagtaacttcccttcctcaaggaaccacaaggaaacacatgaagggttatgaagaagtgaagattccaccaactccaacagcatcactgaaacccaatgagaagctgattaaaaacattgcattttttcttgaaaagcgcaggagaactgtgccccatttatatattaggaggaaagaaaaaaggtctaagaagacccaaaatacaagacactccttacggaggccagaagcaaccatacagatcatcgaggccccaagagtgatgagggagttcagtcctctcttagccattccagtaacaacagcagatgtcctttcccaccaatccaagaaggaaatagcagccgactgtggggctaaggagttataccagaaaactcttgtgaagacacaagacaccaacaggtggttgatagattcag

SEQ ID NO: 1363 - DNA, 472 bp, Zea mays
  Peptide Sequence Number=SeqID_14132
  Probeset Number=SeqID_15766
caacaagaaagacgcagaagccaagagacccccagagcaagcatttaatttgcaccccccggaggggaagggccaaggagggagaggaagcaaagccccgaaaagccggcccaacaaaccacacaggccccaagaaaagaccgaggacagagccagccaacgggacaacaaaagcaacaagactgtgcacgccaaccgggagcaccgcgccaagggcaaacccacccaaagacctcggaaacaaagagcacaaaaagaagggggcgagcacaagaacaatacgacacaaaagaaaggcacggagaaaacaaacgaagagcacccaaagacacgcactcacgacgagggggaaacacaccacgaaagaacaacacgagccaggcaagcggaggccgacaagccaacaaacagaagaaggcacaaggaccccgccggaccaagcgccgaagagcgggagggggggcaccactag

SEQ ID NO: 1364 - DNA, 223 bp, Zea mays
  Peptide Sequence Number=SeqID_14133
  Probeset Number=SeqID_15767
gttgccaaggacccatctggcaaggatatcaatgctcttgagcagcacatcaataacatcctcagtccagccactccgctcttctagaacaccatgtacgacgcctgtcgtcagggtagtgacggtgtgcgtgaagacccgctcagcctcagggaggggtgctcactcctgccgtatcccgtcggcctgggcttaacatccctgcctatcatgataccgcaca

SEQ ID NO: 1365 - DNA, 208 bp, Zea mays
  Peptide Sequence Number=SeqID_14134
  Probeset Number=SeqID_15768
tgcaggcagaaggtttccctcaaacctacctcggcctccccctctcctgggagattgtgcttgggtgcaagttcgtcggtggtctggaggtgagagatctcgagctattcaacacatgtctccaccttaaacttattcatcgcctccacacctcgtcatgttcgtcttggggggcctgggtccgcgtcgcactgtagaggatacaggg

SEQ ID NO: 1366 - DNA, 640 bp, Zea mays
  Peptide Sequence Number=SeqID_14135
  Probeset Number=SeqID_15769
tgcagggctttgagcaagatgcgccagtgatctacatgggcaccttcagtaaaacgctctatcccgcactgcgtctcggctatctggtggtgccgaaagcgctggcgcagccgctgcgcgtggcggcggccgaactctatcgcggcggccatctgctggtgcagcgcgcgctggcggaattcatccagaaaggccactacatgacgcacatccgccgcatgcgcaaactctacagtcagcgccggcactttatgatgacgctgattgaacgctacctgggcgcggcattcatgccggtggtcaatcatgaagccgggctgcatctggtgctgaatctgcccccgggctgtgatgatgtggcgattgccgcgctggcgctgcgacgcggcgtgaaggtgcggccgctgtcgcaatactatatgcatccgcaggagcgacgcggtctgctgctcggttacgcctgcgtggatgagcgccagtgccaggatgcgtttggtgtgctcaaagcctgcctggtggaagcgggcatcgccgggcggggatagccccggcgtgtgccttacgcccggccaatgctgtccagttgcgcaaccacctccgggctcagcgtcagcgccgcgctggccagattttgctgcaa

SEQ ID NO: 1367 - DNA, 326 bp, Zea mays
  Peptide Sequence Number=SeqID_14136
  Probeset Number=SeqID_15770
atgctgtttggcatcctgctcggctgtgcgttacagatgctgctggcgagcgtggcgctggagctgctattgcactggatggcgtctgtgcggttgccgctgacggtggtgggatgcagctatctgctgtggctgtcgtggaaaatcttccgcgccggtgcgccgcagctgcgcgaacgtccgcgtccgatgaccctgctgggcggcgtgtgtttccaggcggtgaatcccaaagcctggctgatggtcaccaacgtggcgctgatgtacgccaacagcaacggtgtgctggcggtgctgctcggcttcgccgccctcaacttgcc

SEQ ID NO: 1368 - DNA, 294 bp, Zea mays
  Peptide Sequence Number=SeqID_14137
  Probeset Number=SeqID_15771
atgagccacgacaccggcgccggcgtggagaccctctcgctggacctgctggcccacgcgctagcggccgtgcgcgacccgcgggaccgcaagtcgtgccgcctcgccagccgcgccttcgcgcgcgccgaggccgcgtcccgccgcgccgcgcgggtgctgcgccgggacgcgctgccgcgggcgctgcgcgccttcccggcgctgtcctcgctcgacctctccgcgtgcgcggggctcgacgacgcctccctcgccgccgcgctgctcgaggagccgctgcccgtccgccgg

SEQ ID NO: 1369 - DNA, 536 bp, Zea mays
  misc_feature (105)..(105): n is a, c, g, or t
  Probeset Number=SeqID_15772
tgcagcccgactatgaccttaatattatgcggcccgaacaggggctgaccgagatcaccagccgcattttgcagggcatgaaaaccgtcctggcggacttccagnccagacgtcagtggctggtacacaggagataccactactacctttgccgccagcctggccgcgttttaccatcagattccggtgggccacgttgaggcgggtctgcggaccggtaacctgatgtcaccgtggccggaggaggccaaccgcaccctgaccggtcatctcgccagctatcacttcacgccgacagaaaattcgcggcaaaacctgctgcgcgaaaatctgcccgacgcgcgcattttcgtcaccggcaatacggtgatcgatgcgctgctgtgggtacgcgatcgcgtgctggatgatgccgatctcaacgctcgcctggcggcgcgttacccgttccttgaggccggtaaaaagctgattctggttaccggccatcggcgcgaaagctttggcgaaggttttgaacgcatctgcaggcatgc

SEQ ID NO: 1370 - DNA, 442 bp, Zea mays
  Peptide Sequence Number=SeqID_14138
  Probeset Number=SeqID_15773
ttccccaagcgtaaagttccgttccagaagtccggccccaagttcaagaccccccgcccggtgttggcgttcaaggttaagaacaagtccaccttcgccaagcccggtgccttcgaaaagatggcccgaccggtgtccgcccgggtcgatcccgccggtccgaaggcccaggccgaaccggtccccgatccccgttccggaccaagcccgggtgcccgccctttcaataaggcatgccaagcccgccaccgcaaaacggtgccgaagaaggcgttcaacgtacggggaccgccaaaaattgccttcccagacgacaaggatccgggtcatgggctgttcctcaaaacccgatcgaaaggcagcacgatgaccctcatccagttcctcaacgtaatccggcgccgctgggcgtcggtcggtctcgccgtcgtcctgggcgtcg

SEQ ID NO: 1371 - DNA, 586 bp, Zea mays
  Probeset Number=SeqID_15774
gtcagtatgaacagattgtcagccagcagcagacgctggcgcagcgcgcagcggacgccgaaagcgccttccggcaggcattgctgctcagtgatttcgctgacgaaagcgccctgcgcgccgcgctgctggcggaagatgaggtgcagacgctgcgccagcggctgcaaacgctggagcagcagcatcagcagcacaccgcgctgcatgccagactggcgcagcggctgagcgatcatcagcagcagcgcccggccgcgctcagcgatgccgatgctggctccatcgccgcccggctggagcagctgcgcgtggcgctgcgtgacaacgcacgccagcagggggaagcgcagcagcagctgcacagcgatacccggcagcgtcagcagcagcaaacgctgctggcgcagatcgccgctgacgaagcggaactggcacagctaagccgcctcaacgatctgatcgggtcggccaaaggcgacaagttcctccgctttgctcagggcttaaccctcgatcatctggtgtggctggcaaaccgccagctcgatcgcctgcacggccgatatttactgcaggcatgcaa

SEQ ID NO: 1372 - DNA, 1188 bp, Zea mays
  misc_feature (1)..(221): n is a, c, g, or t
  misc_feature (822)..(1188): n is a, c, g, or t
  Peptide Sequence Number=SeqID_14139
  Probeset Number=SeqID_15775
nnnnnnnnnnnnnnnnnnnnnnnnnnnnnnnnnnnnnnnnnnnnnnnnnnnnnnnnnnnnnnnnnnnnnnnnnnnnnnnnnnnnnnnnnnnnnnnnnnnnnnnnnnnnnnnnnnnnnnnnnnnnnnnnnnnnnnnnnnnnnnnnnnnnnnnnnnnnnnnnnnnnnnnnnnnnnnnnnnnnnnnnnnnnnnnnnnnnnnnnnnnnnnnnnnnnnnnnnnnnnggagctcaaggctcatgtcgtcgcggccagcagcgcgatggccagcagcgcgaagcccagcagcgcggccaggaacgccgaacgcgcacgcgaaggccagcagcgcgatggccgccctcgccgcgacgaccgccgtgctcgggccggcacgggcttctccgtgggccgtgctttccgggccagcccggcacggatgggccggctcagtgccgtgctcggctggtgtaggcagccccgtcgggcggcacggcccggcacgattatctggccgggctcaaacgggccgggctcaaacgggccgggctggaacgggctcgggctgggccgggccgtgccgcccgtttggacatctataggtacgtggctccttgcagagttcccgacccgcacgcacgcaccttttttttttcacagccgacatgagtcttccattccaccctctgttctttgccgtcgatacggtctgctgataagcaggctgcttgctcgccccgccgcaggttccgggttcgtttcgtcggactactacctccacggcttcttcagcgcgtccatcaagctgcccaggggctacacggccggcgtcgtcgtcgccttctannnnnnnnnnnnnnnnnnnnnnnnnnnnnnnnnnnnnnnnnnnnnnnnnnnnnnnnnnnnnnnnnnnnnnnnnnnnnnnnnnnnnnnnnnnnnnnnnnnnnnnnnnnnnnnnnnnnnnnnnnnnnnnnnnnnnnnnnnnnnnnnnnnnnnnnnnnnnnnnnnnnnnnnnnnnnnnnnnnnnnnnnnnnnnnnnnnnnnnnnnnnnnnnnnnnnnnnnnnnnnnnnnnnnnnnnnnnnnnnnnnnnnnnnnnnnnnnnnnnnnnnnnnnnnnnnnnnnnnnnnnnnnnnnnnnnnnnnnnnnnnnnnnnnnnnnnnnnnnnnnnnnnnnnnnnnnnnnnnnnnnnnnnnnnnnnnnnnnnnnnnnnnn

SEQ ID NO: 1373 - DNA, 327 bp, Zea mays
  Peptide Sequence Number=SeqID_14140
  Probeset Number=SeqID_15776
atgttcggggggatccctgtcctctcgtcccgcggtggtctcgacggtcaggtgctcgacccggacaccctcgcctacaccgtctccacgttcgcgcagctcggctacctcggcatcgccctgctcacggtcgtgttcctggtgcggaccgacgggggacgccgtgccgtccgggcagcgttcgtcgtcgggacggtgttgagctccctccgtagtgcgatcgtcgcggtcggagccgacgggctcgagtggctgttcgacaagaaacacgaccgtgccctacagcctgatcggccccggagaccgggttcgtggcgtcttcaatga

SEQ ID NO: 1374 - DNA, 538 bp, Zea mays
  Probeset Number=SeqID_15777
atggatggctatcgtgccgatctggcgcgcaccgaaacgcgcattaagcaggcgcgcgagggcttcaaaatttatatggatcgcaaaatgaagacgccggctgacctggcgctcgacggtccgctcaccaccagcttcaatgcctatattgataaaggcctgaagccgatgatcgagtcggcgaaacagggcagctttgaagggattgtcgcgcaggagaccgatgtcacgcgcaagctggatgatgcctataatgccgtgctgctgaaggcgattaagatccgcaccgagcgcgccgaagcgattaacgccgaagcggcgcatcagtcgcgcgtcggttttatcgcgatggctgcggcttttgccgccgcgctgctgctggtgctgctcactttcgtgttcctgcgccgcgtggtgatcaatccgctgcgcctgtcggtgggtcgcattgagcgcatcgcgcagggcgatctcaccgcccccgagcaggcctatggtcgcaacgaaattggcagcctgctgcacaacctgcaggtcg

SEQ ID NO: 1375 - DNA, 407 bp, Zea mays
  Peptide Sequence Number=SeqID_14141
  Probeset Number=SeqID_15778
cccggtggttgatggggctggggacgctgttgtttttgacgttaaaggggcacctggggatgctgcgtttcgggaccgatagcttggttgccctgccagtcagcgatgccccgtttaagggccaaatctttctttggctaagtacctgggccgccgccattttcgcctccgaactgatgctatgcctgccggtgatgatggtgctgctgtgtatcaacctgacactcggtgtgctcaaccgctttacgccacagttgtcgatctttgtggtgggttttccgctcacgctgaccagcggcctggtggcgctgtgggtgatcactggcgctatcggtccgtggtttgaggcgctgatgggcgagaactttgcccggctggtgctgctggtgcaggggctgcgctgagtc

SEQ ID NO: 1376 - DNA, 483 bp, Zea mays
  Peptide Sequence Number=SeqID_14142
  Probeset Number=SeqID_15779
atggacgcgattaaacaaattctgatcgatgaaatcgacacgctcaaccgcgaagagcggcgcgataatctgccgcgttttagctttaacttcctgaaaacccatccggggctgtggggcgtgatgtacctgtgctacggcctgtgcgtggcgctgattttctcgactgagatgctcggctggccggccttctggttcgccacggtgttcgtgctggtgatgagttttctgatgctgctggacatcaacccgaaataccgcttcgaggacatcgatacgctggatctgcgcgtgtgctacaacggcgagtggtattacgtgcagccggtctcacagcaggcgctggacaagattctggagaatccgggcacgcccgagcgcgtacgcagcggcatcgatcgcctgatgcagcagaaaggagaagtggatttttatgatgtctactacctgacctggggccatcagcgcgccgcgaagatctga

SEQ ID NO: 1377 - DNA, 718 bp, Zea mays
  Peptide Sequence Number=SeqID_14143
  Probeset Number=SeqID_15780
gacactaggggatgaaagacgtgtggcagggtcctcgagtgactcgactgcttgcataggatgtggaagcattcgccatcagcttaccaagggtaatatgctggacatgatcatacacctacaataattttagaggaagtggcttcacacgatctatggacgtggcagtttttttggtctacctagatctcttaatgacattattgttctccgttgatcaccattatttgcaaagctatcaaaagaagctctacaagtgaattttagtataaatagccataactattcaatgggatactaccttgtagatgtcatatttccatcttaggctatattggtcaagaccattctagaaccatgagacagtaagaatatatattgtgcaacggcacaagaagaaaatgaaaggatgtggagtgaattcgtatggtttcacaatctcgtttcgagggccatctcgtctttgggtgaataaacattgaatgacataatgataactttgtataatcatgcatagcatgattgttgaagacagggaaatgtggatccatatgaatgttttgagaatgggaggaaacaatgtagaaccatcccacaagcataatgtagattttgaaaaaattattacaaaccacaagaacttaggaaccaaaaaactcacaagaaaattaggaacaaaaaactcactaccaactcgagaagactagtggagcactat

SEQ ID NO: 1378 - DNA, 406 bp, Zea mays
  Peptide Sequence Number=SeqID_14144
  Probeset Number=SeqID_15781
gcttgcatgcctgcaggtggagggcgcgtcgattgataagcaggatcacgccgccaacccgtgcggtcagattggtgaaaccgtcgatttagatgaggcggtgcaggtggcgctggcgtatgcgcgcgagcacggcgatacgctggtggtggtcaccgccgatcacgcgcacagcagccagatcgtcgaaaacggcactaaagcgccaggtctgactcaggcgctcaacaccaaagatggcgcggtgatgaccatcagctacggtaactcggaagaggattcccaggagcacaccggcacccagttgcgcatcgcggcctacggtccgcacgcggcgaatgtggtcggcctcaccgatcagaccgacctgttcttcacgctgaagcaggcgatggcgctgaagtaa

SEQ ID NO: 1379 - DNA, 576 bp, Zea mays
  Peptide Sequence Number=SeqID_14145
  Probeset Number=SeqID_15782
atgcatgcaggcgcacaggcaacctcggtgctgcgcggcggcgccgacagagtgcggctggtgccgcacagcgtcgacagggcaccactggaggcgaacaggcatctggtgctgctggagctcatcgacacgtcctcccccgccgagcgctcggggctggatcttgtggccgtcctggacgtcagcgggagcatgtggggcgacaagctcgataagctcaagaccgccatgaagttcgtcatcagcaagctcggctccatggaccgcctctccatcgtctccttctccaacgacgctgcgaggctgtgcccgctgcgctccatgactggtgacaccaaggaagagatggtgaagggcatcgtcgaaaagaagctacatgccggcggcggcaccaacatgagggccggcctcgagactggcctcagggtcctcgccggccgccagctcagcagtggccgcgtcgccagcatcatcctcatgtccgacggccaggatagccttcacgaacctagggctgtcgataccagcggagtggcagtctacacgtttgggttcggtgcagaccaagacgcggag

SEQ ID NO: 1380 - DNA, 306 bp, Zea mays
  Peptide Sequence Number=SeqID_14146
  Probeset Number=SeqID_15783
gcaaggtccttttgtgttgatgacaacgacttggaagatggtaagtcctcaaaagaaagggaaagctctgcacagttactcaggctcccaaagattcagaatcaggctctcctatctggtctggcttactgtgtatcatcatgcagcatgattttagtcaacaaatttgttttatctggctatgctttcaatgcgccagtatttttgatgttataccaggtatactactggtgcttactttccatttctcatgcaacacagttgtgtgcctgccttaaagcatctttttcatgttctgttactgca

SEQ ID NO: 1381 - DNA, 596 bp, Zea mays
  Peptide Sequence Number=SeqID_14147
  Probeset Number=SeqID_15784
gatcggtggcggtaaactggtggccctgggcggcagctggtacttcctcattgccggtatcgtcatgttactgtcggcgattcagttctttcgccgtaaatcctcggcggttacgctgttcattctggtcttcgccggcacgttgatctgggcgctgtacgatgctggctggcagttctggccgctggtgtcgcgcctgatggtgccggccggcctgatggtgctggcgtttattacctggccggcgctgcgtaagcgtgaaggcaaggcctcgctggcgaagctttcgtatgcgctgtcagcggtgattgccgttggtatggtggtcacctttgtccagatgttccagccgcatccgaccgtggccttcaccggcaagcaactgccgctgatcccggtagataaaagcaaaccgcagcaggactggagcagctacggccgtacgccgcagggtgaccgttttgccgctatcgaccagattacccgcgacaacgtgaaagacttgcaggttgcctggacgtttcataccggcgacacgccgatcagcccgaccggtaacggtgcagaagatcaggaaacgccactgcaggcatgca

SEQ ID NO: 1382 - DNA, 228 bp, Zea mays
  Peptide Sequence Number=SeqID_14148
  Probeset Number=SeqID_15785
atcggagaaggtgggtttgggcgtgtgtacaaatgtactctccagaacatgacgttggcaataaaggcgttgaaatctgatggtttacaggggcaatcacattttgagcaagaggtaggccaactctcgcagatgatgcacactatagtgtatgctctactatcacacgcatacaaactgtaacgattgcatatatatgagcacctaggggctgtggaaaccttccaa

SEQ ID NO: 1383 - DNA, 461 bp, Zea mays
  Peptide Sequence Number=SeqID_14149
  Probeset Number=SeqID_15786
atgtctgacggctggaatattgcgctactgggcgcgacaggcgcagtagggaacgctgtactggaactgctggcggaacgccagttcccggttggtgagttatatctgctcgcgagtgaaaacagcgccggtgaaaacgtgcgttttgatggccgctcgctgcgcgtgcaggatgcggcggaatttgactggtctcaggcgcagctggcgttctttaccgccggtcgcgaggcgtcggcgcgttatgccgaagaagccgccagccagggttgcctggtaatcgacagcagcgacctgttcgcgctggagccggacgtgccgctggtggtgccggatgtcaatccacaggtgctggcggattaccgtaatcgcaacatcattaccgtggccgatgcgctggtgagccagctgttaagcgccatcaaaccgctggtggataccgccggtttaggccgtctgca

SEQ ID NO: 1384 - DNA, 747 bp, Zea mays
  Peptide Sequence Number=SeqID_14150
  Probeset Number=SeqID_15787
atgcgcttcgtcgccggcgtcaccccggagacacgcggttcctcggccgaggtttacgatcagttcaagctgcgcggcttcgacgcgccgatctacctcgacgggctcaagctgttcaatagcgccagcggctatgccatcccccaggtcgacgtgtcgcggctcgaccggatcgagatcgtgaaaggtccgtcctcggcgctctacgggcagtccggccctggcggactcgtcgtcgaggacagcaagctgccgctcgatcgcgacttctatggcgcagtctcgggaacctacggcaattacgatctctatcgcatcgatgccgacatcggcggcaagatttccgatagcgcgcaatggcggctctacggcagcgccaacggtgcgaacgcacagcagacttacggccggcgcgaacggcagaccgtgtcgggcgccatcacgctgggttcgggcagcaccaccagcctgaccgttctcgccgcctattcgcacgacccgcgcaacggcaattacggcgtgtttccggcgctcggcacgctgatccccaatcccgccggccagatttcgacgagcttctatggcggcgagcctgatgacttcttcaagcgcgagcaactgggcctgacctacatcttccgtcacgatttcggcggaggctggtcgttccgtgcgctcgggcgctatcagcacatcagcagccggctgggcatcgtctatacgggcggctaccccgtcgattcaccg

SEQ ID NO: 1385 - DNA, 368 bp, Zea mays
  Peptide Sequence Number=SeqID_14151
  Probeset Number=SeqID_15788
tacacaataaaattatagagtttgggatctaaaatgaatggagtgatgcatctatccgtcatgtcatatgaattggggctacatttcttttcaattttcattcaagagtttctatctgcttccatgccctttttttgagacctcgaaacatgaaatggacaaattccttctcttaggaacacatacaagaaaaaggataatggtagccccccattaactaatttatgaatttcatagtaatagaaatccatgtcctacccagacagaatttcgaacttgctatcctcttgcctaataggcaaaggacctctatagaaagactaattcatttggatcgatctaccatacagaaatgaacaatgcacatt

SEQ ID NO: 1386 - DNA, 299 bp, Zea mays
  Peptide Sequence Number=SeqID_14152
  Probeset Number=SeqID_15789
tgccttgtaccgtttatgacagtgactctcaagacacgggaggatcaccggaagcagttctagcttgaggaggcgcgcaaggtggggcttgcgcctgcgtaggtcgatgatgatgggaactacatcaatccccatatcccccagtacatgtcctcggccccatggtatcctaatgctgagaatccgagtttgaagcatcatcgtaagtgtaagtcagatccgacctacaccgagtcgtggtatgataggggtgtgaagcttttccagtccaacaagtacagtaaaggtgcctgtgagaa

SEQ ID NO: 1387 - DNA, 414 bp, Zea mays
  Peptide Sequence Number=SeqID_14153
  Probeset Number=SeqID_15790
atggaggttaaggtgctgagctccaagctcgtcaagcccgcttacaatgccggtgcgggcccagcgccggcggccagcgcggatgagtacactcccctgaccatcttcgacgtggtcacgtacaagatgcagatggccatcatctacgccttcccgccgccggccccatcgacggcggccatcgagaacggcctggccgcggtgctggccgagtaccgcgcattcgcggggcagctgggcgaggccccagacggcacgcccgcggtgctgctcaacgaccgcggcgcgcgcctcgtggaggcggccgtggacgcggacctcgtggacatggcgcccgccaagcccacaccaaagctgctccggctgcacccggacctggaggaggaggagctccaggaggtggtgctcctgcag

SEQ ID NO: 1388 - DNA, 451 bp, Zea mays
  Peptide Sequence Number=SeqID_14154
  Probeset Number=SeqID_15791
catagagcccgcgcccggggaagaaacgacggcggacggaaaagggccagacccaaagaccgactgaagaggggcctgaacgaacaagataccgccactgcgggcaacggacccggggacagagccacacgcgcgccaggggtggaggagccacgaaccggcgcggcgcacgcaaaaaccgaccaaggcgagcgccacggcatccaaaaggaaagggacaaggggaacaaggacggcaccacggaagtgggagggaccaagaaaccaaaattgggagcacacgcacaagactacaggggaggggcggacgagcgtacacacggcgcactcgattacaccagagaggaggaagacgtaaacgcacaaacagggaggcgcgggagagaccgccttgccgttggcgccgaagcaatctacaacgcacgagccgaaacatgcgaaaacaaggggc

SEQ ID NO: 1389 - DNA, 303 bp, Zea mays
  Peptide Sequence Number=SeqID_14155
  Probeset Number=SeqID_15792
gcaggccacctggtacgggatcgaggaggctgccaacgaacacaagcgtgagacacagcgagtgaggcgacccaccagcggcaagcccctgccggaccaaaagcagaccctcagcataaagagacaaaggctatcctccaacaacacgcgcgacagcaaggcgcccagagagagagagaggccggacgaaagcgctgccgctaagcgcggggaggacgagcagcacgcccacgcccaccagcaactgagcctagggctcaggcggagtaaagccaaaccagagcgctacggcgggcagggccc

SEQ ID NO: 1390 - DNA, 442 bp, Zea mays
  Probeset Number=SeqID_15793
ctaccagtaccagggaagaggcgcgctcagggagggggagcagccgcgcacccagggagcaggcgagcagcagccacgcccagggagcagcagccgcgcgcagggagcagccgcgcgccccaggcgagcagcagccgcgagcaggcgagcagcagccacgcccagggagcagcagccgcgcgcagggagagggagcagccgcgcgcagggggagagagcagccgcgcgccccaggcgagcagcagccgcgcgcagggagcagcagcggcgcgcagggagcagccgcgcgcagggggagagagcagccgcgcgcacaggagcagtcgcacgcgcacaggggaagttgccgcgcgcgcacagggggaagttgccgcgcgccaaaagcccaaagcacgcgccaatttgggctccgcgcgcggtgactaaggccagcaaaccctag

SEQ ID NO: 1391 - DNA, 375 bp, Zea mays
  Peptide Sequence Number=SeqID_14156
  Probeset Number=SeqID_15794
tgcaggttaacattgtgctcaccgcgctcaccatcggtgcggccaccactatcatggcgaccaccggtgtgctggacagacgctttatcggtccggtaatgggcaaatgggcggaagtgctgggcggcgtggtactgatcagcattggctgcaccatctaagcgctccgccagaaaccctcgataatcgcggtcagggatcgacctgtggttatcacccggcgccgttcccctctgcgcacctcgcttttccgtctggcttttgataaccaggcaagaaaaagttatggcatcgtgcaacccgacggcgtgatcgatctcagtgcgcggctgggcgacagctgtccggatttgaaaactctgctgcaggcatgca

SEQ ID NO: 1392 - DNA, 722 bp, Zea mays
  misc_feature (1)..(121): n is a, c, g, or t
  misc_feature (722)..(722): n is a, c, g, or t
  Probeset Number=SeqID_15795
nnnnnnnnnnnnnnnnnnnnnnnnnnnnnnnnnnnnnnnnnnnnnnnnnnnnnnnnnnnnnnnnnnnnnnnnnnnnnnnnnnnnnnnnnnnnnnnnnnnnnnnnnnnnnnnnnnnnnnnnngccacgtccgtcccaaaaacgtctccctcctgttcagcatggccgagtggatgaaggacgagcaggcgccctccgtgtcgctctacgagacggtgaaccgcaagtgcatgtgggcgtgcgtagaagacgacgccgcgaacagagcctgcttctacgagagcatggacgccgacacccgcctcgtcatgcaggccgtgatccgcaagtgccctgccgtcttcgacgacggcctcacgtcgctcgtcgacgtcggcggcgcccggggcacggccgcggcggccgtcgtcgccgccttcccgcacatccagaagtgcaccgtcatggacctcccccacatcgtcgccgaggctcccgccggcaccggactgtgcttccacggcggcgacatgtttgagcacatcccgtcggctgatgcagttatgctcaagaatatgaggttgttcacggtctctactgactccacggtgagtttggcggtcggctggctgttgacgaggatctggaaggcgacggtgagcagcgagccgcctgtcttgtgctcggcgccgacactgcttgggccatcaggcaggatggcgaacccagacggcagcagagcaan

SEQ ID NO: 1393 - DNA, 476 bp, Zea mays
  Peptide Sequence Number=SeqID_14157
  Probeset Number=SeqID_15796
atggtgctctgtctggtaaaggtggaaggcaacgatcggaacggatcggtagtcatcggagtcatcaacaccgcgagctgcgccaagagtaggcatcatcggttggagagaagtttcgttcgcctggcgttgccgcacgggagcgggttcaggatgaacagtaggatatcgttgagcagcgcacggatcatatccccctcgtactgcccgcacccactgtcgtcgccaccgccatcttcgtcaccgccgctggctatattcgacgcacaaagggtttcgaacggtcgccggtttccacagtatatgcaaagcaccgcccggaattcctcccaaatgtcacacatcgtcaattcaacgccgctgcctcgaaaccacctccacatcggttgtgttggatctttcccggggttcgagatctccgtgttggtcgccgatctcgttgatttcgagattgccgggcgcacccagacacggag

SEQ ID NO: 1394 - DNA, 285 bp, Zea mays
  Probeset Number=SeqID_15797
ggccgggctcatcggggctggtgtgggacgtcaagaacttctcggaggagatcaagccggcggtggcgccggaagacggcgggggcgcggcgcacagtcgctcggctgggtacaggcacagcggggtacaaggccacggggcgcgtgccgcccgcgctcgccccgccgtcgccgcgcgtcgccgtgcttgttttctgctggctcttcggcggcggcggcaaggtcaaggccaagggcaggggcaggggcggcggcagcgccaaagtcaaggggaggctccactga

SEQ ID NO: 1395 - DNA, 678 bp, Zea mays
  Peptide Sequence Number=SeqID_14158
  Probeset Number=SeqID_15798
atgccgcatcgcgaggtgcgtatgaaccaccaggcgcatcgctccgtggtgctcgatatcgactgctcggtggggccgctgccgggcggcctcgtgctgccgctggccggatggcaggaggcgatccgcttcggctgctcgctggcgaccatgcgccgcttccgcgcgctgctggatgcgcaactgcccgaacgatacggcaccgtgttcaccggctcgggcgacttccatcacctgtcctggccactgatcgcacggctgaagcccgcgcagccaatccaggtggtggtgctggacaaccatcccgacaacatgcgttttccgttcggcgtgcactgcggctcctgggtgcgccgcgtggccgcgctgccgttcgtcgagcacgtgcacgtgctcggcatcacttcgtgcgacatcggcgcaggccacgcgtgggagaactacctgactccgctgctgcgcggaaaactgagctactggagcatgggcgtggataccggctggtcgcaccggctgggcatcgcccgcgcgttccgcggtttcgacacgcctgatgcgctggtcgatgccttcgtcgagcggcagcgcacgcagccgctgcccacctacctcaccatcgacaaggacgcgttcgcgcccgaggtggcgcgcaccaactgggaccagggccgcctgcag

SEQ ID NO: 1396 - DNA, 531 bp, Zea mays
  Peptide Sequence Number=SeqID_14159
  Probeset Number=SeqID_15799
ctacgaccctactcccttcccttcccagccgtcccggccgcccaccccactaccccagccgccactcccagtcatcccagccttccctggaggccaggatcccagcaccccacgcggccacgccggcacgcggcactgcgatagtcctaggcccccagccacgcgcccccgcccaggctcccaggcggcggccaggccccagccccgcgccctcgaccagtaggcagcagcccgctgccccgccgctgccatccctaggccagagatgtctcctccaaatatacgggcgacgtagatggggctcggtgggacgcaggacgagtctggaaggccccgcgacggatagaactctggggcgaggcactttccaggatgatttacaggccaaaggttcgtgtccagcttcgtcctccgcttgttcctatctcgaggggcctctggaggcacggggttctcgaggtacagcggagatgctccgtggatgacgtcttggcagaagggtaggctcctagcactctgcaggcatgcaag

SEQ ID NO: 1397 - DNA, 580 bp, Zea mays
  Peptide Sequence Number=SeqID_14160
  Probeset Number=SeqID_15800
tgcagttgttgtatggaagtgctgaaaaccaaatttttacaaggccttgtgcacagttgggatcctcccatagtgattcttattttctttagatgtatcacaagaggaaatggtgataataaacagatacggagagatacttgttggtgttttgcatgaagttggatctaaggaccttgtagtgttgtgtcacagatttagatcatcaaaggaaggtagaattatgttaagtctcgctgatgcattaacatcagaaaatgtcagcatatgtgttttgattattctggtaatggagaaagcgaaggtacttttggataaggctactataacgaagtggacgttttatgtgatgcgatcctgcatttcaaaaacacaaacgtgacgcccatgctattgctggccacagtaaaggagaaaatgtggttatcctttatacatccatgtatcacgaattcacggtatatctaaagctattaacctttctggaaggtttaagctggaacgtagaattggagatcattccgtaaatgattacatggaaaggattaatcagcatggtttcattgatgtggaagacaaa

SEQ ID NO: 1398 - DNA, 525 bp, Zea mays
  misc_feature (407)..(407): n is a, c, g, or t
  Peptide Sequence Number=SeqID_14161
  Probeset Number=SeqID_15801
atgacggtcagcgtgccgtcgcggaacttcctgcgccagggggtgcccaccggcggcgtgatggacatggaccagaccggctcgaacctgttcctgccgacgatcgtcttcgcctcggttaccgacccgctggacacctccaccccgccggtggccggagtggacctgggctcgaccccggccgacgacgcggccaagttcttctacccggtctcggcctcaaccaacgacccgaacgccaccgcagactctttctacgactcctcgcccacgccgtccccggctccgaccaacgagaccgtgcccggcacccgacttccgtccggctacgtcgtccagccgtccggcggcgtcaaccgtccgttctatgaggaggtgactaccctgagtacgcttatttaccagcnccgcgtgatggcgatgatctcgatcagcgacgccaacggcaacaacgagcgtgtcatcgacatctccgaggacctcgacgccgggaacatgtcctgcgcaccgagggcgtgcacacct

SEQ ID NO: 1399 - DNA, 617 bp, Zea mays
  Probeset Number=SeqID_15802
tgcaggcgatcaaacctggcctgatggactcactcagtatgatttttaccggccacacgctggccggtgacaccatgcagcagttgcagctgggagtggatggcgtgagccaggccacgccgctcgatacctttaaaaccggcctgcgcgccggacacagcgccgaacagctggtggcccagccgatttacggcggcgtactggccggcctcggctggcagtgggtcaatctcggctatctgctcggcggcatgctgctgctggcgaagaacgccattcgctggcatatcccgttcagctttctgctgtcgctggcgctgtgcgccacgctcggctggctgttcgcgccgcagtcgctgaactcaccgctggtgcatctgttctccggggcgaccatgctcggtgcgttctttattgccaccgatccggtcaccgcgtccaccaccaaccgtggccggctgatttacggtgcgctgattggcctgctggtgtggctgattcgcagcttcggtggctatccggatggcgtcgccttcgcggtgctgctcgccaacatctgcgtgccgctgattgactactacacgcagccacgcgtgtatggacatcgcagggattga

SEQ ID NO: 1400 - DNA, 209 bp, Zea mays
  Peptide Sequence Number=SeqID_14162
  Probeset Number=SeqID_15803
tatgggccttttgctcgcccaccggggagggagggcggccgcaaacggcacctgcgacggacccggctggacgaacacgacggagactatggcggctaccccgcaggccacccgcaagcacaacaaggggggcccgggccgccggcaggacccataacccaactctcagaccagcgcccggcggacaagacacccggccacagacaaac

SEQ ID NO: 1401 - DNA, 531 bp, Zea mays
  Probeset Number=SeqID_15804
tgcaggatgaagtccgcaacttcccggtacagcgctggcgtaaaaacctggtgctggcgtgcggttcgctgctggtgctggtgatgctggtgagctggattccgctcagcatgccgatcaaacttagcctcgcctggttaaaagggactgagagcgtggaagtgaacagcgtcgataaactcactgccctgccgctgcacattggcgatagcctgaaagtgagcggcaccggcatgtgctcggttccgggcaattaccagagcaaccgcagctacggctacatgccgttcgactgctcggcgatttactggaacaacgctgcgccgctgccgctgccgcagtccgacatcatcgacaaagcctccgcgctgctggagaccaccacgcagcagctgcatccggaaaccaacaccgacccgaaacttaacccgcagctggcgtcggcgattcagaaatcaggcatgatcctgctggatgatttctccgatctggtgttgaaaacccagcagctgtgcagccagcagcaggact

SEQ ID NO: 1402 - DNA, 350 bp, Zea mays
  Peptide Sequence Number=SeqID_14163
  Probeset Number=SeqID_15805
aggcgggggaaccacggcggagtcctttttttttttttttttttttttttttttggtttttttttttttttttttttttttggaggggtttagaaacagcacttatttgcaaccgggatacagatcaagtaccacattggtagcaacacagggggaaccatcgggagccatccaagggaacatagcattatacagggggtccaggcctaacgaggcaaaaaggagatctagttccaaaacaaaagaccgcctatgccggcacaaatcccaaaactggttagcttaggaaattcagatctcccgggggctccgcggtggcaccactgcctaagggcgaattttggtgatat

SEQ ID NO: 1403 - DNA, 248 bp, Zea mays
  Probeset Number=SeqID_15806
tcagcccctctccggcgcgttcaggggcgcgtgcgtgggcgacaggaaggtctccacgtcggccacagtgatgtcgtgcacgagtccgaagcgcgagtaggcgaagccgccgcccgccggtcgcacggattcctcggcgggcgggacgggcatcgagaccagcgagtcggtggcccaggaggcgttgcggtcggtcatcagttgcctcccgaggtcgacgggacgttgccggacgaggcgtccgagta

SEQ ID NO: 1404 - DNA, 376 bp, Zea mays
  Peptide Sequence Number=SeqID_14164
  Probeset Number=SeqID_15807
atgcagtatttcatggctgttcgcggtcttgaaagacagttcaaggggttctcagtaagcatgtggcccgcgccaggtaacgaagaggagtacatgttgtttaaggcatcggccaaaggcgagacggtgccctctttcgtgttccaggacgtcattgggttaccagctgtccgcaacccagaaggattacaagtaagtaatgatgccgaaggccatagcatccgtctccctcatcatgcatgaggattggcgggccgtaataactttgtatttgcaagcacattgcctcccaagttacgcccatcaggacaacaccgcaagcgcggaagctgaattcccaagtccggggcagggggatcttagagtgactgcagca

SEQ ID NO: 1405 - DNA, 516 bp, Zea mays
  Peptide Sequence Number=SeqID_14165
  Probeset Number=SeqID_15808
cgttatcagcggctggcgctggcctgctcgctggtgctggcgttggggatcggcagcctgtccggctggcagatgactgaacgcttacagaatcatccgttaccgatggaggatgcggtacaggcttaccggttattcggcgatggcgcgcagcaggcgacgatggacattagcacccaccagacgacacagctggccagctggctgggccgctattttatcaacggtacgctgccgcccaatctggagcgctttggctatcagctcatcggcgcgcgcctgatggcgaatgagcatggcgcttcggcgctggtgctgtatcagaccgccagcggtacgcgcgttggctggtacatccgcccgcagaccgtgcggctggaaaagggatcgcgccaggcggacaacctggtggcgcaatactggagcgatcgccactataactatgcgctggtgagcccgatgagcggcgaagccgcaccggcgctgcgtgctgcgataggcagcgaagtgggctaa

SEQ ID NO: 1406 - DNA, 220 bp, Zea mays
  Peptide Sequence Number=SeqID_14166
  Probeset Number=SeqID_15809
atgccgaatacggtagcgagagtcctcggcgatgagctggagcctgtgtctccgcaccagcaggcgcaggagactcagtcggtggacgatcggcgcctgctgcgctcgcagtacctcgccgtaaagggccttatcagcgacgataagaatagaatggcgagtgcggactttgataagttctgctccattatcaacagagtggatagcttgccccagcttg

SEQ ID NO: 1407 - DNA, 527 bp, Zea mays
  Peptide Sequence Number=SeqID_14167
  Probeset Number=SeqID_15810
cgccgtccagggtcacgccagcgtccttgatcggggtcaggccttgggtttccacggcctgcggcaccacattgccgtgtgctcaggccgtgccggtcagcactgcactggcaagcagcccggcagccagcaagacaggccgtgtcgccatcttagaaacagcccgcaagcggccgaatgctgctttggtggccgcgccttactcccttggtagtagggcttgtggcgaagggccaaatgaggtgccctgcgggaattattcccggcaagggcgggacattttccgtatccggcgacgcccgtgccgtcccaccctgtgcaggccaaaacctccactgggaactgcaaccatgacaacaagaacgctacccgccctttcccctctggccccgagcgtgcgggccttgctgctggccggtagcctggccctgagcaacgcggccatagccgccaccgccccagccgcacctgccggcaggaacgtgacctgggaagacatcgccaacgaccacctgaccacccaggac

SEQ ID NO: 1408 - DNA, 394 bp, Zea mays
  Probeset Number=SeqID_15811
atggtcgagctgggcgagctgaggaagaagaagcgcgcgcacggagccaagctcgacaggacgcggcgactaggaactctagccgggcgagctcgagcagagggccagaggcgcgcaggctgggaacacggcagggcgtacatcgcggggaagatgagtagaggaaaggagagatccgtgcgcagggaagcttcagggaggaacttgacggcggccatggcagagaaggagttcgacgaaaatgagcgcaccagccacggtgagcagaggctgcgcgcgacgggattttatccccgagctaaagcagcacggcgtgggaaaagaagggatcaagggaggctgggcacggcgtgctgggagataagcaccacgcgcccaaaagatcaacagaacg

SEQ ID NO: 1409 - DNA, 405 bp, Zea mays
  Peptide Sequence Number=SeqID_14168
  Probeset Number=SeqID_15812
atgccggataacggcatcagcggtgaagtgattgatatcgctttgcataccattaccatccgcaactgggacaatacgctgtcgcggatcccgaccaaaaatttcctgaccgaaacctacaccaactggcaggcgatgttctcttccggcgcgcggcgtatcatgcgcagctttcatctcgaccagacctcgattcgctttctcgatcagcaaatggtgcagcagatgagccagattcgcggcgtcagtgagcagctttcaatcctgatggatggccgcgatagcagcgtggtcggtgaccgctggtttgccgaaaacggcattaccaacctcacggtgttccgtcactatctcaccgcctggctggcgcagcgcgacgatattaaaaaagatatgtatatcgtg

SEQ ID NO: 1410 - DNA, 288 bp, Zea mays
  Peptide Sequence Number=SeqID_14169
  Probeset Number=SeqID_15813
aagatggcagataaaccggcagtaaccattcactattgtacccaatgtaactggctgctgcgttcggcgtggatggcgcaggagctgctgcatacctttgccggcgatctcagcgcggtcacgctccagcccggcagcggcggcgtgttcgagattagcattgatggtcaggtaatttgggaacgcaaacaggaaggcggctttcccgatgcggcagcactgaagcagcgggtgcgcgatgtctgctggccggatcgcgaaccggggcaagtggacaagaagaaaccg

SEQ ID NO: 1411 - DNA, 227 bp, Zea mays
  Peptide Sequence Number=SeqID_14170
  Probeset Number=SeqID_15814
atgtggaggcagcaggcaggcaggcacctactgctcatagcatgggccatctttgacgtgcgtgcgagtgagcgacgtgctgccctgcactgctccccggcgttggtctggtcagcgtatttatcggcggcgcccggcggtccggtagtgcagtactatatggcagcgacagccaccgatgggaacggcgccacgggattcaacgcccgccacagtaccactgcaag

SEQ ID NO: 1412 - DNA, 514 bp, Zea mays
  Peptide Sequence Number=SeqID_14171
  Probeset Number=SeqID_15815
tcggtaccctgctcggcgcccctccctgcgtagctcctcccatcctgcgcccttccctactccacgggcgcgagctccaccccttgcaatggacgccgcgcgagctcaccccatgggcgcgtcccctgctccacggcaaccagcagggagctcggtttcttctcccatggcgccctcctctcttccttcgctgttccagatcggcatcagggcagtgcgcgctaagctctcccagccgtggacagcaccctccctcggattccctgctcgccccagccttgggccatcgcgcagagcgccgtcgggcctcttgagcgcgctctccagtgcccaggcgtctcccctgctatatcctccccatggcgataagcatcagctccattcctacatggccatggcgcccccctgctctccccttggccgcggccctctctgcccgcgcgcaaagctgctggccagagcacggcatggccggatctctgctcccctagctgagcgcccctgctgcgtgtag

SEQ ID NO: 1413 - DNA, 600 bp, Zea mays
  Probeset Number=SeqID_15816
ctcgctcaccctgccctaccccgtcgctgccaccccatcgattcgtgagatctgccgctcaggtttctccctaggccatcgatgccttgtcgtacgtcgtcgactaggtttgccccttttccttgcccttcttccgcattctgatgtcctccccgccaccctgcaccacctccctcagtcgccttccccattcgcaccttgtcagggatcaggttgtccacttcccagcctccctccccagtctacatcttcccctgcacacccattacaaacgagggagacaagtaccatggctttttctctcagggatcgattactggaaacgatgatcccactgattctgtcaacgacagactacccatctttcgatcgtcctttgctcgcacatgatcggcaacgggaaaccttgacctcgattttcagcaatcagcatgctaccttcccctaccttggcttgtactccggattacttcaagcccgaagcagacatagcagaccagggacttcccctatggccctaacaaatgcgtgttggagggcgtggcagagccaggcaacccaactctacgggaaatggattttttgtggaaggtgcggatg

SEQ ID NO: 1414 - DNA, 616 bp, Zea mays
  misc_feature (584)..(584): n is a, c, g, or t
  Peptide Sequence Number=SeqID_14172
  Probeset Number=SeqID_15817
ctgcaggtcaccgtgctcatggcaggcttgctcaaggacccggagatcgcccttgattcgcttgcagtatgcatgtccatatcaggatgggtgttcatggcgtcggtaggattcaacgcggctgctagcgtgagggtgagcaacgagctcggcgccgggcaccccaaggctgcatccttctccgtcaaggtcgtcacgattgtgtcgttcacggtggcgtcgactatagccgtcgtcctcatgtgcctccgcgactacctcagctacgtcttcaccaaaggggacgacgtcgcgcgcgccgtgtccgccatgaccccgctgctcgccgtcaccattgtgttcaacggaatccagcccgtcctgtctggtgtcgcggttggatgcgggtggcaatcgttcgtggcgtacgtgaacgtcgcgtgctactacggcgtcggcatccccctgggctgcgttctgggattctactttgatcttggtgccatggtaatgaagaagtcgcgtacatatcttccatttattatttacagtatacaaaaacctcacttattttatttctcttgcgtatatttcatagtaacaangtttatatgaaccaaattagtaacatatatcg

SEQ ID NO: 1415 - DNA, 517 bp, Zea mays
  Peptide Sequence Number=SeqID_14173
  Probeset Number=SeqID_15818
ctgcagttagccaatggagcattgtgcaggctgactggctccgacgcggaggccgcgccatggagttgggagctggactccggtgaaagccatgtctatgcgcgtcaggatggccaaccgtgctacctagctaggccggtacccaaggggccctgagcattccgcaactaaagcgctggcactacgccgaggtcggctagggctggcacactcagttgttgcatagcgaggaaagcatccccgccggcgaggcattgaccttgcagttgcaacacttggtgcggcttgaccggtgtgaacaggcgccgctgatcgatgccgccaacggaggtcgtaccctggcgctgatcgaggcgatccgccaggcatcggaaactggccgggcctgtgctcccgagcacattgcctgacttgcctggtgacgataatgactgatcgaattgtctccctggcggacctgacggtactcgagctgccacccccggacatgggctaggcagcagcccgcgccgtgttc

SEQ ID NO: 1416 - DNA, 576 bp, Zea mays
  Peptide Sequence Number=SeqID_14174
  Probeset Number=SeqID_15819
atgtccgtactagtgatgacagtgataatatcatagtgcttgtgagaactgactattctctcagtgcatcagaccttggcaatcatttatttaactggacatgaacttctttcactgcaaactactatgtgaaatacaagcaccctgacatgcttgatcagtcatcttgcctgcaaggagacattccatgcattagaactgagggtttgccacttgctttacctgatttaaattcagctaatgtaattgtcttgaaagatgcgaccccttttgtttctatgcatggttctgatgctttgtaaccatgtcaaaccccaaggaagctaccaaacactggtgggaagtcaaatatactattggatgattctcaaaatcaaactcatgatgttgctcgatctcatgccatctctgccgatcctgaagctaccctaaaccccactaggaacacttgtggatggctataccctttgtttaccatatttttgatcactggctatctggtgagcttgatatctgcaagcaagtcatgcaggcagtttatgattcaacttatagagccattcacgcacaacaaga

SEQ ID NO: 1417 - DNA, 496 bp, Zea mays
  Peptide Sequence Number=SeqID_14175
  Probeset Number=SeqID_15820
ttccttcgccggctcatggtggccactggccaggctgtcatcctgttctataaagcgagccgaggggaagagccggaaccctagcccagcaccgcagaggcgcagagacaggcgtcttcgtactcgcctatctccgcgactcaaagcttcttccatttcctaccgccgccgctgcagctccaccccattccgtcgacaccatgagggagtgcatctcgatccacatcggtcaagccggtatccaggtcggaggggggggctgggagctctactgcctcgagcatggcattcaggctgatgggcacatgcccggtgacaagaccattgggggtggtgatgacccgttcgcccccttcattggtggcgttgatcgccgggacgcgaaatcctcgcgctatcaagagcaggcattattgcggcggcatcggccgataagagagagggttgcgcatcatgagctgggcataatgtggaagggtgaatattaaggatagga

SEQ ID NO: 1418 - DNA, 1152 bp, Zea mays
  misc_feature (1)..(328): n is a, c, g, or t
  misc_feature (1088)..(1152): n is a, c, g, or t
  Peptide Sequence Number=SeqID_14176
  Probeset Number=SeqID_15821
nnnnnnnnnnnnnnnnnnnnnnnnnnnnnnnnnnnnnnnnnnnnnnnnnnnnnnnnnnnnnnnnnnnnnnnnnnnnnnnnnnnnnnnnnnnnnnnnnnnnnnnnnnnnnnnnnnnnnnnnnnnnnnnnnnnnnnnnnnnnnnnnnnnnnnnnnnnnnnnnnnnnnnnnnnnnnnnnnnnnnnnnnnnnnnnnnnnnnnnnnnnnnnnnnnnnnnnnnnnnnnnnnnnnnnnnnnnnnnnnnnnnnnnnnnnnnnnnnnnnnnnnnnnnnnnnnnnnnnnnnnnnnnnnnnnnnnnnnnnnnnnnnnnnnnnnnnnnnnnnnnnnnnnnagatggtcgatgcattcatggcagtgaggcctcttcccaatatgtttggctgagcatcacggcgacaacttgaacaaacatttttgttatcagggagaattttaagagtctttagaattgtcgtgccaccataagtatcccctgtgttttacttcttcgggatttaggcaaacctggccaaacatcccatgtggctggctgtggttgattttgtaaactcatacttgatatggtatcaatgattcaattcagacattttttttcaagcaaaaaaaaaaaaaaaaaaaaaaaaaaaaaaaaaataaaaataacaaaaaaaaagaaaaaaaaaaaccacacatcggtgcacgatcgatgacgcagtgctctattatagagaaggaggccgttaacctgtccctggagaacctcaagacctaccccttgcgcaaggatggactggccaaccggacgctcaaactggtcggcggccactacaacttcgtgtcacgggagtacctcacatgggacaataagcagtcatcgcgaatgtatatatatacactacatgatgcatgttcgtattcagcatgcaggtacatacatatatatatagccggatcacccactgcaatgtgtgaatgtgcattgtgtaataagcaataccatatattctaccattctaccgctttttattttcttacgccgagcattcatgtactgtgtattttatgatgaccgccctgtgctagtcaaaagacatctgctatggaaaaaaaannnnnnnnnnnnnnnnnnnnnnnnnnnnnnnnnnnnnnnnnnnnnnnnnnnnnnnnnnnnnnnnn

SEQ ID NO: 1419 - DNA, 461 bp, Zea mays
  Peptide Sequence Number=SeqID_14177
  Probeset Number=SeqID_15822
ttacacaatgacaagccacgaaacaccacccccgacagccagaggcacagacaaaaacggccccaccggcacccggcacccggaaccaaacaggctgaccaaccgcagcacccgaacaccgaacaccccacacgacacgcagaggcgaagcagacccacagcgaaggcccacggccaaaacgcacgccgaaccggccaagcccgccccggacggaccaaaccagcccagagaacaggagcagccgcggcagcatgcgacccccacgacacgcccgagcacccggcgggcacagaaagacaggaaacgcgcaaagacaggccggggaagccaagccagacaaggaagccgcgcccaaaccaaccaaatgcagaggccaggaatgttgagagcgacaaaccaggcaccccagtccggaggcaggcaacacagcgcagacgcataacagagcgcaccgggcacc

SEQ ID NO: 1420 - DNA, 475 bp, Zea mays
  Peptide Sequence Number=SeqID_14178
  Probeset Number=SeqID_15823
atggggatacccgtggtggttcccgtagcggcggcctactagtgctcctcctccctagccgcgccacagaggtccgccgccgccgcggcgagggcgccgagccgcgcgcatgtcgcggcggccgggatgtcctccagggcgtcctccttcgtcgggggcagcggaggagacctctcggcggtggccgcgtcggtagccgcgcggcccaggagggcgggctccggggaaggcggcgtgatagggtgcaagtgcctcttcgagctcggtgatccgcagcttccagtagtagaggatgtcaccgaggtagtggtatggcaccatcagctcgggtagaccgaccgcagcatgggcaagatggggctagagcttccagcaggtcatggtttcggcatcaatccaaatggcgcggcctgttcaagctcccggttggttgggggcagatgtagacgatcgattaaccactagtgagcagggg

SEQ ID NO: 1421 - DNA, 307 bp, Zea mays
  Probeset Number=SeqID_15824
tgcagtatatttacgtttttttttgtttgacagaactagaatgagcccattgatgggtcagcctgatgtttatgttgctattgtgttctctggcatggtccgagatttccagaataggaatgacatatttgttttcttattaaacacaaaagctgggggcttggtattaatgtgaccgctgctgatactgttatttttatgaaattgtttggaatccaacacaagccaagctagcaatggatagaacacacacacacttggtcaaacaaaggaggtaactcactatgaaaatatgtgtgttgctgca

SEQ ID NO: 1422 - DNA, 1120 bp, Zea mays
  Peptide Sequence Number=SeqID_14179
  Probeset Number=SeqID_15825
tcgcactcgcgccatttgtaacgccactacgactctacgacctcgctcgctagtgctccagcgcgcgcccggccggtttggtataagcatggcggttgcggcggcgggcagcagggcgagagcggagcaggccaggctgcagtggcgggagcaggagccccggagccccgagatggccgcgccgccaaggccgcccaggccgcgcccggcgagggcggcggtcgtgtactacctggcgaggaacggccacctcgagcacccgcacttcatggaggtcgcgctctcctgccccgacggcctctacctccgagatgtgatcgaccggctcgacgcgctgagaggcaaagggatggcgcgcgtgtactcatgggcgtccaagaggagctaccggaacggcttcgtgtggcacgacctggcggacgacgactacatccacccggtggtcggccgggagtacgtgctcaagggcaccgagcgcctgcacccggtgccgccgccggcgctgctggacgcggcggccgcgtcctcctcgtcgtccggctcgcaggagacgcccacctcgtcgtcctctgccgggtgggaggcgcgcggcaggacggctcaccggatgaagagcgccagcgcgtgtggcgcggccgacgccgagctcggggagtacgtggcgtacaagggcgaggagcgcgccgcggacgccgcgacgcagaccgaggacggcggccgcggccacggccacagccacagccagaggcgcgtcctggctcccgccgcgcaggaggagctgagcagggcggagacgacgtcgccgccgacggcgtccacgagccccgagacgctggaggcgctcatcagggcggacgggcgcgttgtggcggccgtcagcggcagcggccgggccagggcgtcctccgtgctcatgcagctcatctcgtgcgggtccgtgtccgtgcgggacgcctcggtggtgccgcgcgcgcaggcgcaggcacaggcgcaccaccaccaccaccaccaccaccgcgcccgccgcccgcaccgcaaaccggcgtccgcggccgtcgacctgccgtcgtaccgcgccaagatcgtggaggacaaggagtacttcaggggggtcctctag

SEQ ID NO: 1423 - DNA, 459 bp, Zea mays
  Peptide Sequence Number=SeqID_14180
  Probeset Number=SeqID_15826
gttcccctcatcagcgtcatgctcatactccccctcgtcctcttggctttcgtcgccgctgttgtctgtctctccgtcgtcgctgtcgccttcagagcagatcgccgagtgtctccttgaggaggaaccgctcttcggtcccgcctgcaccacgagctgatcatcacgccgtcggctaggcggactgtcctcgacgtccgagactccatgcaactgcaagcgcgacagctccgcctcaagctcagcttccattcggtccatgtcacggcccccgtcaccattggaccgggacagggcgccaacctcttcatcctcgccgccagcacgggcgacggagcccttgacggcgctggcgcaatcggaacggccgccggaggcgctgggtcggccggtgcagctccgcgcgtccgccctggcgtcgacgagcaggcgctccatctgggcgcgcagctccgccat

SEQ ID NO: 1424 - DNA, 215 bp, Zea mays
  Peptide Sequence Number=SeqID_14181
  Probeset Number=SeqID_15827
gggctttgtggggactatcgggcacgcttcataacctgttatgaccgaagagtacggaacgacctggcttatccttttttagaatatgtctttgatgctgcttgggaggggctggggaagccgggctaaccgttttccttattattggggttattgtgctggggcttttcacggtcatccgccatattctacagtgtcctggtcgcgacccatgt

SEQ ID NO: 1425 - DNA, 295 bp, Zea mays
  Probeset Number=SeqID_15828
ctgcctcctcggcgggttcgtctctgtccccttcctcggccgcttcctcaccgtttccttcttccccgccgtggtgtcctcgggcgtggtgatcctgtcgatctttccgccggctcccgggctgcgtccgccggcgtgcgcggccgcgagccccggctgcgtgactgcgtacactacgcagctcggggtgctcttcctgggactgtcccccacagcgctccccccgggcgggctcgtgtcctgcgaaaagggctttgaaaaagtccagttcgacgaggcgctcgacgccgagcgc

SEQ ID NO: 1426 - DNA, 372 bp, Zea mays
  Peptide Sequence Number=SeqID_14182
  Probeset Number=SeqID_15829
atggcaaaccctagcaacgacaaagggggcggctcaccggcagcgcggacgaggaggagcaggacgaagcgagaccccagcggggacaaggtctacagcgtgccaccgcaggagttcgcggacaccgtgcagaggctcacgggcgcaggcaccagtcactcgtgccagcaccagcaggctgcgcgggcaccagtagctgccagcagcactgctcctcggcagcgctcgtcgtctgggtcgccgccagcaccagctccagcactgctactgtccgtgtcgtcgtcggcgccgagatccatgcaggaagcctacctggcgtggtgcgcctgcaacaagcgtggcctcagccccgggacaatggcagatatggag

SEQ ID NO: 1427 - DNA, 330 bp, Zea mays
  Probeset Number=SeqID_15830
tcccggttgacgccttcatcggggtaggttacacgttggtgtcccccctcgcggagggcgccgcctggctgctggtgcgctgccaggcgttccgagtggtcgccctcgcaattgaagcggttgacctgcacgcccacgccggcgcgcacccgcgcctcggggtcgtcgaccacatcgccttccaccctgtgaccagcgcccgcctagaggacgtcaccgcgctcgccagggccgtggctccgtgacatcgtagacagtcttcaagtgccgacgtccctgttcggcgcagctcacaaagacggcaggtcgctggcgtccatcaggagacag

SEQ ID NO: 1428 - DNA, 288 bp, Zea mays
  Peptide Sequence Number=SeqID_14183
  Probeset Number=SeqID_15831
tcagatgcgggtgtctggccaaaccgagtggaccacgccaaccaacatctcgcacgcgcggagggcgaaagccgaaagggagggcacgagtgggcggtcgcgttggcagcgctgcgagcgcgacggtgcggggccggcgagctgcgcgcgcgaggccctggcggcgcggcggtgcgggggagggagagctgcgcgtggctgagcgcctgagcgagcagaagggagaagaagagtcgcgagtctgtcagacgggcccacgcgtcggctctctccttatacgtcatttgc

SEQ ID NO: 1429 - DNA, 774 bp, Zea mays
  Peptide Sequence Number=SeqID_14184
  Probeset Number=SeqID_15832
atgaactccaagtggacgtactacccgccgcaaactgaggttgtggggtcatccgattcgaagtctgcggctcttcctcccgtcgttgacgagcagtaccgcaacgaggcaagccctctacctttcgtccacgacgacactgccaaggtggtgtcatcggactcgagcgacgacctcgggatacaacagatcagcaagttgtttgcatcactggggtacaatgcgatagcttcgcctgcattgctactcgtggacctcaccaactctaaggacccctccgacctcgccaccatccagcacctcgccgacacgctcgtcgacgacaacatgttcgaccgactcatccacaacctctcctggttctctatgatcggtcccgacgacgccgattccgtgcaccagatcctgggcatcctcctgcagcacagcccgccaatcaaaagcgtttcgaccagatcaatggagtcaacgccccgcttcagggacccaaagaaccccgatgaggaggagaagctcgagaacatcttccactatctctgcgacgtgctcatgcccctggagaacaaggagaagtttgtcaaggctgaaggtgttgagttcagcacgtcgtccgtgctggtgaccgaggaggacgaggttctcaatgccttgcccaacagcattatatttgttggtgtggtcgaagttgctgtacgacttgatttgtcgaccttccatgaagttgcagatgatggagagcagcttggggagcgtgtggctgagctggatgtacct

SEQ ID NO: 1430 - DNA, 567 bp, Zea mays
  Peptide Sequence Number=SeqID_14185
  Probeset Number=SeqID_15833
gcgcccgggcgcgcggaatggctgggggggaaccgcgcccgccgggcgccggccctgggggggctaccccggaactcggccgacttgtgggctgccgagacccccgggttcctccgggcctgggggttttgcaacccccccctgggacccggccgggaccccttcatgtacaggggggacccggggttttgcagcctcgagtgccggcaccagcccctcccgatcgaggagtggaaggaaaagtgggcgctcgccccccccccgacggcgccggggtccgacccggtggtgcccctgccgcccaacgggggggggtccgacaaaccaggcacgctcccccccgcctcctgattatgtcataagggaggggtccgaggcgatcgaagatccggttaagataacagctcgggccccgcccccccccccatcccaggcaaattatctatctttcaaaaaaaggaatatgcccagatccctcctgctatgttcatccgcgtgcccccaaaaaaaaaaaaaaaaaaaaaaaaaaaaaaaaaaaaaaaaaaaaaaaaaaaaaaaaaactcgag

SEQ ID NO: 1431 - DNA, 305 bp, Zea mays
  Peptide Sequence Number=SeqID_14186
  Probeset Number=SeqID_15834
agttccacaggcaggtgaggcaggagtgtatagtgcgcccacgcctggctgccgtgggctcgtgctgcctgctcggggccatctccgggaatacgctatacgtgaccaacttcgaggactcccgcgccgtgctcggcagtcgagtgggcgacgtcggcggcgggccggccgtcgccgagcgtctgtccgccgagcacaacgcggcgtccgaggaggtccggcgggagctcgcggcgctcaacccggacgacgcgcagatcgtggtacacgccaggggagcgtggagggtgaaggggataattcag

SEQ ID NO: 1432 - DNA, 501 bp, Zea mays
  Peptide Sequence Number=SeqID_14187
  Probeset Number=SeqID_15835
tggccgagaaaactggccatcgaccgcgttaagcagctgttcggcgccgactacgccaacgtgcagccgcactccggttcgcaggccaaccaggcggtgtacttcgccctgctgcaaccgggcgacaccatcctgggcatgagcctggcccatggcggtcacctcacccacggcgccaaggtcaacctgtcgggcaagatcctcgatgccgtgcagtacggcgtgaacgacgacggcatcgtggacatggacgaggtcgagcgcctggcgctcgagcacaagccgaagatgatcgtggccggcttttccgcctattcgcaggtgatggactgggcgcgcttccgcgccattgccgacaaggtcggcgcgtatctgtttgtagacatggcgcacgtcgccggcctggtcgccgcgggcgtgtaccccagcccgctgccgcatgcgcatgtggttacctccaccacccacaagaccctgcgcggcccgcgcgacggcatcatc

SEQ ID NO: 1433 - DNA, 393 bp, Zea mays
  Peptide Sequence Number=SeqID_14188
  Probeset Number=SeqID_15836
tgcagccgctgggtaaagtggcctcaagagagtgagctgtcacgtattgcgctggcgattcaagtgatcaccgcacagaaaatggaaactccggcgatgattttcgatgaagttgacgtcggtatcagtggtccgacggccgctgtcgttggccagatgctgcgccagctgggcgaatcgactcaggtgatgtgcgtaactcacctgccgcaagtggcgggctgtggtcatcagcacttcttcgtcagcaaagagaccgacggtgcgatgaccgaaacccacatgcagccgctggataagcgtgcgcgtttgcaggaactggcgcgcttgcttggcggcagcgaagtcacacgcaacacactggcgaacgcaaaagaacttttagcagcctga

SEQ ID NO: 1434 - DNA, 308 bp, Zea mays
  Peptide Sequence Number=SeqID_14189
  Probeset Number=SeqID_15837
ctttgtggttctttatgttgtagcgaagttgatcaacactttggaaaagatcacctatttaagaaaagcataattcttataaaagactggtgttactatgaaagccggattcttggtgctcaccacggcctaatttccacgtatgccttggagactctagttctatacattttccatatcttccacaagtctttggatggtccattggctgtaagttatggcttaatttttctgctgcctttcctgcctatcttatatttccaatcatcatgatccctcctttctatgggtgtgatgattttattccc

SEQ ID NO: 1435 - DNA, 603 bp, Zea mays
  Peptide Sequence Number=SeqID_14190
  Probeset Number=SeqID_15838
atggccgagcagagagggacgcggtccgagcggaggagcgcggcaaacctgaaggtgagcaggcaggggcggacgcgccaggaacaagagagcaggtgccagggacacgacagcagggaggagcaggaaggttgggcggccgagaaggagaagtcccagcaccatgggaagcatgggagctctggccggcgcagaagggcgacagcggccagcgccatggcgagcagaggagcagggaggaaggagctcgaagccgagctcgacattgggggcgagctcacggcggccatggcaacgggcagagggaggagcgccggcgaggtcggggaaagcagcgatgggaggacgcagacgtccacgccatggagatgcgggacttggcagaagcaaggagctaggtacacggcggtcggaaccaagaagcagggaacggagagggaccgagggaccggaatgcactggagatggccggcggccaagcagactcggcccggcagctcgacgaccagggccatggaggcgagcagggagattcactgggagaggatcatgaccggagtggatgaagccgactgtggccgagaggagacgaggggcacctga

SEQ ID NO: 1436 - DNA, 288 bp, Zea mays
  Probeset Number=SeqID_15839
atgttcgttgcacagtcaattcagctgggtatcaatgatattgtccaaagccccaaagtacattgtcgaagctaggaaagggtctcgttttggacatgacacacttgttgatgtcatgcttaaggatggactttgggatgtatatacaaagactgcgccatgggaatgtgtgccaagctttgtgctaacaatgatgccctcacaagagaagaacaggccacatatcagtatttggcatttgataaatcgagtactatttcatatttgcttttatttcaattgctgcag

SEQ ID NO: 1437 - DNA, 207 bp, Zea mays
  Peptide Sequence Number=SeqID_14191
  Probeset Number=SeqID_15840
ataatgccagtatgaagattcttgcctggcatacctttcattatgtgagcgcaagtctagaggcgcatggcattcaccgtctaatcaagtccgtgagagacatccgtacatgtgggctggcaaatgtaaccgcgaccgtaattaacctccctgcatttgaggctcatgctagctacgaccaatccctcgtttaagtgcggtgacaac

SEQ ID NO: 1438 - DNA, 579 bp, Zea mays
  Peptide Sequence Number=SeqID_14192
  Probeset Number=SeqID_15841
ttttgaagacatagggggtgaatttacccttcctttggctgcaaatgctgagccggttagggatttcgatgatggcttaacccgaggtctcgttcggtttcaaatcagtagatgggtgctattccaagtggggcagctccaaagctataaaacatgtccgcatacccttgctttgcattcaggcagcaaatgatccccttgctcctgagaggggtatccctcgcgatgccatcaaggcaaacccaaactgggtgttgattgtgcccccaagaggagggcccttgggatgggtggcaggtgaagaagctccccccggggctccttgggccgcccaagtggttatggggtttctgccccatgtagagaatcgtgaaccccttaccggggagggatctttcggggatgtccatgatcagattcaagtctaattctgtttgtcccttcttcccttggaggggtatgtttcccttgtcccctgttgttgggccccagaataataaccatgtaaagaatcatagtatataagacttcttgcatttcctcctaatatagatgatactatcttcaagttccttagtt

SEQ ID NO: 1439 - DNA, 243 bp, Zea mays
  Peptide Sequence Number=SeqID_14193
  Probeset Number=SeqID_15842
atgcagccgcctcctatctcatccccaccaaatctggcactgcttgggacatctacggtggcagcagcagctgatccagaaggggacatgacagaggtcgatctgagggagcagcaggatggagggaaggagtggaggccgaggcagggtcccactgagggcaggctgcgcacacaagcaaaagcagcacgagggagggcgatgaggctgccctgtacctctgtgaggaagggggagatgtag

SEQ ID NO: 1440 - DNA, 602 bp, Zea mays
  Probeset Number=SeqID_15843
cccctgttgctgtgcactctgcgcggcagcacattcccgcgcagacgtccatggcgcctagggctacgcctggggcgctgtctgcggccagagagttgctacgccaccctccaagctccacggcctcgctgggggccatgaagcagtgacacgacgacgtcgaccgcctgctcggcatggcgcactccggctcaaccaggtccaggcctcggtcgttccggcgtcaacatgaggcatcagcgtcagtgcgctcaccatcggtgagagccgcaccgactgaagatctgtgggcggaactcaaccacaggcgtgagggtgatgatgcccgcgtctctctggagagggcacgtgagcgccggcagaacgtcgaggtcgcaacctcaactacgacttcgctgcggtcgcaccacaaaccccaatgggcgcccagatccaagcgggtgtcccattggccggcgtgggctgcgccgcactagcggatcatctccgcgcaacaacctaggccatccaagttccggccacacctaccggagaagtccccggtacgacaaatccatcagaattattgcaggtttaggtcaccgccatagacagggtacgag

SEQ ID NO: 1441 - DNA, 873 bp, Zea mays
  misc_feature (1)..(7): n is a, c, g, or t
  misc_feature (703)..(873): n is a, c, g, or t
  Peptide Sequence Number=SeqID_14194
  Probeset Number=SeqID_15844
nnnnnnntggtgccgtgctccccagatctaccacgggcgcgtgcccggatctggcccgacgaacagcggtggagctcgcgcggtgttccattcatggattgggatctcaagatgtcggtctcctaggacctccgcgacttcccccgcgacggcgtcgggcattgccgccgcagctgtcgcgccttccctcgcgacggcgccgagccgagcggagtgctccgtcgacctcaagttcggcaggctaggcgagttcggggcggcggacgacaccaccacgaaggagctggcggctgcaaccgcagcgccgtccgccagcccgatgggcggcgtcgggcattgccgccgcagctgccgagccttcccccgcgacggtgctgagctgggcggagtgttccgtcgacctcaagctcggcgggctaggtacccgagaatcagaggctccttgtatgacggcgacggcggcgcgcaggcccaggagcagcccccggccccggggacctgcgacctgtacaagggccgctgggtgtacgacgagtcccgcgcgccgctgtacaaggagtccgactgcagcttcctcacggagcaggtcacctgtatgcgcaacggccgacgcgacgacgactaccagaagtggcgctggcagcccgacggctgcgatctccccaggtaccaccgccttgcttcctcgcttgcctgccactgnnnnnnnnnnnnnnnnnnnnnnnnnnnnnnnnnnnnnnnnnnnnnnnnnnnnnnnnnnnnnnnnnnnnnnnnnnnnnnnnnnnnnnnnnnnnnnnnnnnnnnnnnnnnnnnnnnnnnnnnnnnnnnnnnnnnnnnnnnnnnnnnnnnnnnnnnnnnnnnnnnnnnnnnnnn

SEQ ID NO: 1442 - DNA, 277 bp, Zea mays
  Peptide Sequence Number=SeqID_14195
  Probeset Number=SeqID_15845
cttctgggtgggtttttttagaaaacagaaccttcccccccccggcatggtttttacaaaatcctctgatgaggtcccagagctgcacccccaattgcttgtgctgttgcactattcttcaacatcagatgccaacatgcccccggacgagttaccttcgcgcaaagcctctgtatctggtggctatccctctaaccttaccagatcccatgtatccttccgataaagcctcggcgcccgaatggctacccgacgggctaagcccgatttactcaat

SEQ ID NO: 1443 - DNA, 487 bp, Zea mays
  Probeset Number=SeqID_15846
tgcaggggagactagacgaagcggtgacgcacaggcgggatttggtgattaagcatctcggttaaccggacagcgatggatatgccttcatgctcgaaaatcgggagctgagccaaatgcctttatttgtactcgacggacgctgtgacgcacgtgataaaatataggcgctgaatgccgttgctgacgactatctgactaagccgattggcatctaagaactgatggcgcgcgtgctcgtggcgctgattcaacataagcgcagccagccggaaccgctggtgaaggattggcgaagtgagcggttatttcgccgcgcggcgcatggctgtgcagctggacaaggaggtgcatttgacacctaccgaatttcgcctgctcagactgctgctgaataacaccagcaaaatgctgagccaacaccagttgcttaaccaggtatgggggcacaacaccgtggaacacagccattgtctgagcatctata

SEQ ID NO: 1444 - DNA, 685 bp, Zea mays
  misc_feature (47)..(47): n is a, c, g, or t
  Peptide Sequence Number=SeqID_14196
  Probeset Number=SeqID_15847
caccaacatcgccaatcaccacgtcgcgctgcatacgccgaagaagnacgtcaccgtgctgtggtggcgctcggtcggtcacagccacagcgccttcgtcatggaaagcctcatggacgaactcgcgcacgccgccggccaggatccacttgagtaccgccgcgcgctgctcaagaaccatccgcgccatctcgccgcgctcaacctcgccgcggaaaaggccggctggggcgatgccctgcccgcgggccgcttccgcggcattgccgtgcatgaatcgttcggcagctatgtcgcgcacgtcgccgaagtgtcggtcgaccagggccaggtgaaagtgcatcgcgtcgtttgcgccatcgactgcggcctcgtcgtcaatcccgaatcgctggtggcgcagatggaatccggcatcgccttcggcctcggcgcggcactacagagcgagatcacgttccaggacggtcgcgtgcaacagtccaacttccacgactaccaggtactgcgcatgaaccagatgccggtggtcgaggtgcacatcgtgccgagcacggaaaagatgggcggcgccggcgaaccaggcctgccaccggtcgcgccggcggtggccaatgcggtattcgccgccaccggcaagcgcatccgcagcctgccgatcggccagcagctgacgtcggcctga

SEQ ID NO: 1445 - DNA, 222 bp, Zea mays
  Peptide Sequence Number=SeqID_14197
  Probeset Number=SeqID_15848
tgcaagcactaggaaagtcgctacccccagataaatgtttcatgtgctgatcgaaattttgcctataagttcactgatgagatgtatgatccttgggtcatgaaactgttcctgggatttgctcgtacttccgagttcaatggtcctagacaaccagttgctcttcatcctttgatacaagaactcaatactgatttgcctatccttgagccgatgctgcag

SEQ ID NO: 1446 - DNA, 239 bp, Zea mays
  Peptide Sequence Number=SeqID_14198
  Probeset Number=SeqID_15849
caaagtagcgtgctgaaaagaaaaaaaaagaaccccagattttatagcgacgcttcaaaactgccgttcatgcaaagggcattggtcagaacattctcgagctgcatgcacattacatgctctggaatgtgtgtaccgttcatttcatggcgcttttgttgtcacgaatagtattattacctagtgagcatttatcagatactatcaataaggtcttcggttttacttgccccccccac

SEQ ID NO: 1447 - DNA, 477 bp, Zea mays
  Probeset Number=SeqID_15850
acctgcaggatgtgcgtgcgcagcgtcagactgaaattgattacattaccggctacctgctgcggcgcgcccgcgcgcaggggattgcgctgccggaaaatacccgcctgtacgacctgattaaacgcaaggatgaagagaccgaagcagtcaccaccattgacctgctggtccgcgccggcctgaaggtgaccaccgccagcgtggagagcgacggcacgcgcgagattgtctgctcccgcggcgtacgcctgctggctgacgcaccgctggttgaagtggcggataacgattttgccgccatcgtcctgccgggcggcctcaaaggcgctgaaaccttccgcgacagcccgctgctggtggagacggtacgccagtgtcatctgttaggcaaaaattgtgggcggcgattctgtgcccgcgccccgggcacgggtgcctgggtgccccgcatgaaccttgttttcccggtggggc

SEQ ID NO: 1448 - DNA, 539 bp, Zea mays
  Peptide Sequence Number=SeqID_14199
  Probeset Number=SeqID_15851
ctatgtggcgcgcggcgcctgggcttacggtctgtacgccttcgcaccgggccgcgccagtggcgatgagcgtctggtggcgggcgaaggggatcagttctgggattaccgcctgcaaaacattctgctggcggaaggggataaccgcgaaccttatctgccggagccggagcctgaaccgcagccggagcctgaaccgcaacccgatccagaaccacagccggaaccggaaaatccgcaggtgccgcagccagagccaaaaccggagccgggcaaggtgcgcgcggcggtgattccgcaggtgccggcctacatctcgctgcccgccgccttccacagcgtgacacacaacctgcaagcgctgttcagcagcagcgcgcagcaggcgggcgcagaggggcgtccggatctgtttgtgtccggctacaccggtgacgaccgctatcacagcgcgggcggctttatggattacggctacgatttccacagccgctatcagggctggatgattggcagccgcttcccgctgcaggcatgca

SEQ ID NO: 1449 - DNA, 610 bp, Zea mays
  Probeset Number=SeqID_15852
cttgtacccgcccactggaacgccgccatgcgctactcccttttcgatggtcaacgcgacatccttatcctgattgcccgcgtgctgctggtgatcctgttcgtcttgtctggctgggggcaagctgaccgggttcgaaggcacggtcggctacatgacttcactgggcgcccctgcccccatgctggcagcggcagttgccgtgctcatggagttcgtcgtcggcatcctgctgatcctcggtttctacacccgaccgctggccttcctgcttgcgcttttcgtactgggtacggcgctgctgggccacccgttctggaacatggtcgaccctgagcgcagcgccaacatgacccagttcctgaaaaacctcagcatcatgggtggcctgctgatgctggcagtgagcggcccagggctcatcgaaccaggctgggtgatcgcgctcctcgtcatcgagatcatccagcgtttcctcgtcctcctcgacctcatcctcggcgccctgggcatccgcttctggctccgaatcgtcgtagaggaattcgtggtcaagcaggtgatcgtgctcgggttcgtgcaagtcgtcttcgtcgtgcatgctggctaa

SEQ ID NO: 1450 - DNA, 320 bp, Zea mays
  Peptide Sequence Number=SeqID_14200
  Probeset Number=SeqID_15853
tgcagttataggccttagagcccacagagccgtacctgcctgtacacaactatggatggatcttcagctgtcaaatcatatgcttggtggccgatacaaatgaccatagcgtatctattcacaaagagctcagcggaaacttgaccacctacccaatcaacgacggtattgtcaatataagtgcacgcacggatcagttctatatgaaggagatacatgtgtatgtccagacacggccagctgcccagttcagcctggccaagatggaacagatgagacagaggctgtgcattagtaccgaactattcctgtagaaggca

SEQ ID NO: 1451 - DNA, 942 bp, Zea mays
  misc_feature (601)..(942): n is a, c, g, or t
  Peptide Sequence Number=SeqID_14201
  Probeset Number=SeqID_15854
tagggacgaagggggtttgcattttttttttttttttatttttggtccatgaaccttcattccaagtatgaaacataagtacaaggttacaaggtaacatcgtgaacaaaaccctttcccttaacaaggcaggggaaagtagcacatttattccagcagggcagcaacagtatgcctcaaatttgggaccttacttgaattcgaaatattctctataattagcacatgggataggggggggggggggggggtttcctcatccgtcagaagggaaacgggcaacagatgagtaacgcttagaccactggaagctccccgcactcggtggtgactactttttttttcggacgggcacctttgtcagtctcctgtgactcgatcagccttacaaatccatccctcccggggtggccaacttcccagccgccagccacccctctgctctctcctccatccgcgccgcatcaccgtgtcgcccctggatccgcgccgccggtcctcctcagccacgacaccgaacgtcgccgacgctctcctctcccgctcccccgcgccgctcgattccggcagggaggagtccgccggcgacgcgagcccgaannnnnnnnnnnnnnnnnnnnnnnnnnnnnnnnnnnnnnnnnnnnnnnnnnnnnnnnnnnnnnnnnnnnnnnnnnnnnnnnnnnnnnnnnnnnnnnnnnnnnnnnnnnnnnnnnnnnnnnnnnnnnnnnnnnnnnnnnnnnnnnnnnnnnnnnnnnnnnnnnnnnnnnnnnnnnnnnnnnnnnnnnnnnnnnnnnnnnnnnnnnnnnnnnnnnnnnnnnnnnnnnnnnnnnnnnnnnnnnnnnnnnnnnnnnnnnnnnnnnnnnnnnnnnnnnnnnnnnnnnnnnnnnnnnnnnnnnnnnnnnnnnnnnnnnnnnnnnnnnnnnnnnnnnnnnnnnnnnnnnn

SEQ ID NO: 1452 - DNA, 942 bp, Zea mays
  misc_feature (1)..(306): n is a, c, g, or t
  misc_feature (907)..(942): n is a, c, g, or t
  Probeset Number=SeqID_15855
nnnnnnnnnnnnnnnnnnnnnnnnnnnnnnnnnnnnnnnnnnnnnnnnnnnnnnnnnnnnnnnnnnnnnnnnnnnnnnnnnnnnnnnnnnnnnnnnnnnnnnnnnnnnnnnnnnnnnnnnnnnnnnnnnnnnnnnnnnnnnnnnnnnnnnnnnnnnnnnnnnnnnnnnnnnnnnnnnnnnnnnnnnnnnnnnnnnnnnnnnnnnnnnnnnnnnnnnnnnnnnnnnnnnnnnnnnnnnnnnnnnnnnnnnnnnnnnnnnnnnnnnnnnnnnnnnnnnnnnnnnnnnnnnnnnnnnnnnnnnnnnnnnggcaggctgtgctcggcgctttggttgctgtccgcgttcgggctcgcgtcgccggcggactcctccctgccggaatcgagcggcgcgggggagcgggagaggagagcgtcggcgacgttcggtgtcgtggctgaggaggaccggcggcgcggatccaggggcgacacggtgatgcggcgcggatggaggagagagcagaggggtggctggcggctgggaagttggccaccccgggagggatggatttgtaaggctgatcgagtcacaggagactgacaaaggtgcccgtccgaaaaaaaaagtagtcaccaccgagtgcggggagcttccagtggtctaagcgttactcatctgttgcccgtttcccttctgacggatgaggaaacccccccccccccccccctatcccatgtgctaattatagagaatatttcgaattcaagtaaggtcccaaatttgaggcatactgttgctgccctgctggaataaatgtgctactttcccctgccttgttaagggaaagggttttgttcacgatgttaccttgtaaccttgtacttatgtttcatacttggaatgaaggttcatggaccaaaaatannnnnnnnnnnnnnnnnnnnnnnnnnnnnnnnnnnn

SEQ ID NO: 1453 - DNA, 472 bp, Zea mays
  Peptide Sequence Number=SeqID_14202
  Probeset Number=SeqID_15856
gccacgcttaatgtactgggccgatccacgctggccggcgacatcaacctgagcggcaccgcttccagcctgattgccgatatcgcgcagtacgtcagcacgctgggcgagctggcttccaccatcagcgccaatatcagtggccagggcagcgtgattaaaagcggtgacgggcggctgacgctgagcggtgacgtcagcaaccagcaaggcgtggaggtgcagcagggcgagctggaagtgagcggcaagctgcacacgccgctgaacatggccgccggcacgctgctctccggcggcggcgtcatcaatcatgccagcctcgccgataacgtcacgctggcaccgggctggaacaatgcgccggacagctggtcgaccatgcgccttggcgatctgcaccacgggcgctacacggcgctggtgctgaactccgcgttccgccaggacgccagcgatcgcctgctaatcg

SEQ ID NO: 1454 - DNA, 687 bp, Zea mays
  Probeset Number=SeqID_15857
agcctgatcgtgctgataccgctggccgccatgttcgtgcatgccgcgcagcttacctgggagcagttctggaacgtcatcagcgcgccgcgggtgattgccgcgctcaagctgagtttcggcaccgccctgttcgccgccatcatcaacggtgtgatcggtaccctgctggcatgggtgctggtgcgctacaccttccctgggcgcaagatcatcgatgcgatgatcgacctgccgttcgccctgcccacggccgtagccggtatcgccctgaccgccctgtacgcaccctcgggctgggttggccagttcgccaccgacctgggcttcaagatcgcctacaccccgctgggtatcaccctggcgctgaccttcgtcaccctgccgttcgtggtgcggacggtgcagccggtactggccgacattccgcgtgaagtggaggaggccgccgcctgcctgggcgccaagccgctgcaagtgttccgccacgtgctggcgccagcgttgctgcctgcctggctgacaggctttgccctggccttcgcccgtggcgtgggcgagtatggttcggtgatcttcattgccggcaacatgccgatgaagaccgagatcttgccgctgctgatcatggtcaagctcgaccagtacgactacaccggcgcgaccgccattggcgtgctgatgctg

SEQ ID NO: 1455 - DNA, 448 bp, Zea mays
  Peptide Sequence Number=SeqID_14203
  Probeset Number=SeqID_15858
tgcagctttggttcaggtctacagagataacgaggatctccgcttgatacttcctgaggaagaggatgctgacatggccaacggcgagatggtgctcatgatcatagacactgtggtcgtcgtcgcgcgccacaggacgagggtcgtcgctgacgtgctgctgcacgacgtcgtggcgtcgtgccggcaagtgctggagcctcacgggcccatctggggcatgatggtgatgacgtgtgcgtccatgacaggccctagcgagtgcgggagtagggtggtgatggacggaacctggccagtggccacaaccacgagcaagagcaccggggccatggagtccgcactagccatcgtggagaagctgctcgtgccacctcgaccactcccagcgaggctgccggcgaagaggaagcccatgctcttcgcgagttttttctctactccttag

SEQ ID NO: 1456 - DNA, 399 bp, Zea mays
  Probeset Number=SeqID_15859
atgaacccgaacggggagccgttctccgcgacgggcctcactgtcctggccaaggggtcgatcaacgcaacctgcaacgcgacgttcaacggcacgatctcctcgacgggcatcgtcaacatcacgtcgacgacgtttacgggcgccgcgacgtgcggcctgatcagcggcagcgcgaccagcgcatcgccttggacgggccaggccgacagtacgacgcagctgtcgatcaacaacgcgaaggtgaccgtttcgctgctcggcgcctgcgggccgagcaaggtcgtgacgacgtggagcgatccgaactcgtcactgacgttcaacaacgcggtgctgacaccggactgcacggtcagcggcacggtcgccacgtcgccgaagttccacgtgcagtaa

SEQ ID NO: 1457 - DNA, 201 bp, Zea mays
  Peptide Sequence Number=SeqID_14204
  Probeset Number=SeqID_15860
taccctgtgttcatgttgaaggttctaaaagtgcctgagctagggaatggaaatgaggaattgtggacttttgttatatatgcaggagaagaccacacaaacacacaaactcttgtggcctttcttggacttcttagtactttggtatgcattatagatactgctcttttcagtttttcattgtttgcttttgcgccgact

SEQ ID NO: 1458 - DNA, 582 bp, Zea mays
  misc_feature (561)..(561): n is a, c, g, or t
  Peptide Sequence Number=SeqID_14205
  Probeset Number=SeqID_15861
atgctgaacatcttcactatggatagcgaccgctggattacggaaggtctgcgcctctacttttccgggcagatgataagctgcctgacgctcacctcgccggatgacccgatccctaccggacgcgggcgtaacgtggtgatcagcgaactgcattttgccagtaaaaatctggaagagacgctgcgtagtctgctgctgatacagctcaaaacaccgggcgtcgagctggtgattctcaccgacatcagcgatgaagccgtgctgaattacgtggcccgccacctgaaaaaagcgcggatgctgagtaaaaaatgcccgctggcgacactggtcagtgcggtgctgacgccggaaaacgttgccgccgtcgccgcaccgcacggcaacgccgatgtgctgaccgagcgcgagttcacgctgctgcgctggctggcgggtccgcgccgcatgacggagatcgggcatgcgctgcacctcagcaataagaccatcagccactacaagaacaccatctcacgcaagctggggtgtaaaaaccacatggatttttaccatcgnctcaccagctacggcttttaa

SEQ ID NO: 1459 - DNA, 718 bp, Zea mays
  misc_feature (1)..(34): n is a, c, g, or t
  misc_feature (635)..(718): n is a, c, g, or t
  Probeset Number=SeqID_15862
nnnnnnnnnnnnnnnnnnnnnnnnnnnnnnnnnnggccccggttcttgttcctttcatcaaaagcgtgtaaaaaaaggaccccactggttccaaggtgcccaaggctccaataaaaaaaaaatgatgggtcctcccatgggcccccgtttattttgtccttgtgcccgtatacttcgatctgttaaaatctattggttgtgtgccctgtgtctgttgtttgggtatctatactgttattttgagacatggttgacttgaaaaaaaaaaaaaaaaaaaaaaaaaaaaaaaaaaaaaaaagaaaaaaaaaaaaaaaaaaaaaaaaaaaaaaaaaaaaaaaaaaaaaaaaaaagaaaaaaaaaaaaaaaaataaaaaaaaaaaactaaaggaaaaaaaaaaaaaaacaaaaaataggggtcctcttggcccgaacccgtttggggggaaaaatagaaatccgggggcggtttcaataggatcccagccggaaccaaatgtgggaaaaactgggggacataattgatcccgggaaaaaaattaattgcgtaaagttccccgcccattttcaagggggaaaaaaaatgggaaaccctggggggcccaatggggcaacccaccccaaataattgggtgggnnnnnnnnnnnnnnnnnnnnnnnnnnnnnnnnnnnnnnnnnnnnnnnnnnnnnnnnnnnnnnnnnnnnnnnnnnnnnnnnnnnn

SEQ ID NO: 1460 - DNA, 207 bp, Zea mays
  Peptide Sequence Number=SeqID_14206
  Probeset Number=SeqID_15863
ggaaaaaaacggtcatgtttataagttcccccaaaggaaaaaaatagcaaacataaatctgggaagaagaggcgggggggcaagatgcagagctcccttcagtccaaacagcggtcaacgaaggggacgaggcagctcctcgggcatgcaaaccacaagcccatctcaagcatctctcgctctctcacgatcttctctctctctgat

SEQ ID NO: 1461 - DNA, 236 bp, Zea mays
  Probeset Number=SeqID_15864
tgcagtgtatacttgttacacttctgttctgtcacaaatgatctgggatgatgctagttagctcctattcatgtctgatcgcagttgaagcggaaagatcagaagacccttgaaaaattgagggctgagagaaaagccaagaacggatgagcttaaagagagaacaaactaatatcttacccaacagcttattcagaaatatgatcttgatcctgccgcaaaggctgcaggcagca

SEQ ID NO: 1462 - DNA, 217 bp, Zea mays
  Peptide Sequence Number=SeqID_14207
  Probeset Number=SeqID_15865
gagagacttatgtccattttttttcaattcccccaagaaccaatgcggctggggtataaaggaatctgctctcttcatatacccatattgctggatagtaatactcattcatatacttactatacgtttttccgagcgcgggaaggactttttaacaggcatctttccgaaacaccttgcagttctaaatcattccactgacaccatcaaaaggtgc

SEQ ID NO: 1463 - DNA, 237 bp, Zea mays
  Peptide Sequence Number=SeqID_14208
  Probeset Number=SeqID_15866
gcacatcaagaatctccgagcagggccccattcagttgttcccactcctttaccataccatactccatagcccatacacaggggcacgtagggcccagcaccaacccgggccgaccgtactcctaagcccgcgtccccctccgccattggaaagctcccccaaaaggcgaggatgcatgacaaagctaatcagcctactaaacaagtaaacaacaggaccggctacggccaacacac

SEQ ID NO: 1464 - DNA, 1527 bp, Zea mays
  Probeset Number=SeqID_15867
cacaccagcgcacgcacgcgcagcgtccggcgggcaccaccacctcctgtcctcctcctgccccaatccgccctccctgccgctcgccgcatccgatgtcggtcgccgacccctctgcggctccggccgcggtcgccgacccggatggccctgactccatgcggctcacctggaatacctagccacggccaaaggtcgaggccagctgctgcatcgtgccgctcgccgccaccatctcgctcactcgtgtcccagatccctccgcggcatcctcgccgccgctctcttaccctccgctccgctgcaagcctccctgttccgcgctcctcaaccccttcgcgcgcatagactatgctgccaagatctggatctggagtacgttaagatggccatgcggaagttcatagcactcctgccagagcacgcactcgtgggcctcgtcaccttcggcacgcatgtgcacctgcacgagctcggattcttcgatctcagcaagatctacgtcttccgggggaccaaggagatatctaaggaccaaatattggatcagcttgagctgtcgggcgctgggcgcccgggcttccccatgatgccacagcaaccgagcgggccgcaggtgaatgggatgcatccgtcggtcacggccggggtcaacaggttcttgctcccggtgtcagagtgcgagtgtacactcagcacgttgctggacgagttacagcctgaccaatggccagtggaggctgggaaccgtgccatccggtgcaccggtgttgctctcagcgtggctgccgggttgcttggtgcttgcatgcctgggactggtgcaatgatcattgcattgctaggtgggccatgtaccgagggccctggaatgattgtttcaaaagatttgtcagaaccagttagatcacataaggatcttgacaaggatgcagctcctcacttccagaaagctgttaaattttatgatggtcttgctaagcagttggtcagccaaggccatgtgttagatgtttttgcatctgctctcgatcaggttggactagctgagatgaaggttgctattgagagaacaggtggccttgttgtcttatctgaaagttttggacattcagtattcaaggattctttcaaacgcatttttgagggaggtgaacagtctctaggcctttcattcaatggtacaattgaaataaactattcgaaagatattaaagtccaaggtattattggaccatgcacatctttggagaagaaaggagccgtgtgtgctgacacaattgttggtcaaggaaatacaacagcatggaaaatgtgtgggctcgatagaaatacttctctgacagtattttttgatgtctcaccgagtgaacggtcgagccaaccaggacaccaaaatccccatttgtatatacaatttgtaacaagttaccaacacccagaaggtcaaatgagggtaagagttactacgatatgcaggaaatgggtagacggttccactaataccgtgatattagttgatcgttt

SEQ ID NO: 1465 - DNA, 623 bp, Zea mays
  Peptide Sequence Number=SeqID_14209
  Probeset Number=SeqID_15868
atcaccgtgaaaatgtgggatagcctaaagagcgtttcccgctggcgtggcgcaatctgtatcagcaatacaccagcgataagggcatcacgtcaagctactccatggcgatttcccgccaggagagcgcgtggaacctgaaagcgcgctcaccggttggcgccagtggcctaatgcaggtaataccgggcaccgccagccataccgtgaaaatgtacaacactccgggttacgttaacagcagtcagctgctcgatccgcagaccaatattcagattggtacgcagtatctggagtatgtgtatcagcagtttggtcagaaccgcatcttgtcttctgccgcatataatgccggcccggggcgggtgagcagctggttgaataccagcggcggcaaactggatgcggtggcgtttatcgaaaccattcccttctcggaaacccgtggctacgtgaaaaacgtgctggcctacgatgcctattaccgctacttcatgggcaagccggataagattctcgccgacggcgagtggaatcgccgtaacagactgtgttatgcttcagtactcgttaatgagtacggaagccttcatgagccaacccctttccccgcagccggttga

SEQ ID NO: 1466 - DNA, 414 bp, Zea mays
  Peptide Sequence Number=SeqID_14210
  Probeset Number=SeqID_15869
agcagtggtaacaacgcagaggcctttttttttttttttttttttttttttttttttttttttttttttttttttttttttcaccccatcataattcataatccattacttgcccttgcagaaaacacagcttctaccctacccatagccatgcaaggcaaggcaactggggggggggcgttgactccatggaaagctgccttaaaacatgtagctccatgggacactagtagtatagtacaataactaactaatactagggggaatcaattaatccttaaggcttatttataccgggaccgattcctgatcacgtaggtggcagctgtaattaatcggtaagtggtgaggggatggacgatgatcacgggaggcttgcttttgcccgcgtactctgcgtggggaccactgctt

SEQ ID NO: 1467 - DNA, 435 bp, Zea mays
  Probeset Number=SeqID_15870
tgcagaaggggcaggtgaagtcggtctccagctgcttcttgggcttcgccgtcagcttattggaggtcctcgacttcctcttccccatcgctaactcgctggtgctggtggtggtggtgctgctgctggtgatgacgacgacgacggatctcgagcgacgatggactcgagagggtgaagcgcagcgcgctgcagatggtgcgtgcgatgaagggtcccacgtgtccaaacaaatcccatctggaatccacggtggagagcgtcaaggactccatcccatcgacgccgttcgtgcagagctatccaaggtctccaagttactggagcgaggcgcgctcgaggacggttggcaccagatcagcatcctcggctctcaacagatcagcatccaatggggcaccaccttccacctcatccacattcctccatgcttcg

SEQ ID NO: 1468 - DNA, 242 bp, Zea mays
  Peptide Sequence Number=SeqID_14211
  Probeset Number=SeqID_15871
ctgcagcccaacccactgccgactctcgcagagatgacgctggatgagtttctggtcagggccaaagtcatagccaaagaggcagtggaggagagactgagctgcatgaagttgatgcacatggtgtagaccaagagctcaagaaccatctcctgaagaaatacagtggctatctaagctcgctcaagcaagaactatcaaagaaggaagaaaaagagcagaccccctgttctggtcataat

SEQ ID NO: 1469 - DNA, 344 bp, Zea mays
  Probeset Number=SeqID_15872
ctgtggcgccggggcgcgtccgggggcaggggtgactcttgtaacacgccacgccagccgtcagaagcgcacgacacggccggaccagcaaccccggcgagtgtcggtcgggcactcgggcatgtcagaactcctgcctacagctagccttcctgacgagtacgagcacgattgctccgtggaattcccgcgggcccaggaggggttccgatccctgccgtccgtcccacgcgcccccctacttcgcctgcaggtcacgggtccctggatccgcagcgatgcggacaaggctgcggtggaaggcacgagaacatactcaccgcataaaagcggcaagtatgcag

SEQ ID NO: 1470 - DNA, 740 bp, Zea mays
  Peptide Sequence Number=SeqID_14212
  Probeset Number=SeqID_15873
tgcaggattatcacttcatcccaacggtgaaaatgctgcgtgataccggcttaactaaccgcatcggtttgtttttacatcagccgtttccgtccggtcagctgtttgaagcgatccctgactggcgcagcctggcagaatcgctgctgtgctgcgacctgattggcttccagaccgggcaggatatgaataactttctgctgtggctggagagcgagtttcgcgctgaacgcttaggcaggaaccgtctgcgcgtgcacggtcacattatcactaccggcgtgtttccggtcgggatcgatctggctgaggttcaggcgttacttgagagcaacagctgccagtatatggagcagcagagccgcgaacatttgccggccaacacggtgctgagcggtggtcatctcgatgacagcgcaggtctgccgtatcgcatcagcgcgctggaagtgctgctgcgccatcatcccgactatgcgggcaacatgatgttattgcagctggcttctgctgccagcggacacccgcaccggcagcaggcgatcagccacaatctggaaaatctgtgcggtgaggttaatggcgtgcatggtatgctcaactggtatccggtcagctatctcaaccacgattatcgccgtgaggagctggccgggctgtatcgcgcggcgcgggtggcgctggtgacgccactgatggcgggcatgagcctgatggcaaaaatgtatgctgcgctgcaa

SEQ ID NO: 1471 - DNA, 210 bp, Zea mays
  Peptide Sequence Number=SeqID_14213
  Probeset Number=SeqID_15874
ctgcagcccaacccactgccgactctcgcagagatgacgctggatgagtttctggtcagggccaaaaaccctgctaatgtttcaggtactgatgggaaagcatcatgcatggcagcttatatggtctgcaacaacattttcaactccatcatgaagcttgttgggacatgccctgctgtaggaacgcagaccccctgttctggtcataat

SEQ ID NO: 1472 - DNA, 304 bp, Zea mays
  Peptide Sequence Number=SeqID_14214
  Probeset Number=SeqID_15875
attagatcatagaacccgagcgcacatatggttcaagtaagtaagacatgtggtagaagtaaaatccagcgcactatggtcgcgaacttcctgacgaaggacgtcagtaagaattcgaatccaggagagcgcctagagcggcggtccacacaaaaagtccacggcgccccctcggagacggtggagtcccccgccggatcacaagaacgagttgcccaccacgcaggtcaccctggccccgaaatcagaagcgcgggccgcctccagacaggcattcactccaccggcctcctgggcctaaatt

SEQ ID NO: 1473 - DNA, 373 bp, Zea mays
  Probeset Number=SeqID_15876
atgagcgagaaaattcctgtaggtatcagtgcctgcctgctcggggatagcgtccgattcgatggcggccacaagcgttttgcctttgcaactgacgagctcgcgccatttgtgcgcttcgaacctgtctgcccggaaatggccatcggtctgccgacgccgcgcccggcgctgcggctggtcaaacagagcgacgatcagatccacctgtgtttcagtaaagacggcggggaagagctgaccgacgacatggcccgctggtctgcggagcgcgttaaatcgctgcaccatctgtgcggctacatcctgtgtgccaaatcgaaaaaaaacggactggagcgcgtgcgcgtctacgagcctgacactaacaaca

SEQ ID NO: 1474 - DNA, 290 bp, Zea mays
  Peptide Sequence Number=SeqID_14215
  Probeset Number=SeqID_15877
atccctttgtggaatgagtatggcagctggggcttgctcatactgggttcaagctccatgtccggtttaccgctggtctgtgcaatgctgagactgctaggagagcgaccgtgctttggatatggagccttggctaaaggtagcaacgggctgtttcaccctggtggggcgccatatattacgtaaccggggatgtttttgctctccgttctgagcgtatcagcatggacaggtagctaccccgtgcctccataatgctggcacctgccatgactccttccattgcaccc

SEQ ID NO: 1475 - DNA, 793 bp, Zea mays
  Probeset Number=SeqID_15878
atgatttcggcagcgcgggctttaccgctggcggtagctggaactttggcgtacaggcagaagtgtggttctgagatcgcacttcgcgctgaccggctgaaggaaggttgcacggtgcgaggcgttgaaacggcctcgcaccgcatccggcgaagcctgccagtcagcggaatcgttgtgaccattgcctgcctgcataccgccgccagtaatattgctatttttgatgacgccgcgcagtcgctcggcattccgcctcagcaaatcagccatctggtgatgccacatctgctggcagaagcagagctcagcggtggcatgacgccggcccagcagcagcgtctggagcagctgttactcagcctgacgccgtggttcgacgcgatactgattacctgctctaccttaggtgccgcagcagacagcttgcgcgatccacaacagcgctgtgcggtttatcgcactgaccgtatgctggcggacgaagtgcatcgccgtggcgcacccgcgctggtgctgtgtgccgcggagtctacgctgcacagtacgcgccagctgttttgcccggagagtctggcacctgaccagcgtccgcaagtcaggcttatcccggatgcctgggccgcattcaaagctggccggctggacgactattacacgctgatcgccgatgccgtcactgagggacagcagcagggcggggttcaggtggcgttagcgcaggtgtcgctggccggggccgaatggattgtcctgtgccacagcggccactcaccagcccgcacctggcgct

SEQ ID NO: 1476 - DNA, 1007 bp, Zea mays
  misc_feature (1)..(157): n is a, c, g, or t
  misc_feature (758)..(1007): n is a, c, g, or t
  Peptide Sequence Number=SeqID_14216
  Probeset Number=SeqID_15879
nnnnnnnnnnnnnnnnnnnnnnnnnnnnnnnnnnnnnnnnnnnnnnnnnnnnnnnnnnnnnnnnnnnnnnnnnnnnnnnnnnnnnnnnnnnnnnnnnnnnnnnnnnnnnnnnnnnnnnnnnnnnnnnnnnnnnnnnnnnnnnnnnnnnnnnnnnnnncgacaaatccctcatcgaagaccaccgtcaacaacatatggaaaaggtaatcgaaatctcgcaagcctacactctgctcactagtgaggactggacgtgcaaacccgagcatgcttgaccggattgacgctgagtactacagaactacaccaagcttgaagagcattgctcagataaccactcgagatggaacttccgcttcttattcaaccatatgataagtacaaggctcgagcttattgagaaaactatagatgctgcgaatcattgctgtgacaccaagccatgatggagaactaatacgagtgactgtgccaccattgacatctgatctcagacaggaattatccgagacacccgccgggtctgcccggcgatggcgaggttgctataaggaacataagaagagatgcactcaaagcttacgataaactacagaaggaacagaagctttctgaggacaatgtgaaagatttgtcagctgacctacaaaaagtcacggacgagtacatgaaaaagatcgattccatccagaagcagaaggaacaggaactgatgaaaatctagatcttcaacaagctgagctgactgtgtatgactnnnnnnnnnnnnnnnnnnnnnnnnnnnnnnnnnnnnnnnnnnnnnnnnnnnnnnnnnnnnnnnnnnnnnnnnnnnnnnnnnnnnnnnnnnnnnnnnnnnnnnnnnnnnnnnnnnnnnnnnnnnnnnnnnnnnnnnnnnnnnnnnnnnnnnnnnnnnnnnnnnnnnnnnnnnnnnnnnnnnnnnnnnnnnnnnnnnnnnnnnnnnnnnnnnnnnnnnnnnnnnnnnnnnnnnnnnnnnnnnnnnnnnnnnn

SEQ ID NO: 1477 - DNA, 289 bp, Zea mays
  Peptide Sequence Number=SeqID_14217
  Probeset Number=SeqID_15880
atggccgcccgcagcgcgcgactcaactagagtctatttggtttcgtacctaagacgctacactctatctaaacatctagaagaggggggttgctcacatgccaaatcgcgcagggtctgctggagcctgacgccgcgcacaccgtgcggaacctgctcccggaggacgccggcggcgacctgttggcgctgtgcgtgtgaccggaccaggtgaggcactggtacaggtacatgtgcacgggcccgctccacttcatggacacccctgacgaggcctgcaggcatgcaa

SEQ ID NO: 1478 - DNA, 393 bp, Zea mays
  Peptide Sequence Number=SeqID_14218
  Probeset Number=SeqID_15881
atcaagaagcaggttcccatatattttggatttgaggtccttagtgcttcggcaatattttcaggcaaaaaaaaataatgttccttttttgcaaccggtggaagatatcattaggaataaaggaggtactggccgaaatggaaaattggctgcggaggttaattaattttacattgaataagggcccagatccttgatccagtttccagccatggcagaatttaatgccggactggacggcaaggggtcaaggggaaaaaacgaaataaaaagcccaagccagggcaattgtttggtaagggttcttggggacctttggaaccaaccaccagctctggtttgggtttccccgtccaaggtcaaaacttgctacgcagcaagactggatttcag

SEQ ID NO: 1479 - DNA, 522 bp, Zea mays
  Peptide Sequence Number=SeqID_14219
  Probeset Number=SeqID_15882
tatttcagttcccttgatcttctattagagcgtttatgcttagagggtacacggaggcaggctaaatactctgttcatgcacttgctgccattacaaaagatgatggtcttatgtcactatctgttctttacaagaggcttgtggatttgttggaagagaagaaagtgaatataccatctatcttgcaatctttgggttgtatagcccagatagcgatgccaatttttgaaacccgaaaagaagagataataagtttcataactaaaaaaattcttgagtgcaacgatgttcgaaattcttctaataaatctgaatggggtgatagcacagagaattgtttgctaaagatttatggcatcaaaacattggtgaagagctatctaccttgcaaagatgctcatgcacagccaggaatagagaagttaattgatattctgaagaatattcttacttacggtgacgtatctccaaatatggtctcaaggtaccagtagatacgtacctcttcaattgtgctgcag

SEQ ID NO: 1480 - DNA, 363 bp, Zea mays
  Peptide Sequence Number=SeqID_14220
  Probeset Number=SeqID_15883
atggcaaccattaaagatgtggcgaaacacgccggggtctcaaccaccacggtttcgcatgtcatcaacaaaacgcgttttgtcgcggaagagacgcgtaacgccgtatgggaagcgattaaagcgttgcactactcaccgagcgcggtggcccgcagcctgaaggtgaatcacaccaagacgctgggcctgctggcgacctccagcgaagcgccctacttcgccgaaattattgaagccgtggaaaatcactgctttgagcgtggttacacgctaattctcggcaacgcgcacaacgatctgcaaaaacagagagcctatttgtcaatgatggcgcaaaagcgcgtcgatggcctgctggtc

SEQ ID NO: 1481 - DNA, 320 bp, Zea mays
  Peptide Sequence Number=SeqID_14221
  Probeset Number=SeqID_15884
agtcgacctgcagtggtttagtgtggtacgcctacaaagatctggtgaagtttaaatttccccgcaccgccaatgagatgtatcacctgcgcgacgccgcgccgatcaagcgcgagatgctggagaaaggcgatctggtgttcttccgcatcaacaaccgcggcaccgccgaccatgtcggggtttatctgggcaatggtaaattcattcagtctccgcgcaccggtaaggacattcagattagcgcgctgggcgaggattactggcagaagcattacgttggcgcacgccgtatgatgacgccgaaaaccgtgcgctaa

SEQ ID NO: 1482 - DNA, 512 bp, Zea mays
  Peptide Sequence Number=SeqID_14222
  Probeset Number=SeqID_15885
gcacgagtgcatcagaagaggccatcaagcaggtctttgcgttccaagggcctttgcgtcagatcactgtccttctgccatggccctgtggatgcgcctcctgcccctgctggcgctgctggccctctggggacctgacccagccgcagcctttgtgaaccaacacctgtgcggctcacacctggtggaagctctctacctagtgtgcggggaacgaggcttcttctacacacccaagacccgccgggaggcagaggacctgcaggtggggcaggtggagctgggcgggggccctggtgcaggcagcctgcagcccttggccctggaggggtccctgcagaagcgtggcattgtgcaacagatgctgtaccagcatctgctccctctaccagctggagaactactgcaactagacgcagcccgcaggcagccccacacccgccgcctcctgcaccgagagagatggaataaagcccttgaaccagcaaaaaaaaaaaaaaaaaaaaaaaaaa

SEQ ID NO: 1483 - DNA, 306 bp, Zea mays
  Peptide Sequence Number=SeqID_14223
  Probeset Number=SeqID_15886
cgcgcccctgccacgctgggccccccaatcaaaccccacccaacccactccccgcccctgccagccccgcgccccccaatcaaaccccacccaacccactcgccgacccgcgtgcgccctctcgccagcttcatcgcctccctcgccataaccacccatgccgcacctcacccagcaactgtcaccacagatcatggggggaccggcgcataaaccccacgcggtcaccccctgctcacccctcatttcactacacgtccccttcccacctggctcgactccaccattgcctgccctctctatcgt

SEQ ID NO: 1484 - DNA, 491 bp, Zea mays
  Probeset Number=SeqID_15887
tgcatgcctgcagggcgcacatgttaatggggtgagcggctactggatcatcgctcaggcgcatgggcgtggatgacggcgtagatgactgtcacagcggccggattcaccgtattgacgaataggcgatccatcgacagctggataacaatgccattgagctgctgggtaccggtggcgcgtcttgtgtgaccaggcgaaagcttgaacctgacctcgaaagaggtggcgacgcagctggcgatcaagctgaaagccgagaagatgatctgtttctgctccgaacagggcgtaaccgatcgcgaaggctccatcatttacgagctgatcccgaccgaggcgcaaactcgtattgatgaaatggagagcgacggtgatcttctgttcggtaccgtgcagctttctgagtggtacgagtaaagcctgccgtagaggagtgcgccgcaaacatctgattagctatgcaagaagatggcgcactgcctgcagga

SEQ ID NO: 1485 - DNA, 779 bp, Zea mays
  Peptide Sequence Number=SeqID_14224
  Probeset Number=SeqID_15888
gtgccggccggcaaaacctttaaagcttttgataagccggccttttgtgtatttaaaaaagatgaagatatctggctcagggagcgttctcaggagcaggcagcacttacggatgaacgcaccggggaaaaagttcgttatctgtttcaaaatcggggtaaaccggtgggcagggacataataaatctcactggtattccggttctctgcgccagagcaggaatgcctgcggaagattcacgcggtcccattacaagccaccgaggccgagcttctgccgttacagcactggccagtggtaccgggggcatgtctttacatgagctgatgcagtggtcaggtcactcatacgcacagtcgacaatgcattatatccgcatgacgtccgactcagctggcagcatcgttcgtaaaagcagacagggtcgctcatatgatcagcgtgctgattgaccaccatccggaagccgcgagtctgaccgggccctcaacgtactatgatctgggtgactcatactgcacgaaccccttctggagcagctgtcagcaccggatggcctgcatcggttgcgattttaacctgctcaaacagagcgcgcgcggactgatactggaaagcaaagcctctgtcagacgttaccttgaggaagttccgctcacacccgatgagagagccatcgtggaacaggacgcagagaaaattgaacaggctcttaaaaggttgtccctcaaacccgaagggtaaaacgggccgctatgtgccagaagcggacgttaat

SEQ ID NO: 1486 - DNA, 325 bp, Zea mays
  Peptide Sequence Number=SeqID_14225
  Probeset Number=SeqID_15889
gcgtattccgcatcagggcaaagtgcgcggcgtgtgtgccgggctggccgagtacctggacattccggtgcggctgctgcgtgtgattgtggtgctgtcactgtttttcggtctgtttatgttcaccgtgaccgcctattttattcttggctacgtgctggatgaaaaaccgctggatgcaccctctgagcgcacaccaacggcgcgcgaactgctggatgagctggagagcacgctcaccgcggatgagcgtaacgtacgcgatatcgagcgttacgtgacctcagaaaccttcagcgtacgcagccgtttccgccagatttaa

SEQ ID NO: 1487 - DNA, 337 bp, Zea mays
  Peptide Sequence Number=SeqID_14226
  Probeset Number=SeqID_15890
ctgaagcgctgcaagctcagccttcagggaaagtctcaaatggctcaggaggaatcggcaaggctgggagaatctatggaacagagacctgagggaacccgggcagtagctgcggagctgcgccgagaaaatgaggacaaggtcctagcccacataacaccaggcgagggatctggccggaaaaatgtagaaagacatgaaggcacggcttcagacagaactaaacagctgccgttggaccgacatatcgatcccaacaaaagtgaaaaagggaccgaaacacatgtaaattataaaccatggaagcctctggggcgaaccagacaggcaacaagaa

SEQ ID NO: 1488 - DNA, 205 bp, Zea mays
  Peptide Sequence Number=SeqID_14227
  Probeset Number=SeqID_15891
aagtccaaagtcgtacaagtacactgaacatgatacgagaggctgacggaacttaccttttgtttatacctccaagcaccagttgcattgctgtcttggttgtcggtatttcaagaaaagcagataagggcacttttcaatgaaggtttcagcaggggcctcctgagtccagatatctcgtattcttactgggataagaatgaat

SEQ ID NO: 1489 - DNA, 921 bp, Zea mays
  Probeset Number=SeqID_15892
ggctcacgctggcagtctggcgacagcgagccggagatcgtgtatgagctgatggcgcataccggccgctatctcggccatgcgctgagccaggtgatgcagctggtcaatccggccagcatcatcattgacggcccgtggaatgcgcaaccggcgtttgtgcaggcggtacagcaggcggcgcaggccggcacgctggcgtttacctttgcccataccgcgctgcactttctgccgcagcgcatcgatccggccaacggtctggcgctggcggtgattgagcactacgaacgagcggctctctttgcggaccgcgcaatgaaaacgcagcgcatcactctggacgatattgcgactctcgcaggggtcaccaagatgacggtgagccgctatctgcgcacgccggaaaaggtcagggcggaaacggcggcgaaaatcgccagcgtcatggccgaaatcggctacgtcgccgaacaggaaaacaccgcggcgtcgcggcacccgccgccgcgcataggcgtgctgatcccctcattcaataatcaaatctttgccgatctgctgcccggtatcgaatcggtcaccagtgcccacggctatcaaacgatggtggtcatctacgactacaatccgcagcgcaaagagaagcagattgccacggtactggcttttaacgtgcagggattgattctcaccgagtcggtgcacaccgtgcgtgcggaaaagtacctcaacgcggccaccattccggttgctgaagtgatgggactgagcgagacgcgcgggcgcattaacgtcggctttgataatcaccgcgccggttaccacatgaccgccatgctgctggccagcggtaaacggcgggtgatttattttggctcgatgtccgatcgccgcgatcaacagcgctatgccggataa

SEQ ID NO: 1490 - DNA, 614 bp, Zea mays
  Peptide Sequence Number=SeqID_14228
  Probeset Number=SeqID_15893
gtacatgcgctcttgtggcctgctgcgtctgcgtggaggccaccgtctccagtacgagacgttccatggcgcaggcactttcccctgcagggcagcagcgcctcgcaagctcaggagggccttattgcccttgcgcaggaatttaacccaggacgaccataaggatgatggcgacgatgacgacgataacgataaggacgttggtgtggtttatgatgaagcttatttgggccgcgtgcttgccaagattcatgaactcggaggtgttagaacgacaaacgctccaccaccagcgccatggttcctccccgtgagatcttggcagctgcacagctgccttgttgggcccaccctggacatggatcgtgtctcaagcatacttgatcgtggcccgtgcgtggggagcatctggctgtgcccctggtggtcgctctttgacgcctccatcgacgacaactgggtctaccgaggctgtggccgtagccgtaccgatatgtccctgagtgccctgatgttcggcgaggaaaatgtgggtatgcacgctgttgtttgctgtgcgtaccgcatatgctgcgccgccgccgaggaggaagaagcttctgcaggcatgcaag

SEQ ID NO: 1491 - DNA, 389 bp, Zea mays
  Peptide Sequence Number=SeqID_14229
  Probeset Number=SeqID_15894
ccgacctcgacgccgagctggtgtccgcacgggcggcactcgacgccgccggcatcgacgcgacgctgcccgccgacggctccgcggccggcgacgacgtccgcagcctcttcgcctgggtgctgcgcgaaggggtcacgaacgtcgtcttttacgccgccgccagcaccgtccgggtgacgctcgcccgcacggccctgacgatcgaggacgacggcacgggcgcgaccgccggcagcgcagcgagcgtcgacggccggttcagcgtcaccggcggcaacggcctccgcgggctgcgcgaacgggcggacgccgtcggcgcgacgatcaccaccggcccgagcgacctcggcggcttcctgctgcgggtcgagaggagcagtcgatga

SEQ ID NO: 1492 - DNA, 221 bp, Zea mays
  Peptide Sequence Number=SeqID_14230
  Probeset Number=SeqID_15895
atgcactgtgaaaggtgcgtcaaggccatcaagaaggcgatcagaacgatcgacgatatggagagctatcacctcgagacggagataaacaaggccacggtgacagggaaggttaccccggaggaagttgtcaaggctctccacaagatcgatccgacctaccactaccagcttgatcatgctccacgcgcacgcgcgatgttcgagaccttgtctaccag

SEQ ID NO: 1493 - DNA, 400 bp, Zea mays
  Peptide Sequence Number=SeqID_14231
  Probeset Number=SeqID_15896
gcgggagctcgctagctgcgcctacctcaaagtcatagatcttcatggcaaccagctgtacggctccatcacccaggaactcggcctcctcgtacggctctcgaccttagacgtctcctacaacagcctctctggccccatcaccgtgctcctggccttatgctcaggcgccggcacggcaactgtatgtacggcgaggttctatgccagctccttcgtacggaacaagggcttgtgcgcgtaccagatgccgccgatacgtacgcgggggctctccgtgctcgccatagttggcatcggctttggcagcgggctgctcagccttgtgctcagcttatccgccgtgtgtttgtggctccgcgccacgaaccggcggactcccaccacctcgccactataa

SEQ ID NO: 1494 - DNA, 436 bp, Zea mays
  Peptide Sequence Number=SeqID_14232
  Probeset Number=SeqID_15897
tgcagtgtgtggcttgctacgcattttgtcgagcacctagcaagcaccaacgtcactgcgcagcagcacgcaagcatggaggtgagtgctgcacgcagggggaaacacatcaggggtgccatgggaagggaggagccgagctgctgcaatccatggaaaaagaaggggcacaactagggcagtcgctcccggtgctggcgcccaggacaggaggctcgtcgatctgcgctgcggctggaaaggggcgccatgggggaaaagaagagctcctgcgtcgaacagagagcagggggaaatggggcgttgggcagaggagggtgctggtcctgggcgtttcctggtcgcgggcagggaagagcaggggggcgccatggccatggaggaatggagatagcaggggagaagtgagggggagaagggcgttgtccctgctgca

SEQ ID NO: 1495 - DNA, 667 bp, Zea mays
  Probeset Number=SeqID_15898
tgcagaaagagctgccgtggctgccgctggaagaggatggacgcctgcacgatgatgcgatccgcgaaaactttatggggcgcgtctatgcgctgcatgagttcaacgaaatgtggcgcagcgggctgacgcgtcacaagctgattgccttccacagtcgctacaaactactgctgctgtcgcatgcgcaggatgagtaccgcgaaatggggcggtttgtcgcagcgatggaacagtgggagtcactggatgcgtacgcctttgaataccgtaaccgtctgatgcacctgatgtcgcaccaggcgtcgcgtcgtaatcacaccaatgtgctgatgcatgtacagggctatttccggccgaagctgagttcgccgcagcgtcaggagctggcacagctgattgatcgttaccgtcgcggtgtgcagccgttgctggcccccatcaccatgctgaaacattacatggcagagtttccgcacccgtggctggcgcagcagcgttatttcgatccctacccggaagcgctgcgtctgcgctacggccacgcactggccgcggcctgccgcgacagtcaggccgaggtgctggcgctgttcatcgccacgcccggccagtggcagcaacacagcatggcccccaaacaggcagcttttatccatcaaaacct

SEQ ID NO: 1496 - DNA, 428 bp, Zea mays
  Peptide Sequence Number=SeqID_14233
  Probeset Number=SeqID_15899
cgagtgtccccaccaatcagtgcagcggccggcacaaggtcctcgcaagcactggtcggtgcgggggccaccaaggggccctcgccaacatcggatggcggcgccagctcccctccagccccctccttcgcacccgacgcctcgggcagcgtgctctctaagcccccgaggtcgtcgacctcctcatcatgtgtcatcagctccatcgcccggtcggacctctcccggacattatcgcgaccgtgagggccccacatcctatcataaagtgccccggccgaacgcttcagcatcaggtccacaacttcgaagtgcctgcatccctcgcaggacaaggcattcacggacccgtcgcaggtgatgagcgaggcaaaagacatgaggttcgtcacaaccgtcggaagcacctccaattcctcctgtagcca

SEQ ID NO: 1497 - DNA, 649 bp, Zea mays
  Peptide Sequence Number=SeqID_14234
  Probeset Number=SeqID_15900
atggagggcatcgtgtgcgggcccggcggcaagtacaacaccatgccggacgagcgcgtcgagatcagtgaatttcttgatatggacgaaccgtggatggtgctgcgccagctggatgccgcgccgtgccgcgcgcagtcaccgcagctggcgattgacgcgtaccgtgatgaagacgatccgtggctggcggtggcgcaaagcctgacgcggcgcggctatcagcgggcgcggctgggcgcggattatgcatcctacggcatgacggtgcatagctggcagcagctggcgcgccatctgcccggggtgcgctggtgtgatgtcagcggcatcagcgaccggttgcgcagcgttaaatttcaggctgaaatcgccagcttacaccaggccgccagcattgccgatgccacgctggcccagctgggtgcgcaggtgcagggcggctggcgtgtgcgtgatgtcgccgcgctggcggcggcacaatttctgcgactcggtgctgacagcggtgaaaccggaccgattgttatcgccagcggcgacagcggatttttgcatgccagcggccatgagcagcgtctgcaagcgggcgatgtgctgcacgttgagctgatcccaaaagtgcggcactacagcgcgcgcctgatgc

SEQ ID NO: 1498 - DNA, 289 bp, Zea mays
  Peptide Sequence Number=SeqID_14235
  Probeset Number=SeqID_15901
ggagatccctctggagatgactacctgagtgcccacatccggacaaacggtgactggacacaggagctcatgcgcatctttgtggagaagtactcatcgccgcatctgaacagagtagctttgattgccgagctatgtgcggcagaaccaagcttgccaaaattacgtcgagatggtccctatggtgcccctgcgcaggattttagaaactacgacgttctacttctcgtcggactcagaatcggtgcaacaccgctcataagcattctacgggatctgcttaataaca

SEQ ID NO: 1499 - DNA, 743 bp, Zea mays
  Peptide Sequence Number=SeqID_14236
  Probeset Number=SeqID_15902
atgggcggacaggacatcgccaccgcggcccagtcgctcaaggcgacgtcggcgaccgcgacggtatccaacgcgaagacgggggaggtgctcgccctcgccgactatccgacagtggacccgaacaacgtcacgcccaccgcccaatccgatccgggagcgctcggctctcgggcgctgacggcagcctatgagcccggatccacgatgaaagcgatcgtggcgtcggcgctcatccaggagggcaaggcgacgccgacctccggcgtcaccgttccgtactcacgcacgttcccctggggcggccggatctcggacgccgagctccaccccaccgagaagctcacgatgaccggcgtgctcgcgcagtcctccaacgtcgggatcaccgagctcggcgaccagctcagtgcgcagacgcggttcgactacatgaagaagttcgggctcttccaacagaacccggacattcagttcccgggccagccgtcgtggccgaatcagaccagtccgaactgggacccgcagacgaacgagaactcgatgttcggtcagggcatcgcagcgaccgcgctccaggtcgcgaatgtgtatcagacgctcgccaacgtcggtgtccgcatcccgctgcatttcgtcaagggctgcaccaagcccgacggcaccgttatcgatgctcccaaggccacgccgactcgcgtcgtgtcgcagtcgaccgccacgcaggtggtcgacatgctgca

SEQ ID NO: 1500 - DNA, 318 bp, Zea mays
  Peptide Sequence Number=SeqID_14237
  Probeset Number=SeqID_15903
tgcatgcctgcagaagcagttagcctgggaacaggttttccaggagagacggatgagcaactctggttctttacccctcgcgtaatgcgaagttgcaggccggaggaacagcccaacgggaactctgccgttggcattttcatcgcggtcgcggcgtggcggcggggttggtcggggggaggcgacggtcggtggctgagggcccgcgccacgcgcctcgggcggaggcgtcacccgtcgcgccaagtgaagcaggcttcacaggggcagggagcgggggtgcacagaccgacagacggctacggcgaggacgttccg

SEQ ID NO: 1501 - DNA, 652 bp, Zea mays
  Probeset Number=SeqID_15904
agcccaccaccaagcctgttgaatattcagattggtgaggcaccaaggcgagcatggcttggcgaggaagttgatccccagtactcagatggattgctcagcccatccaaaaggcccgtggaggtttatatggcccaccaagattcaaggtggtttatatccaaggaggcaattgtatttgcccttggttttttaggcaccaaccagggtggccctgagccaccgttgtttaagcctcgtcgaaaaagattcgtccccaaaaaggccgcttcaggttgagtttagtggatttgccaccaatgttggacggattttgcttttgttcccctatgccaaaggggggtctcccccaattatggtaaatgagaaaaactccaaccgtcacccagcccagcccgtggtcaataggcgaaggcatcaaagggggttgtcctgggaagcgttggtcaaaaggagccctttcctattttttaattcaagggcaggggtttctttattttttggtaagaaaaaaaggttggtttctggtattgctgaggcaaaaagccccgtttagtggtagttcggtaagtttgttaaggccctggctttaccatgagatggattctgcatttttgtataaatcaaaaaactcccgcaagcatgttttttt

SEQ ID NO: 1502 - DNA, 1636 bp, Zea mays
  misc_feature (1521)..(1636): n is a, c, g, or t
  Peptide Sequence Number=SeqID_14238
  Probeset Number=SeqID_15905
cgggacgcgcccttgatttttcctgccgcccaagcgtcatcccgaagccttctctggattcttcttggagctgccgcaacctccatttcctacgcgcgctcttcctggattcagcgctgcggctggtcactacggcgcgctccttttcttcttccctagtgctcggtcgctctctggtctccacgcgcaccgcgtcagctccctccttcagcctgtctgctgctcgccccagcctagagcttcgctcggcttccagctccagcgcccagccaagcggcttcctcgcgtgtcttcttctctgttgctcgcctgtgctcgccgccgcgcccatctctctgttcgcctctgcgcacagctccccaagctccatggccggttccctgctcgcgtcgtggtctttcagctcgtcagcacttgttcagtcatctcggttcgctcgacctcaaattccagcacctcgccctgctctcgtggttcagcgacggccggcgcgagcttggccgtggtggtgttgtgacgtggcgacatcgtgcgcatcgcgacagctgtcttggccgcgaagcagtccgcgccacagagttcgctcggccacggtctcgtcgaactgcgaagctccattaccgtgcgctctggcatcggctgccgcagattccgccataatgttcatgagcgctctttgctcttcttatttcgccgtggacaatttctccactcttcaaatccgtgctgctcgtcccgcgtgcgctcactcctcatccatcgggttttggcgtgttcgcgtttgccgtcgagtcgtcgaacccgtcattccttgcttgactcccaagcaaaccccctggtccgtgttctgttcgtcgtcgactctcggcaccacaagctcatcttcccttatgcacatcttcatagaccatgtctcatcacacgtgtgcgttatcggtctcgtcgtcgttccatgcgtaatcaagaaatcccaagagtcgggtgaagacggagctagccgcgtgatatttaccaagtgctcggcgaaaggccagaacaagaatcatcaccgtttatgcggagttctagttaatatggagagattccaagaattgtggatagaagaaaaggtgaagcttcgttctatactcgtcagctgtttgatcgaagacttcaatcgaagactgtcgccattcttgcaaatattgaatcaagttaataatggtatgtgaattaaccacgtgatgcggagaaccagaactgagtcgaccacaagatatcgctacgcgtgagcttctccacaagatggtgctgatgaacggaactgaaggtggacagataaaacaagtatcagaacaaaagctgatcgtcaagtggaaatcgtctaacaaacactaacgtagtgtttattccaggttacgagtcaattgattgtgattggtgttaagcgccggtgggcacgaccttctataagtctaagtacttcttctatacttcttattgaggatggtcacttaagctagcatatatttcaaacttatnnnnnnnnnnnnnnnnnnnnnnnnnnnnnnnnnnnnnnnnnnnnnnnnnnnnnnnnnnnnnnnnnnnnnnnnnnnnnnnnnnnnnnnnnnnnnnnnnnnnnnnnnnnnnnnnnnnn

SEQ ID NO: 1503 - DNA, 490 bp, Zea mays
  Probeset Number=SeqID_15906
cctctgaaattttgtacacaagggggggccacctgctccttcgtttccctcgccggcggctttgtcctggctgcactcccagcgaaacctacgagcggcaccgcatacaatgcggcgccgcgctcaagccacaccttgtcgggcaccaccggggggcagaacccatacgcggcgcgcgcggacctaccacgcctcggcgccacactacactacaactacacgggtgccaccaacacagtggccgtcgcgttccgatcgccgcaggccaagggcgactacaggtgggtggcacgggggatcaacccgagcgggcctgccggcatggtcaggacacaggccctggtcgcgtgccagcgctccgacagcagcctcgtcgggtacccaacgctggtcgacagctacccgccgtccatggggcccggggcgcccggggatccggcgaacccggggtctgacatggcggccgactacgtgggactggaaggagatg

SEQ ID NO: 1504 - DNA, 201 bp, Zea mays
  Peptide Sequence Number=SeqID_14239
  Probeset Number=SeqID_15907
atgaggagcaggacgcaggacagaagccagtgccgggcaccgaagaggacggaggacgacaacaacaagaaacaggacctaaacagcccgaaacgatacaaaaacgcggcaggaagggacaatggggacaggcagcgcgcggaggaaaccgccggcacgggcaggcacaagaagacagcccccaagcccaaggagggatag

SEQ ID NO: 1505 - DNA, 320 bp, Zea mays
  Probeset Number=SeqID_15908
acaatatctcgcgccacctgggtcatgacgaggtgacaaacgacgacaaccctaccctactgctggccttggtgccggtcatgcacaaacagggaaaagatctggacctcgaatgcgtgcacgggcatgagaaggtttccaacacccaatccgtgggggtgcttaccaccactgatgaagcgccgggcgaggtcctccccgacggctaccacccagtcatcccgaggccactgctaacggttctccgacacagcgatgcgcccttcatggaaaacgattcccctgactacccactgcacaacgacaagctgctcgactag

SEQ ID NO: 1506 - DNA, 305 bp, Zea mays
  Peptide Sequence Number=SeqID_14240
  Probeset Number=SeqID_15909
ctagttcctgtgggcggtgcgcgcccaggagcgaacgaccacgagcgagtcagtgggcgtggttggcgtcaggttaggatcgtctgttcggaattggggggtgcgtccgtgcgtgttgcggttgcggaagtccgtacctctcgcctggcccggcccccatggacattttctacaggtttcttggatctgccgaaacggtggtttccgggcctgaaacggcaaccgcttcctgacgtcgacacgagtacacgacggggtacccaccaccaggtgcctcctctggcctgcatccatctgcatgccgc

SEQ ID NO: 1507 - DNA, 349 bp, Zea mays
  Probeset Number=SeqID_15910
ccggagccagaacgccggcaggggcggcggagcgcggggcactggccagaagggcacaagaccgccgaccgccggcgcgccagcggcgacgaccgcgccgcgctcggccgccccgtcgccagcgccgcggccgaggaccgccgctccttccgggcgctctgctcgccggcgtgccgcgacgcctgccccaacgtcgtcgacctgtgcgccaccctcgccgccgcagaaggtatgtcgctgccggcgctgtgcgaggcgcagaacaaggctgggaaccggcgcatgatggctgggatggccccagtcgccgctcccgtggccgctccggtggctgctgcgccagctccat

SEQ ID NO: 1508 - DNA, 370 bp, Zea mays
  Peptide Sequence Number=SeqID_14241
  Probeset Number=SeqID_15911
caagtggaacgcgaagaacggccagctcggcctcgtggtcggcgccacgttcccgaacgagatcgagatcgtgcgcgggatcgtcggcgacatgccgctgctgatccccggcatcggcgcgcagggcggcgacgtgcaggcgaccgtccgcgcgggccgcaccgaggatggcaccgggatgatgatcaactcgcggcgcgatcctgtaccagcacgggaggacttcgcgaagccggggctcgccggaaaacccgacacgatcaacgcctgtgtcgtcgacgacctatcgatcttcgttgatacatcgccggcgaccggtcggggttggcgccaggcccgcgcacgcgggccggcgccgcatcctcccgtt

SEQ ID NO: 1509 - DNA, 216 bp, Zea mays
  Peptide Sequence Number=SeqID_14242
  Probeset Number=SeqID_15912
atggacccggcccgcatacgggggctggaggaacaggtggggaaccgcatcgcggcgggggaggggatacagcgccctggatcggcggcaaaggagctcgtgaagaacacgctcaacgccggcgcgtacacagactacgacatcggcaaggatggaggactcaacctcatacaggaaaccgaccacgcgatacagatgatggatatgctccgctga

SEQ ID NO: 1510 - DNA, 252 bp, Zea mays
  Peptide Sequence Number=SeqID_14243
  Probeset Number=SeqID_15913
ctggggtggtttagagacaaattggtctggtaaaccaagaacctgctctttttgcacaacaatcctcgagatatactgtatggaaagccatatgcaactattgcagaagttgaggttgcagcgactgcatccagatccaatgcacatagtttcatatctcttcttctgaatggttacaacacaatggtatgtctatattttttttcgacatacatgtaagtctggtctaataaattaaatactaatttcttc

SEQ ID NO: 1511 - DNA, 313 bp, Zea mays
  Probeset Number=SeqID_15914
ggcaagacaggcaagttcacctgggacctgtatgaccggctgcggcgctacgaggatgagcggctggttgtcgaatttggctatgacgcgttaggccgccgggtgtacaaggactcgcgctcgaagtaccgcaaacgggtacaggctgggccggtctggaacgagaatgcgcggcgagcgctggatgacaagctgggctgtgatctgacgctgttcatctgggacggcgacaccctggcgttcgagcagcgcggtcgggatggcaagggaaagaccacccactatgtgtttgaaccggggacttttgtttcgg

SEQ ID NO: 1512 - DNA, 515 bp, Zea mays
  Peptide Sequence Number=SeqID_14244
  Probeset Number=SeqID_15915
gcaatcaggcggcggatacgctgtttttcaacgccgacgataccgccgagcgctacagcatgagcgagacgctgcgcggccagcacaacgtgtttctcacggccggcagcgtgttgcgttctaatcttgatcggccgatgctgaccatcaccgccgatacctgtggccgtcacgatacgctcggcggcgcctgctcgtgcgagagtaatacggtgcgttatgacctcgaaaagcgccacatgcactcctgccgcgacagctggatgctggcggtcgccgcgcatccggagtctggcctgacgcgccgcgatatcacgcacaacattaactttttcatgaatgtgccggtgacccacgacggcggcctgacatttgccgatggcatctccgcgccgggtaagtatgttgagatggtggcgcagatgaacattctggtgctgatctccaactgtccgcagctcaacaatccctgtaacggttacaacccgacgccgattgccgtcagcgtgtggtga

SEQ ID NO: 1513 - DNA, 331 bp, Zea mays
  Peptide Sequence Number=SeqID_14245
  Probeset Number=SeqID_15916
ctgcttcagaatcataaagtgtcctttgttcctggttgggcattgccacggccttccaatagaactaaaagttttgaagtcaatggataaggaaactttgagtgctcttacacccataaaattaagacaaaaagctgcaaaatttgctaaagcaacagtcgatgcacaaatgaaatctttcaagcggtatggtgtatgggccgattgggacaacccttacctaactctgtcaccggaatacgaagctgctcagttggaagtgtttgggcaaatggttatgaaaggatatatctatagaggacgaaagcctgtccattggagtccatcatca

SEQ ID NO: 1514 - DNA, 765 bp, Zea mays
  Peptide Sequence Number=SeqID_14262
  Probeset Number=SeqID_15917
atgctggtggctggtagcgggctgctgattctgtggctatggaccacgcccgcgatcaaggcggttaaagcgctgagctggatccccggcccgctggtggcggtgctgtttggctgcctcgccacggtgttgggcgatcgcctgtttcccagcctcggcgaaggcctgccgcgtatcgtactgccggcgtttgacagtatgtcggcgctggtggcggagctggaaaccccagactggctggcgtggcagaatccgtcggtgtgggtagtagcgattacgctggcgctggtggccagccttgaaaccctgctcagccaggaggcgctgaaaaaactgcgtccgcagcacccggcgccgtcaccgaataaagagatgttcgcgcagggcatcggtaacctgaccgccggcttgctcggggcgatgcccattaccgcggtgattgtgcgcagttcggtcaacgtcagcgtgggtgcccaaaccaaactgtcgattctgctgcacggcgtgctgctgctgatttgtggcttgtggttcagcgctctgcttaacgcgattccgctcgccagcctggcggcggtgctgctgtataccggctataagctggcaacgccgcgcctgttcgtcgaacagattcgcatgggcgcgcagcagtacgtgccgtttcttgccaccatcggcggcatcattgtgtttggtatgctggccgggattggcatcggtatcgcgacgcagattctgtgcagcatctaccaaagccatcgcaac

SEQ ID NO: 1515 - DNA, 488 bp, Zea mays
  Peptide Sequence Number=SeqID_14263
  Probeset Number=SeqID_15918
ctgccgccccctatcccgctgatccgcggctgccgcctcatccctggccctaatcacgccccctgtcctgtcggagagcgagtgggacgggagggcgagcacgcggagctcccgcaatgctgtgatggttggggacaccgtagaggaggggtcctctccaagtctcgtgacgtgacgctcctcgatgaaggagacgacacgaaggaggggtccgtggggcggtcgtggtcgctggcgcggctccacgcgcggagggacttcttgcgcgtgacggcgttggtcaccgagcgtgcgttccagtcgctggatgcgctcctggtcttggagagggtgctcgccaagttcctcatcatgtatcctaactacgcgtccgcctcagatgtggaccgcctccgcgccgatgagtacctgcacttggacaaggtatgcctccactgcggctttggcctcttctcctacctctaaagttgcaactctccaactcgtca

SEQ ID NO: 1516 - DNA, 539 bp, Zea mays
  Peptide Sequence Number=SeqID_14264
  Probeset Number=SeqID_15919
agttccgctcgcttcgctctttcgctgtagccaagaactcgttctcgtcctcgtcccgttccaaagatccagcagcaatgaagggcatgggcgcgacggagacggcgccggcgggcaaggcggctccggcctcgcacatgccgatgccgatgacacgcgtccttctcctgctctgcctcctcctcgtgctggcgctcgccgcgctcaccgaggcgctcgccgccgcctcgcgctgcgtcgcgcgccgcggcgcgggggcagaggcgggacgccgcgtcccgcgcgtcctcggccgcgctgctcgcggcggcgcacgcggccaggatgggcacggcgtacctcgtcatgctggccgtcatgtctttcaacggcggcgtgctgctcgccgccgtcgccggccactcgctcggcttcctcctcgcgcgaagcagggtcgtgcaccctggcggcggaggtgccgccgcagccgctggccgtgaccacgggctcggcggtggtgtcgtgggcgtccatcctccggatggctccaaggcctaagg

SEQ ID NO: 1517 - DNA, 528 bp, Zea mays
  Peptide Sequence Number=SeqID_14265
  Probeset Number=SeqID_15920
acggggagcggcatcggattcggcgagggcgcgcagcagcccctgccgcttcccccgtgcagggtccacccgtcagggcgtgtggggcccgcgcgcgctgtgggcggcccacacccacatggtagggtactgaggagggcgccccatgacccgttcctggccgcctacgtggcgtgcagcaagagcgccgctgaggcagtcgaccgcccccaccagaagcggagacagaagcaagggaggaggaggaaggagaaggaggaggaggaggcgacgggaaagaaatgcggcgaggtgctgtttcggggatgtggggtctggagcgggtgggcggcgggcgccaagtacgccggggcgatgtcgtgcaggtacggctgcgccgtcgccgggcaggacggagacgcagacgcagacgcggccaagaccaagaccaagtctgaggacgacgcgccagggggcccaacgctcgacctgtcgtggacgccggcggtgctctcggcgagggccctggaacggagggagcagcgctga

SEQ ID NO: 1518 - DNA, 239 bp, Zea mays
  Peptide Sequence Number=SeqID_14266
  Probeset Number=SeqID_15921
gacaatattcagtccaccaccagcccaacagctcgacttggagcaaagtggggtgaatacactaggaaccaggtaagaggggtagttatgaaccctgtggaccaccccatgggggtggtgaagggaaagcccccattggtagagaaaaaacccacaaccctttgaggggtgaagaagcatgtgaccattcaagaatcaggatcaagatgcttaaccagatcagagtgcaagacagtccg

SEQ ID NO: 1519 - DNA, 308 bp, Zea mays
  Peptide Sequence Number=SeqID_14267
  Probeset Number=SeqID_15922
atgtttgtctcccaccttgaaaacaataaacttttgtgcaggaggatgttttgcttcccggggttgtccaaggtccctaggacaaggacaactataggtgggcctaataccttgagaggttccgtcacactgctgcggtcgctccatcacaagcacattctcaagctctacacctcatgggtcgacaacaagaagagggcggtcaatataatcactgagcttttcacgtccggcaacttgagagagtatgtaaatgtaacataacccctccttatatcttttttgctttccattcagaaggacagcag

SEQ ID NO: 1520 - DNA, 309 bp, Zea mays
  Peptide Sequence Number=SeqID_14268
  Probeset Number=SeqID_15923
atggccaataagcacgagacccatgagtccggcacgaagctcactctttgggtccgattcgagctcagcacggcccagttctatgcgggcttaggccggcccgacacaaataagcgggctgggcccggacagaaaactaagcacgagaaggagacgctcctgcgcccaggttgcggaccatccggtcttgtgccgcggatcgtccgcgcctccgcagagggcgctgacaggcggtttgttccaatgtttgacgtccgcgcctccgcagagagcaccgacagatggtctgttctagtgtttgacgtctaa

SEQ ID NO: 1521 - DNA, 470 bp, Zea mays
  Probeset Number=SeqID_15924
attccaagccgatgccttttattttttattacagcccggccgcgctacggtcgctgctccggccgccgcccaccgacgagcgttgggcgaagcactccggggcggcggcgggggccggcggctgccttgaggctgttcaagatgttcaagctcctgcccgtgctcaccacgggctgcaaggtggccgtgatgctggggcggcgcaacaaccaccgggccctgctggccgaccacgcgccgacggtgacgctgttcgggcaccggcgcgggcggctgagcctggccatccacgaggacacgcgcgccccgcccgcgttctctcatcgagctgcccatgctggcgcccgcgctgcaccgggagatggccacggtcaccgtgcgcctggcgctcgagagcgacacgcgcggcggtgccgcagagcgcttgcgtcgccagccgctgctgtaggagtacatatggtcggcctact

SEQ ID NO: 1522 - DNA, 751 bp, Zea mays
  Peptide Sequence Number=SeqID_14269
  Probeset Number=SeqID_15925
tgcaggactatcctttcagctacagtgaaatagaaccctattttgataagtttgagaaaatttgtggtgcttcaggccaggccgggaacctgaatggcaatatcatcgaaggtggcaaccccttcgaagcgcaacgcgcgaatcctttcccgaccaaaccgttgctttaccagtattctgccatgctgtttgaaaaaaccacgaaagaactgggctacaatcccttcccgggtcccgccgccatctgcactgaggcatataccaacccgtacggcgttgcgctcggcgtctgtaactattgtggtttttgtgagaaattcggttgctataactattctaaagcgtcgccacaaaccagcgttatccccgcccttaagcaatacgataactttgaattacgctgtaaatcacatgtgcttcgcgtcaataaagacaacacgggtaaactggccactggcgtaacctatattgatgaaaatggcagtgaagtcgaacaacccgccgcgatggttatcctcagcgccttccagttgcataatgtccggctgcttttgctgtctaaaatcggtaagccttataatcccgagacaggcgaaggcgtggttggcaggaattatgcctatcaaatgttaggcggcgcaaaactgttcttcaataaagagacctactttaaccattttgccgccaccggtgcgtcaggcgcctatattgataattacaacagtgaaaacttcgatcactctgctgcaag

SEQ ID NO: 1523 - DNA, 280 bp, Zea mays
  Peptide Sequence Number=SeqID_14270
  Probeset Number=SeqID_15926
ctggtttttttttgggctttgtggagggtgcttcgcatctcatgcgcgacagaccggggttcccgcagcgcttcgccttggttgtccgtccgacgcagcacgtcctgtgcgggaccttctctatgctttgtgggggcgggtcctgctgtactcccttgcctaggcctctccgctgtcgccgagtgcgggcctggcccttctttagatccgggttcttttgttgttcgggccccctcgggccgtctttgttcctgctggtttctctgtaagtcccctgctg

SEQ ID NO: 1524 - DNA, 611 bp, Zea mays
  Probeset Number=SeqID_15927
tgcaggcgctgctgcttcaggctacacctcatcgataacccgcacgctgccggccggccattcctcgtagcggtgcgcatggaagatcccgccttaccgaccttgctgagctacgggcacggtgatgtggtattcggcgatgacgaaaactggcgcagcgggctgtcgccgtggcagctgaccgaagagggcgatcgctggtacgggcgcggcagcgccgacaacaaaggtcagcactgcgtcaatcttgcggcgctggagcaggtgtatcaggcgcgcggcggccgtctctgctttaactgcaaatggctgtttgagatgggcgaagagatcagctcgccggggctggcgcagctgtgtcagcagcaggcggaactgttgcaggctgacctgttcatagcctcagacggcccgcggctcaacgccgtgcggccgacgctgttcctcggttcgcgcggtgcggtaaatttccgcctgaccatcaacgcgcgtgacaatgcttatcactccggcaattggggcggactgctaagcaatcccggcacccggctggccagcgccatcgccacgctggtggacgcacagggcgtgctgcaggtcgactctaaagg

SEQ ID NO: 1525 - DNA, 286 bp, Zea mays
  Peptide Sequence Number=SeqID_14271
  Probeset Number=SeqID_15928
tgcagttgttattgtgtcaccgtctaaggtgatggcatcatatgctatcaggttacaattccagagtacaaacaatatagcagaatgcgaagctttgttgttgggactaaggaagctgaaagtaatgggtgtacgaagagcagtattaaaatcaggttttcatgttaccacaagccaggtggataaatcaagcaaggtgaaaagttctaatatagagaaatacctcaatatggttagaaggatggaatcttctttcgaatgtacttgtattattttatgaacttca

SEQ ID NO: 1526 - DNA, 369 bp, Zea mays
  Peptide Sequence Number=SeqID_14272
  Probeset Number=SeqID_15929
gaggagctgagcccgggctgcggcgcgtgggccgacgcgctggagttcctctactaccacaacctggtgcggatggcgttgctggagccgccgctttttttgtccccgggcctggagcagtactccgactggtgggcggctctttgccgaggggactgggcgctgggccactccttccccgacgggcagttggcgctccgggagaacgtcttctgcggcggcccctgcggcgcgtggcgaccccggtacgccgtctcggactgggccggcgagggcgccgactactcgaacgccgacaacgcatgcgcgccaggccgggagtgcccgcactacacccagatcgcgcggcgacgcaccacccccgtccgc

SEQ ID NO: 1527 - DNA, 473 bp, Zea mays
  Peptide Sequence Number=SeqID_14273
  Probeset Number=SeqID_15930
tgcagcagatcgatccgcgcctcagcgaagccgccgccattgaaggcgcatcgcgcggttactttttccgtcgcgtgcagtggccgctgctgctgccaaccacgttgtttgtgctgatcaacgcctcgatgaacgccttccgcattgtcgatcagtttctgggacatgccagccgcgtcggccatgacggtagtgctgctgctgcatcctctccgggcggttttgcgctcaacctgctgatttggctggccgtactgctgtggagcttgccgatgctggtggcgctgtggattgccattcatccggctgccggccaggggcacttttcgctgctggcgccgctgacgctggcgaacttcatcaatgcctggcacgcggcaccgtttgcccgctacttcctcaataccacgctgctggtgctgatgattgtgatggtccagctggtgctggccacgctggccgcttatgcactg

SEQ ID NO: 1528 - DNA, 276 bp, Zea mays
  Peptide Sequence Number=SeqID_14274
  Probeset Number=SeqID_15931
gcgcacgggccgtgaggccgccggggcacgggctcgggcagggcagggacgcgcgagggcgcggccgggggcacggccaggggtgcggccgagggcgcggccaggcgcgacagggcatggccaagggcgcggcagggcgcggccagggtgcgagcagggcgcgcggtcagggcgcggccgccggcgtgcggggccggggcacggggcgcgggggcgtggcgcggccgccggcgcgcggggccagggcgcggccgaggaggggctcgccggagaggg

SEQ ID NO: 1529 - DNA, 437 bp, Zea mays
  Probeset Number=SeqID_15932
tgcaggggaactcgcagctgggactggaatccgagctggagcaccacgacgagcgcaggggtgcgacatggacacaggagcgcgcacaagggcagagggaagcgcgcgcaagagccaggcgcggtccggtcgagcaggacgcggccatggacagcaagcaaggaaacgggagggagaacttggctggagaagatgcaccggcagagggaccttggagatggccgacgcagcgagcagggaggaattggggaagggctgctcgcgcaggaaacaataagcttggggcgcgccagccatggcagggaccagggagctcgacgagcgctgggctgctggaagacggcaggaaggagaccccggccgggagcttggaggaaggactgaacgtacgcaggctgggcggccagagtcatccatggcgcacggcggggagatga

SEQ ID NO: 1530 - DNA, 525 bp, Zea mays
  Peptide Sequence Number=SeqID_14275
  Probeset Number=SeqID_15933
atgaccaaccggcagaatccgctcggctttaccctcagcgccgagcgcaaacagcagctggtggcgctgctgacgcgttatcaggtggcgatgatagaggacgacgtctacagcgacctgtatcacggccacgataagccgttgccggccagagcgttcgaccgcgagggttacgtgctgcactgcggcagcttttcgaaaaatctggtggcgggatttcgcgtgggctgggtcgcggcggggcgctatgcgcagcgcgtgcagcgcattcagatgatgagtacgctctcgaccagcgcgccgatgcagctggcactggcggattttctcagcacccgcagctacgatacgcatttgaaaaagctgcgtcagacgctggctaagcgcaaacagctggcacagcaggcgctgcgccgcgtgctgcccgccgaggcgcacatcagcgatacgcccggtggctactttttgtggattaccttgccggagcagattaacgccacgcagctgtatcatctggcgctgcac

SEQ ID NO: 1531 - DNA, 425 bp, Zea mays
  Peptide Sequence Number=SeqID_14276
  Probeset Number=SeqID_15934
tgcagcgccaggtggttgctgatatgctgcgtgactgggacaagcgctatcctttccgcattgaaaccatgttcagcgccatgcagaacatcgtgccctcgcatatggctgatattaatctgtttgatttcaaaggcattaagcatggtgatgcggtggttgacggcggggacattggtttcgatcgcgaatcgctgccagcgcagccggtcggctggcaggctgacgaggacgatcagccggacctgagcgctcgcctcgacgcgcgtcgctccggcaacgcgccttttgtattagcggtgcggtggaggatcgctaatcggcggaaattcaggatcgtgcggcggctcaggctcgggaatgggctgcggttgcggcacgggttcgggaatcggtggcggatcggtcgggataggttcgctggc

SEQ ID NO: 1532 - DNA, 383 bp, Zea mays
  misc_feature (66)..(66): n is a, c, g, or t
  Peptide Sequence Number=SeqID_14277
  Probeset Number=SeqID_15935
gaggcagactcggtgccataggctcctgcatgagttggggtctagggaaggataaggggcgccccntgcaaaaaggccacacggatgggcctaccggttccttagcaccaacacaacaattgtataccactggtcatcaacgctctgtgatttggagcccctgaacgcatcagaccgagccaccaattatgccatgcacctggaccgcccccctgcttttttgaagagcaacctccacaggctccatgtcctgtttcttaacacccgccaccactgcaaccgggggaagctgaaggcaaacaagtggcagaagtatctctttggaacgccgaacaacgacaggaacaccaccggcattttggaaggcaaataaactttacccg

SEQ ID NO: 1533 - DNA, 265 bp, Zea mays
  misc_feature (246)..(246): n is a, c, g, or t
  Peptide Sequence Number=SeqID_14278
  Probeset Number=SeqID_15936
atgcgtaatttctgggaccgcaccggcggcctgtgggcctctggcgcgctgtacggcaagattgccagcgtgtttgcgtctaccggcaccggcggcggtcaggagcagactatcacctcggtgtggaccaccctggcacatcacggcatggtgattgtgcccatcggctacggcaccaaagagttgtttgatatttcgcaggtgcgtggcggtacgccgtatggcgcaaccacgctggcgggcggngatggatcgcgccagccct

SEQ ID NO: 1534 - DNA, 419 bp, Zea mays
  Peptide Sequence Number=SeqID_14279
  Probeset Number=SeqID_15937
tctgatgacttagcaaatcatatcgcagacatacttgatttttttggactggattcggttatgtgcttacgtgtcactgcgggcgcatacattcttactctgtttgcagtatgcatttattccttattgcagacgacgtatagggagcgagtactaggacttattctcgcttcacctctatgtaaagctccctcatggtctgagtggttatataataaggtaatgtcaaacttactgcattattatggcatgtgcaatgtcctgaaggatattatgttgcagcgctactttggaaaggttactaaatggcttatgttatggtatgccaatgccatatttgcctaggtgcttaacactatgtgttcgaactttatggaggacgtggaggctcagggggatacttctacagccacctgcat

SEQ ID NO: 1535 - DNA, 255 bp, Zea mays
  Peptide Sequence Number=SeqID_14280
  Probeset Number=SeqID_15938
cgacgcaaacacgggtgctggaaggaggatttcgacgcccagcgccaggcatggtatcagcagtacgcggctgcccaggctcgatggcaggcccacaaggctcaggtcgtcaaggcgccctaggccgagcccgcggcgggcaacagcttcggcggtgcgcagtcctcgttctcgagcgactccgccggcgccggcacgctggccgtcgacgaggctctcgccgctctgcgcgagaagctctcgggcggcaacgcg

SEQ ID NO: 1536 - DNA, 206 bp, Zea mays
  Probeset Number=SeqID_15939
atggacatgtcacgcgtgaaacacgctcccggcctcttgcacgagcacgacacgagcctgccgaagcaagctgccgaaacaaagaccagctacatgcagtgctgcagccggcctatcacgtccggcccgagagaggcccattatgttttcctttcaaacatagagggaaattatggccgcggccacggcccacggaccacggcccg

SEQ ID NO: 1537 - DNA, 808 bp, Zea mays
  Peptide Sequence Number=SeqID_14281
  Probeset Number=SeqID_15940
cgcgctcgctgacgcccagcgccgcctccaggaggccgacgccgccacccatgttcctggtggtgacgacagcaccacaccggaggccgatgacattgcctcccttcatgcacaggccctcggtatcctcaacgtgcgcgccctcgtccccgtcgtcctcgacctcgacacgctgtcgttctcccgctggcgtcgcttgatcctgctcgtcctcgacaaatatgccctggtcgatcatgtgctgagcgacgtcgcacgccccgacgtgccgcactggacacgcatggactcgcacgtcctctcctggttgtataccgccatcaccatcgatctctatgacatcgtcacgacgtccgcgccaaccgcccgcactacctggctcgccctcgagcaacagtttgtgggcaacgtcgacaccgagttccgcaacctcaaccaaggtactctctccatcattgactattgccgcaagatgaagaccctggcggactctcttgttgagctcggcgagccggtgacggatcacgtactcacccttaacgtcctccgcggcctatacgagcggttcgagtacattcggtctttcctcaagcgccagcggcccctctccaagttcgtcgaggtctgctctgagctactcctcgaggaactctccatggcgccaccgtctgtcgcgcccactgcaccgacaactgccctcatcgccagtgcccctgctccctccccctgttccacgtcgtcctctgccggtgggggtggcgggggcaaccgtcgtcgctgttgcaagacagacggcagctgtaagtag

SEQ ID NO: 1538 - DNA, 519 bp, Zea mays
  Peptide Sequence Number=SeqID_14282
  Probeset Number=SeqID_15941
agcgtcaccgacggcatcgccgccctgcgcacgagcaacttgctggcgcccgaaggcgatgtcggccgcaaccagcgtccccaggaggaccaaacggagcaagagcagatcaaccagcacgtcaaggaggccctggaccgcgtgcagttgctgcacctcgccgtccgccgggcggacgaccatgcggaaagccagctcggccgctgcatcgcgaacctggagcagcgcgcggacgtgcacgcggcgctcctgcgcacgctccagcagtttcagaaggagggcggcaacctgccgaccctgcccgagcacgggatgtgccctatatgcatggcggccccggtggacaccgcgatgatgccgtgcgggcacacgctgtgcaaagcatgctacgcaaagatgaccgtccagaatcggtgccatgtgtgccgcggaacggcatccataatccacctgcaccaagtaaggcgggggggggggttgttctgttttggctgggcgctgggagggcctactgcaggc

SEQ ID NO: 1539 - DNA, 247 bp, Zea mays
  Probeset Number=SeqID_15942
gacccgtggtgatagctctacagtcgacctgcagaagaagggatcaaggaacagcgaccagagaaaggctgcgtctgctgctgctcctacggctgctgatgctacgaacaagaggcccagggttagtgccttcttccgcttggatggcagtaagatcaatcctggatccgcctatggacggcggcacgcggaaagcgcgggtggtggcacggagaaggggcatggcggcgacagcgggcacaggtga

SEQ ID NO: 1540 - DNA, 1316 bp, Zea mays
  misc_feature (1)..(66): n is a, c, g, or t
  misc_feature (1316)..(1316): n is a, c, g, or t
  Peptide Sequence Number=SeqID_14283
  Probeset Number=SeqID_15943
nnnnnnnnnnnnnnnnnnnnnnnnnnnnnnnnnnnnnnnnnnnnnnnnnnnnnnnnnnnnnnnnnnagtcccatctgacggaccttgttccctgtgcccgcccacgtggcctcctctgcagccgtccagatggacaccgccgcgcccctgcaactgaaagcctgcgccggcgacgccgcggagaagctgctgctcgccgtcgcagccgagggtcctatctgtggtgtgccagacttcaagatgaggggaaagaagagtgatgagctcgaacctgtcgatgctggcgatgaagatgatgatggtggtgacgatggggacgaggatggtgactttggggaggagggtgaagaggacgtctcagaaggggagggatatgacaacccaaagggcaatgagaccaagaagcaaagaggtgatcctgaggaaaatggtgaggaagatgaggaagaaccagaagatcaggagggtggcggcgacgacgatgatgacgacgatgacgatgatgagaacggggatgacgaggacgacgacaatggggatgacgatgaggagggtgtagatgaagaagatgatgaccaggacgaggatgaggaggaagatgatgatgaagactcgctccagcccccaaagaagaggaagaagtgaagatcttctgcggctttagttaccgtgcgctgagttctgcctggcttttcgtcatatcctcgcatttcaactttcccatagagagttaagaaggatccacacgttcagcagcacgtgtgggcttgtaggagctttatgatatggggctattaaggacaactcttattggattgtcgcttgcttctgggtgtaaacaaaaaattcccgcccaagctcgacgaggtggaggaggatgatatggaacctcgctccagcccccaaagaagaggaagaagtgaagttcttttcccgctttagttcccgtgcgttgagttctgcctggcttttggtcatatcctcgcatttcaactttcccataaagagttaagaaggatccacacgttcaccagcacgtgtgggcttgtaggacctttatgatttgaggcacttcagggccaactcttatgtcattgttgcttgcttttgtggagccccccccccaatatagataacataattcgacttgagtaataaaagcccccagattgaataggccttctcttttatctggtatggaatcattgatgcagcccaaaaaaaaaaaaaaaaaaaaaaaaaaaaaaaaaaaaaaattttaaaaaaaaacccccccccccccggccgtctagaggtccaaaatacgtacggcgtgn

SEQ ID NO: 1541 - DNA, 233 bp, Zea mays
  Probeset Number=SeqID_15944
tgtttgagaggcttgaagatgctattcacagggatactctaattgatgatgatgaaataggagacgggcaactatgtgttgtgtgcttaagaaaaaaaaggagggcagcttttattccatgtgggcatcttgtctgctgttctgaatgtgcattaaccatagagcgtacgcttcatcctctgtgccctatgtgtcgtctagacatcagatacatgatgagggtttatgactat

SEQ ID NO: 1542 - DNA, 356 bp, Zea mays
  Peptide Sequence Number=SeqID_14284
  Probeset Number=SeqID_15945
ctaaattctttggttcttacacagcacagggcagtcatttggcacgcctcggccgacaccgccgagatgcgccccgaaccacttgcatgcacgacagcacgaggctggccggcccctccccgtcgtgtcggcgtcgcccgcatcggtcggccggccggcctccgtcgcctgcaacgccacgtattttgccttgccaaaaatgcgccagtcccttcccatcgcaccagccaccaggaagtgagtgatgccgccgccgtgccattggctgcagtcgcagaggttctggtgctcctcctctcccaaacagtcctcccaccagccctcctgtctccccaccgacacatcacgggaacaat

SEQ ID NO: 1543 - DNA, 277 bp, Zea mays
  Probeset Number=SeqID_15946
catctccccttccttgaccgcgccgaggcacacggcgcactcgagtgcgctgccaccatgctcgccgtcctggggagcgtaagagaaggcccgcagggtcgtctctacggactcgagctcggaccaggaccgtctcttctccggcgacagcacagcatgaataccgtcgttgctgtgaccaagacgatggcggccgagacgaataatagggacacggccaaagaaatggccagtgtgcgcggcggtgagctcggcggcggcgacatgattttgtatg

SEQ ID NO: 1544 - DNA, 416 bp, Zea mays
  Peptide Sequence Number=SeqID_14285
  Probeset Number=SeqID_15947
tcactcgtctgccttatcgtcagagccgccgagcgagcgagcagcagccagcagaagaagcttccccaccgttgccgccgcgcggggcccgacggcgccgctcggccgccccgacgacgaagacccggtgccgcacctgctccagcttcccccgcctcccagtcccaccctcgcggggacgacctcccctctgtggccgttcgcgggctccactcccaagacgacgacgacgtcggccgcgctgccgtcgtccccgcccgtgacagaggaggacgacgaggacaggatggacctgcttggggagagcacgctcaccaccaggcccgtcgcgacagcgccggagtcagctgggagcgccatcggcccccacgcggggccgccgtcaaagcggcgcgcggccggcgactagtgagctc

SEQ ID NO: 1545 - DNA, 404 bp, Zea mays
  Probeset Number=SeqID_15948
ggctcgcctgccgaacagtctgccccacgtgccgacgcgcgggttgacgcgcatcacaaccgctgccggaacgcccgctgctccgcccggccaacacatcgcacgcggccggtgcgagtttttcccggttttgccgcgccgcccgagtgccccgggcggccccgataccagaatggccatcgaatgaccgctagtggaaccccgccgcgcgacgcccgagggcccacgcgcttccagaccatgttacgccagccgctcgcggccggcgtcgttgcgctgttcgccggtgccgcggtgtcgctcggcgtcgcgctgctggtgcgcgaacaatggcaaggcgccgtccagacgcgcttcgagcgccgcacgacgcacgtgacggcgatgctgcgccacgaactgca

SEQ ID NO: 1546 - DNA, 501 bp, Zea mays
  Peptide Sequence Number=SeqID_14286
  Probeset Number=SeqID_15949
cttgcatgcctgcagcggctgattcgcgccgcattttccccggatgcgcccaagggcgccgaagcgatgtcggtgacccgcccctcgggcctggtcaatctgggccttgtggtcgagtcgatcccctcgctggactgggccgatgaacgcggcaagccggcggcgctggtgtacatccgtgatgcggccagcaagtcgctggccagcgaggtggtaaccaagcaactcttcaacctgacccgcgccgaaaccgcgctggccatggaactggccaacggcctgtcgctggaggaggctgccgaggaactgaacatccgccgcaataccgcgcgggcgcacttgcgctcgatcttctccaagaccggggtgcgtcggcagaccgagctggtgcgcatcctgctcaacagcgtggtcgcccttggcaagcccaaggtagcgctgaaggcacccgagcgcctcaaggtgccgctgccgcagctggccgtggcgcgccgcgcctga

SEQ ID NO: 1547 - DNA, 298 bp, Zea mays
  Peptide Sequence Number=SeqID_14287
  Probeset Number=SeqID_15950
ggcggcactgagcgcgctggggccttacgacacaaatcaaaggacgtacgtcatcctgccgattgtttatcctcgagcccgcggcgtggaacggccttgctgggctgtcgtgccccacgccggaaaggacggagctggaataccacctggacccgtactcagaggacggcgggaccgatcacgtgggggacggaccaccagactgcgctcaccaggctcgcgggttgctggcacacgatcacagcccctaggtgcgagcgtgggcgctgaaacggcactggctgcgaaatctgcttga

SEQ ID NO: 1548 - DNA, 322 bp, Zea mays
  Peptide Sequence Number=SeqID_14288
  Probeset Number=SeqID_15951
atggcaggcgacaacgtgctggcgcgcccgagcttttctccgtcctggagtaagaaaagcggccgggcccccgcgcgcgcggcggctgcggcggaaatgggaccggcggcggacgaggaaaggaaaggcggttcgtgcgagggaggggcgcgcgacaacgcggggagcggcccagcgggggagtataataaacctaatcattgggcactcaaccgcggtcacgccgtccgcggcgcggcgcgtgcggggcggacgaggacgaccccgagcgcgagggcgcacgcgcgcgcgggcctgggcgtcgctggggctctcgctctcg

SEQ ID NO: 1549 - DNA, 438 bp, Zea mays
  Probeset Number=SeqID_15952
atgatcaaggtaggcattcacggtttttgtcgtttcggacgtaacgtattccgcgccgcgctgggcagcagcgacatcgatattgtggcgattaacgatctcaccgacagcaaaacgctggcgcatctgctgaagcacgactctctgctgggtcggctgccggcagaagtcagcgctggcgacggcgagttgcgcattgatggcaaaccagtgcgggtgttcagcgagcgcgatccggccaatattcgctggcgtgacgtgggcgtggatattgtcatcgaagccaccggcttttttaccgagcgtgacaaggccgcggtgcatatcacgcaccgcggcgccaaacgcgtgatcatctctgcgccgggcaaaaatgatgatttgacgattgtgatgggcgtcaacgaccagcgctacgatccgcaacagcactttgtg

SEQ ID NO: 1550 - DNA, 397 bp, Zea mays
  Peptide Sequence Number=SeqID_14289
  Probeset Number=SeqID_15953
actatactctgcactgcttgccaggaggcttaactgttggcttgctttgcttcacaccaaggagactagccgcccagcatcccacgaccagcagggagcgcccgtggcgccgcaggcccgcagggtgctccggcctccagcctccgtgggctattggtggctgccggctagagcttgtgggatacgtagtggcggctgccggctagagctggagggagacgtaaatgcgtcgtggcgggctggtggcgagaaatttgccattatgaaagcccaccgttgccgccgctcgcacctgacgctcgccctcgtcctcgtcggcgacgcgcgcagcccacccgacccaaccgctgccttcgcgagccggcagtgctcaccaagcatccgaaggctcaacacg

SEQ ID NO: 1551 - DNA, 358 bp, Zea mays
  Probeset Number=SeqID_15954
atggcgcactcgggaccgttcttttttgtcgggctgcgttttgctaccgcctcgctgctgctggcctttttctttcgccgctgtctgcgccacatcacctggctggagattaaagctggcgcactgattggcgtggcgattgccggtggttacggattgcaaacctggggtatgcaaaccatttccagcagccagtcggcattccttactgcgctttacgtgccggtggtgccgctgttgcagtggctgtttctgcgccggccgccgggcctgatggcgtggctgggcattttgctggcgttcaccggtctggtgctggtggcaggtccgcaggatggcagcctgacgctgaatgccg

SEQ ID NO: 1552 - DNA, 643 bp, Zea mays
  Peptide Sequence Number=SeqID_14290
  Probeset Number=SeqID_15955
tgcatgcctgcagcactgctcttgtctcttggcgccgttgctttcttgcttgtgcggaggcatgtcaggtacgcggaggtacgggaagactgggaattggagttcggcccgcaccgattctcatacaaggacctgttccatgcgacgggtggatttgagaacaagaatcttcttggcattggaggatttgggagagtgtacaaaggggagcttccgagatcgagattgaagatagccgtgaagagggtgtcacatgactccaagcaagggatgaaggagtttatcgcggagatcgtcagcataggacgtcttcagaaccgcaatctcgtccagttgcttggctactgtcgtcgcaaaggtgagctcctactggtatatgagtacatgcccaatggaagcttggataaatacctgcataatgcaaaagagggcaactctgcgttgagttgggctcaaaggtttcgaatcatcaagggaatcgcatccggcctactgtatctccacgaggagtgggagaaggtagttgttcacagagacatcaagggaagcaatgtgctcctcgacagcgagatgaatggacggttaggcgatttcggccttgcaaggctgtatgatcacggtgtcgacccacagaccacacatg

SEQ ID NO: 1553 - DNA, 520 bp, Zea mays
  Peptide Sequence Number=SeqID_14291
  Probeset Number=SeqID_15956
ctcgaacgcagcggcggggtgcttgacggcctggtctgttgcgccgcggtcggcgtgaccgcgccgtcctgcgggttgatcctgtcggtcaactactttggcgtgagccagttgctcgaaggcctgcaaggtgccctggctcgcggtcgcaacccggctgcgatggtgatcggctcggtggccgccacccagcctggcgctgagcagcagccgatgaccggcgccatgcttgaaggcgacgaaacacgggcgctggacctggccaatgaccttggccagccccatctggcctacgcctgttccaaatatgccatcacccaccatgcacgaagcctggcatcgggctggggccagcgtggcatgcgcctgaacgtggtggcgcccggcgcggtgcagaccccgttgcatcaggcgtcgctggagcatgcgcagtttcggcaaggcggtgcgcgagttcgtcgcgccgctggggcgtgccgggcgcccgcaagagatcgctgcgctggtcacgttcctgcag

SEQ ID NO: 1554 - DNA, 269 bp, Zea mays
  Peptide Sequence Number=SeqID_14292
  Probeset Number=SeqID_15957
ctggtaggcttcactgatgatcttccttcactgctctttctcctttgccgcaattactccctggtagcaaatttttacaacatattagtagtacttccgggtatggaagcaagtggaacaagcaacatgaattctctatgaatggttgtgttatcattggcacccttgatggcgctaatgttgaaataagagaaaaggttggcgaagaatatttcttccttttcggtgccaaagccttagcttacataggtcacagaaatcaaagattg

SEQ ID NO: 1555 - DNA, 425 bp, Zea mays
  Peptide Sequence Number=SeqID_14293
  Probeset Number=SeqID_15958
atgatgatgatgttcctcgacgaggaaatggttgcccgcactgtaaccactgctcaggagaaggcgaagtcggggaaggagacttccaggagttccaagactacgacgagttttagatgtgggttggcggaaacccccaatggcccgtatcaggtgcactgcactcacgtggagagactgcatcgtcgcctgcacaaggagcaggagcgccgatgccaggagcaggagcagcaggactcttctccttcacctcagcaggaggtggagtatgggaagcagccttcccctgcaccacagccagagatgccccgtgcaccaccacagggcatcccggttgcaggaggagaccctgacggagacgacaacgatgctggtggcagttcgagacacgacatagagctcttggaggagccggagccggaggg

SEQ ID NO: 1556 - DNA, 371 bp, Zea mays
  Probeset Number=SeqID_15959
tgcgtcagcatcctcaaggacccttcctatgctttgttttatttagacagtcggatacccattgtacgcaccagttctgagtcggttgttcgacgacagtggaaggcccccgaggggaccgttccaggtccgtcccccggatggaacacgacggtccgctctagccgcgcgagcagctcgagcattccgccagcagccaaggggttggtgatctggaccccctagctcaaccctctagagccaatccttttcctagaagttacggatccgtttcgccgacctcccttgcatacattgttccattggccaaagtctgttcacctggaagacttaatacggttatgagcacatccgggcgtggacggaattcg

SEQ ID NO: 1557 - DNA, 636 bp, Zea mays
  Peptide Sequence Number=SeqID_14294
  Probeset Number=SeqID_15960
atgcggtatcacgtgaaggtcctgtccccgctcctcccgcccccggcggaggagggggcgctgacgacggaggctgcctatgccgccggcgacgaagacgacgaccaacctgatgctgatgggtcggcggcgttggcaagtcatcgaagagcagtcctattcaagcatagggctctggacgactacttccaggggaagctagtcgagtggacggagcaagtgatggagagaggcgacgtcatgcactccgccgccgtcgtggcgccggaggcagaccaggaggtcatcgctctcgcacgcagggccttggcccaggggcatcgcagcgtcttggtggacattccgcaggtgcacatggatttcgagccgctgcggccccaggagatcctctactacatcctgtgccagctccagcaggatcgagcgtcatcgccgccgcaactcgggtcgttagaaggaagcccagacacattggtgaagcagtatctcctctacagaagcaaacgggagatcagccatggaaaagagagtctactcggccaaactgagatccagcaggacattcagaatgtgatgggcaagcttgacgaggtgaagaggggcattcaagatgagcaacttctgttgcaggggtac

SEQ ID NO: 1558 - DNA, 641 bp, Zea mays
  Peptide Sequence Number=SeqID_14295
  Probeset Number=SeqID_15961
cctaactctttgtttctgaactaagggtgcttatgggtggtcattcggagtgatgccatacgggatggtgacgatccccatcccttagataaaaaaccctccatggttttttaaaaacctcctagctggcccaaaggatggccattccattagtaaacaggccgaggagccttaacaacccattcaaagcaagaaagagtttctgcagattctgggtgagggggcccttcccccaggtgggttccgtgggctcaatcagtttttgaaagaagaccatggcccccccgaagacaaggagggcctagactcaaaagccggtttttacctggaaaacaatggggagattgtgtattctattttgcaacaatgaaaactttgttgggtggtagggttcccaaaaaattaaaaacaaagggcagggtgttgggcttgcaaggatttgttgcaactgttggtcaagcccgaagttgaagccccttttcaaactgttggggttggaaggggggcccccagtgtttttcaacaggtcgggccctggaaatgtgtattggtaaaaattgggttcttttaaaaaaaaaaaaaaaaaaaaaaaaaaaaaaaaaaaaaaaaaaaaaaaaaaaaaaaaaaaactcgaggaaggg

SEQ ID NO: 1559 - DNA, 558 bp, Zea mays
  misc_feature (68)..(68): n is a, c, g, or t
  misc_feature (86)..(86): n is a, c, g, or t
  Peptide Sequence Number=SeqID_14296
  Probeset Number=SeqID_15962
cgaaaaggtggccggcgagctgtccgcgctgatcgagcagatcgacgaatgcagggcccagacacgcnaggcgcgcgcgcgcctgnacgagtcggtgggccacatgggtgaccttgaagaccagcgccgcgagctggagaacgagcgccgcgccctgctggagtcgcgcgaggaggcccgcatgaacgcgcgcgaggcggccgaccaggcacacgccctggccttgtcgctggaatccaaacgctcgtcgctggcctcgctggagcaatcgctggcgcgcatggaaacccagctgcggcagatcgaggcgcgtcgcggcgagatcgccacacaactggcggcaggctccgatccgatcgccgagctggaagccgagcggcagacttatctcgaccagcgcctgctcgtggacaagcagctggtcgaggcgcgtcgcgcgctggaagactgtgatatcgagttccgcaagctggaacagcagcgccagctggccgaacagggcctggccagcctgcgtgaggggctgtcgcagaagcggctggcggagcaggcgctgca

SEQ ID NO: 1560 - DNA, 1110 bp, Zea mays
  misc_feature (1110)..(1110): n is a, c, g, or t
  Peptide Sequence Number=SeqID_14297
  Probeset Number=SeqID_15963
aaaaaaaaaaaaaaaaaaaaaaaaaaaaagcaaacaaaaaaaaaaccaaggaaatcttccttggcacaccaccgatggcgccactcctcttcgtcccgaacaaaaccttggcaccaccgatcctccacgctcgccaccgcttcgcgcccagacccccatccgccgcggccttcctccgcagattttttcccaccaggccaccggcggcgaaggctgacctcctccgcctcatcgccgaccagggccgcggcctcgagacgcagtccgccccttcccgcctcgctgacatcgtctcctgcatcgacgcgctcgccgccgtatcccccggcgcagacaccgtatccgacgccgccaagctctccggaacctggcgcctcctctggaccaccgagcaggagcagctcttcattgtgcgcaacgccccattcttccgcactgccgccggcgacgtgctccaggtcatcgatgtcgccggcggcgcccttaacaacgtcatcacgtttcctccatcaggcgcattcgtcgtcaatggcgacatcgaggtgcagccgccccagcgagtcaatttcaggttcacacgcgctgctctgagagggaacaactgggaggttccttttccgccgtttggaaaaggatggtttgacactgtctatttggatgatgacatacgggttgctaaggacataagaggagactatttagtggttgagcgtgctccatattcttgggatgtgtagtttctgaagtccaaaactggtcaaaggaacgtttagagaaccttatgctttcccaaccaagtatacatgctattccgtttcctatcatgtatgccaaaatcaacatgttcactccttgatggtagcttattatagtactccaatcttttttaggaacacgaggggacagcgccttatgtatggttgcaattaaatcattttagcacacaggaactagaagtctagaatagtaacacaagtttagcaacctggaacataagttcatgtagatcagaaggaagtttgtgggcgtatcattcagttaaattgaatggatgagtgaaaaaaggacatatgcttcctcgtgggatcattggtagcttctaattttcan

SEQ ID NO: 1561 - DNA, 474 bp, Zea mays
  Peptide Sequence Number=SeqID_14298
  Probeset Number=SeqID_15964
atgtacaagcggattttcgtcgggctcgacggcagcccgagcgcgcgtctcgcgctgaacgaggcgatccggatcgcggcggcgtccggcggcgaggtcacgtgcgcgtatgtcgtcgaacacaggccgcagctcgtcgatgtcgacgcgggttttgcggccgaacgcgccggcgacgtcgcggccgtcgacgcggcgacgcccgtgctcgacgacgcgaaagcggtgctcgagcagcagcacgtgccgggcaccgtgcgcgcgctcgacgcgtatggcgaggacgtcgcagcggtgctgatgcgcaccgcggccgaggcggatgccgatctgatcgtgatgggaacgagcgggcgccacgggctgcgccggctgctgctcggcagtgtcgcggaatcgctgctgcgcgcggccgaccggcccgtgctgctggtgcggcacgacgagccggtcgcggcggcaaaggcgcgctga

SEQ ID NO: 1562 - DNA, 679 bp, Zea mays
  Peptide Sequence Number=SeqID_14299
  Probeset Number=SeqID_15965
cgcatgcagccgcagcgagactctggcgcaaaagcgtcagtacgtgaacctcaatgcgctgttcgcccagctgttcaatgagctggcctcgtggcagcagccgctgtggcttatcatcgatgattatcatcacatcactaatcccgccgtgcatgaagcgatgcgctttttcctgcgccatcagccggataacctgacgctggtggtgctgtcccgcaatctgccgcagttgggtattgctaatctgcgcgtgcgtgaacaactactggagctgggcagccagcagctggccttcacccatcaggaggcgaaacagttcttccactgccgcctgagtgcgccgctcgcgccggatgagagcaaccgtctgtgtgatgatgtatcaggctgggcgaccgcgttacagctgatcgcactgtccacccgtcagggcgcggcatcagcgcatgactccgctcgccggctctccggtattaatgccagccacctttccgattatctggtcgaggaagtgctggataacgtctatgccgccacgcgccattttttgctgaagagcgcgttattgcaatcaatgaatgatgcgctggtcgcctgcgtgaccggagaagacaacgggcgcatgcggctggaagaaattgaacgtcagggtgctttttattcagcgcatgtatgattc

SEQ ID NO: 1563 - DNA, 292 bp, Zea mays
  Peptide Sequence Number=SeqID_14300
  Probeset Number=SeqID_15966
ctgctatacccgagtcagcaccctggacactagggcatgtttgggacagcttaattctgaagagcttttttataagaatctagctttctggataatccagtgacagtgatcaatatcacaaggatgtcagattaccggaaggacgccccacacgtccctgtacaccatcccgcaagggaagctgctgacgcttaagcagagggccgaccccgagacgtacacggactgcatccactggtgcgtgcccggcgtgccggacacgtggaaccagatcctctacgcgcacttgtag

SEQ ID NO: 1564 - DNA, 285 bp, Zea mays
  Peptide Sequence Number=SeqID_14301
  Probeset Number=SeqID_15967
tgcatgcctgcagctcgacagcggtaaagatgtgctggtgctgatcaaagcgccgtggatccgcctgacgcctgacgccgccgatggcgataatcagctgccgggccttgtccacaccatcgaacccggcgagacgcagagtgaagtgctgattggcgctgacgggcggtgaaatggctgtgcgccaccgtccccagccaggtgcttcgccagcttaatgtgcagcccggcagcgccgtgaccgcctgttttgatgcagaacacgccatcatcgccacactgctc

SEQ ID NO: 1565 - DNA, 616 bp, Zea mays
  Peptide Sequence Number=SeqID_14302
  Probeset Number=SeqID_15968
gtccacggtgaagtccagcagctccgacgagtgggccttcctcaagcccttcacaccggagctttgggccactgttgtcgccttctgcatcttcgtcggcgccgtggtgtggatcctggagcaccggcacaacgacgagtttcgcgggccgctgaagaagcagatggtcaccatcttctggttcagcttttcctccatgttcttcacgcagagagaggacaccgtcagtgttcctggtcgcttcgtcgtcatcatgtggctcttcgtggtgctcatcatcacccagagctacacagccagcctgacgtccatcctgacagtgcagcagctgtcgacgggaatccagggcctgagcgacctcctcgcctccaacgaccccatcggttaccaggtcggctccttcgctgggagctacatgaacaaggagctgggcgtcgcggcgacacgcctccgggagctggaccccgacgactacgccgacagcctgcagcgcgggcccagaggcggcggcgtggcggccatcgtcgacgagctgccctacatggagctcttcctctccagcaactgccagttccagacggtgggccaggagttcaccaagagcggatggggattc

SEQ ID NO: 1566 - DNA, 419 bp, Zea mays
  Peptide Sequence Number=SeqID_14303
  Probeset Number=SeqID_15969
cgcaccgtcgctgcaggtagtgcgtacgtcaccggcagccaaggccaccgtgcgcgtggataccgcgcggctctacggcctggtcaatcgcgccggcgagctggtactggcgcgcaatcgcctgctcagcttggccacgcgcagcggcgacgaggcgctgcaactggcggccgccgagctcgaccgcattgccgacgagctgcatggcgcactgctgggcatgcgcatgcagccggtgcgccggctgttccagcgtttcccgcgcatcgtgcgcgacctggcgcgccagctcggcaaggacatcgagctggtgctggaaggcgaggacaccgatctggatcgcggcctggtcgaggccctggccgatccgctgattcacctgctgcgcaacgcggtggaccatggcctggaaactgcag

SEQ ID NO: 1567 - DNA, 284 bp, Zea mays
  Peptide Sequence Number=SeqID_14304
  Probeset Number=SeqID_15970
tgcagcatcgcagctggcaaatgatggccgccgggctgctggcggtgctggtgttctcgcggctgtttggcatgcatgagctgtggcagcaactgatgctggatggctataaccgcgtggtgaagaacatggcggaagagggcagcgagctgtttggctacagtctgtgtctggtggcatcgctgcgctatctgtggcaaacccgcccggcgctggcaacggcccgcgccagccgtcgcgtggtcagcattgaggcggctgaagcgcacttcgcctcgcgctaa

SEQ ID NO: 1568 - DNA, 512 bp, Zea mays
  Peptide Sequence Number=SeqID_14305
  Probeset Number=SeqID_15971
cggaagatgacgacgaacgatccactttgactcacaggcctactatagggaacggccctcctgattcaatacatgactggaccaaagagtctgacattggtgtgaccaatcagaacgaccccattcaattttgctccaagaagaattggcgactacttagatgccaaaatgggttgcgcatatttgaagaacttctggaagtagattaccttgcacgaagttgcagcagagctatgagggccgttggtgtagttgaagccacatgtgaagccatttttggtcttataatgagcatggatgtaacaagatacgagtgggactgtagcttccgtaatggtagtttagttgaagaggtcgatggtcacactgcaatactatatcataggctgcatctacactggtgcccaatgctagtctggccacgagatctttgctatgctcggtattggcgtcgtaacgatgatggaagttacggtaattctttttctttccctaaaatatctgctagtaca

SEQ ID NO: 1569 - DNA, 269 bp, Zea mays
  Peptide Sequence Number=SeqID_14306
  Probeset Number=SeqID_15972
atttgaaagctgccatcgacaaagcctttaacgacatgcgaaaagacggtacctacgacaagattgcgaagaagatcgaacccatgttgtatggctattctgaagtaattctcaaaggcacgctggtgactcttgagctggcgctcagctcggtggtactggccgtggtgctgggcctgataggggccggcgccaaactctcccgcaatcgcccgctggcgatgatttttgaaggctacaccacgctaatccgtggcgtgcccgacctg

SEQ ID NO: 1570 - DNA, 508 bp, Zea mays
  Peptide Sequence Number=SeqID_14307
  Probeset Number=SeqID_15973
ctggagcccgatcacccatctttccaagctgaccaggaccagccccattgagatcattaccatcatcatcccccaacaggtcatcttcatcatcgttaaaccccttttcatcattatccacaactcataacagctttgcaaggccagagtcatttatttctgatgagcagagagctgcgactaaggatgatgatgtttaccatttcatcagctatttaccttttgaaggtgtcctgtatgagctggatgagctgaaggaagggcctgtgaatcttgggcagtgcggtggtgcggatgaccttgattggctacgggtggtgcagctagttattcaagaaaggatcgagcgatactcacagaatgggatcaggtccaccataaagaacaggaaagaggtgtactgtgctggagtaactgtagaagagaagggagcaaattttgcaagagatgaacaagacttccgccacagaatcattgagcaagtcgcttaaggaggtgatatcggcag

SEQ ID NO: 1571 - DNA, 216 bp, Zea mays
  Peptide Sequence Number=SeqID_14308
  Probeset Number=SeqID_15974
ttacaggccaggaatctgtctaaacaatctcagtcgaccaagagagtatttcaactatatggttgtgtcgtgacatctagggacatggtttctcacaaggatcccaccaaacaatttgacaaagtaatccatctctcttgaccataagtccataagtggatttttttcaacagcctcagccctcagtgcctcactcaaaaaaattgtgtaatctgc

SEQ ID NO: 1572 - DNA, 1329 bp, Zea mays
  misc_feature (1)..(34): n is a, c, g, or t
  misc_feature (59)..(59): n is a, c, g, or t
  misc_feature (1000)..(1000): n is a, c, g, or t
  misc_feature (1025)..(1025): n is a, c, g, or t
  misc_feature (1285)..(1329): n is a, c, g, or t
  Peptide Sequence Number=SeqID_14309
  Probeset Number=SeqID_15975
nnnnnnnnnnnnnnnnnnnnnnnnnnnnnnnnnncagcgccgtgccggggtctgctagnaacagtgacagaaacgatccgcaacgcaggcaggcccgccgcgcagcccaggatccatccatccacctcacaccgcgtcgtcgtccagctcacactccccggccgcgcccccgctgctcctcgccgcggtgtcacgcgcgcaggcaggcgagcgaccagtaactgacgtctctccttccttcccccctgctccggcccctctacaaatccccgattaaaccctagacttccctccccacccaaatgcgcgccccctcctaggcggcgcccctcgaattcggcaccggctccgccgtagccagggtgcgtacaatgagtgcgggtttcgacaagcagatattggctcagaagctttcgaagcttaatagctcacagcagaccatagagactttatcacattggtgtgtctttcatcatcgttgctgccaacaagttgtagaaacatgggattctgagttccatgcagctcctggagagaggagggtgtctttgctgtaccttgcgaatgatattatgcagaatagcagaaaagaaggtaatggatatatagctgaattcatgagggtcatccctgctgccttgaatggagtgttgactgtaagagatgattttgggcggaatgtcccaaaaagactggccgactacagtatcaagcatgcttgttgttttgcttcaaaccaacgcagaagcatggaagctgaaaactcattgacaacgaatgtatgaggcacttagggagtcagacatcttctgcagtggggtgtctgcgccgacggagctataggctaccgtcggcacacatcaagatcgtgaagcattccatgggggagaccgcggacaacaacaccgagatgatctcaagtgaggtcccctttggttgttctccaaaggcatcgtcagtgtttatgtcgtcaatagcagacaacacttggttcagacantgctgtctaagactgtgcacgacanccggcctcctcaacttactcatccatgtcgtcactagcggacaacgcgtgacaagctgagtgaggtgagaaaaacttcaatgttgatcgtgtgcaaattgtcgtgaagtttgccaagtactagcggttccatgcgtattagtcacaaatctctcaaggattctagcggcttgtgtggacaaccgtggatgagcctgcctacaatgcaattgttcggtgagatccaattgaggcatgttttcctatgtaatcttctatttnnnnnnnnnnnnnnnnnnnnnnnnnnnnnnnnnnnnnnnnnnnnn

SEQ ID NO: 1573 - DNA, 1046 bp, Zea mays
  misc_feature (1)..(283): n is a, c, g, or t
  Peptide Sequence Number=SeqID_14310
  Probeset Number=SeqID_15976
nnnnnnnnnnnnnnnnnnnnnnnnnnnnnnnnnnnnnnnnnnnnnnnnnnnnnnnnnnnnnnnnnnnnnnnnnnnnnnnnnnnnnnnnnnnnnnnnnnnnnnnnnnnnnnnnnnnnnnnnnnnnnnnnnnnnnnnnnnnnnnnnnnnnnnnnnnnnnnnnnnnnnnnnnnnnnnnnnnnnnnnnnnnnnnnnnnnnnnnnnnnnnnnnnnnnnnnnnnnnnnnnnnnnnnnnnnnnnnnnnnnnnnnnnnnnnnnnnnnnnnnnnnnnnnnnnnnnnnnnnnncatcaagatctggcgtctatttttgggccaaatgcttatttcttgcagaaaccacgcatccagatctagcgtgttctgagcacgaaagttgtacaggcatggcctactgatcaggaaagttgtagcagacacgttcgtcgtcgcgaacatcgtcgagccgtgtggctactgccctggccggtgagcatcgtcaagtcgtgtggctgctgcccctgaccagcacgatgcgtctctggtcgcccatgatgattagatggcacctgatcaccacgtctctgagcacctgatcaccggtgagcatgatgctttatttagtttcccctacagtagtcttgatagcctttggtattcaaataaagtatacttgatttgagttcaatctggttaatcattcataaaaacccgggcttttttatatgatggcaatctttatgctaaatgctaatgcccacttttgtataaatctgagaaaatctaatccatgtttgtgtggttctgtcttaagaaattttgttttcccttgtagctctatttcattcatagtttttgttttcccttgaatcctttatcagtatcgcagtggcaattttttgttttagctgtagcagctgagaatgtttttttggctggatgctaatttttttgttgttctttctaaagacgaaattaaaagtcattgccccccttgtttgatgtaatgtcttgttcaaatctaggcaaatagataaaatgaacaagaaccgtctatggaaaccgttttggt

SEQ ID NO: 1574 - DNA, 255 bp, Zea mays
  Probeset Number=SeqID_15977
cccccggactggcctttaatttgtctaattccctcgacttcataccagtatgccatcacaaaagcttttgatatagcttttgtgatgactttcttctcagtgtttgacgttcctgtcttctggcctatactcctctgctactggattgttctctttgtccttacaatgaagcgccagattatacatatgatcaaatacaaatatgtgcctttcagtatcgggaagcaggtcaatgcaacccgtgtatcaggggga

SEQ ID NO: 1575 - DNA, 445 bp, Zea mays
  Peptide Sequence Number=SeqID_14311
  Probeset Number=SeqID_15978
atgcaggctttccagcagcagttcaacgatgcctggtttagcgaaatcgaacaggccaatcagcagctcggcagcgtcaaccagcattcgctcagcacgctcaagcagagccgcaatctggcgctggcgattgccgcgttattaatggcgctgctgctgctggccgccgcgctgctgatgcgcggcgtgttgctgccgctgcgtcacgccaacgcccagctggcacaaatcgcgacgggcgatctggtcgccagcccggcaccgacgcgtcgtcagtcgctggaaacgcgccagctgctcctgtccatcgataccatgcgtcagggtttgcagcagatcgtcagcgacatcacgacggtagcaacccgggtggcggccggcgctgacgagatgcagcagcataatcagcaggtgatgcagcagcatcaggcgcaaaatgccagct

SEQ ID NO: 1576 - DNA, 251 bp, Zea mays
  Probeset Number=SeqID_15979
gctcttgttcattcaggtcccatgaaaagatgtcagtgctccttttggacagtattgttgacaaacatgcaatagatattgaaaatgattacctcaaaatggtcaaggtaagaataattttgcttccagtccttgtgtgtcttcagagtgcaaaggagaaacattttctttatgacattgtcgctaatggtcgcaatggtatagatgttgacaagtttgactacattggccgtgactgcaggtcgactcta

SEQ ID NO: 1577 - DNA, 311 bp, Zea mays
  Peptide Sequence Number=SeqID_14312
  Probeset Number=SeqID_15980
tgcaggaaaagaggtcttcaaggtgataaagagaaagccatccataagttatgcaaaaagtggattagtactagacaagattcatggagagatcaaattccgtagggtgcactttgcatatccttcccgccaggataagccaattctccaaggattctcattgtccatccccgcaggcaaagtcatcgctctggtaggaagcagtggctgtggaaagagcactgtcatttcactacttcaaaggttttatgatccaacttcaggtatgcttctacaatcttatcatcatgtaagaaggcctaatactgcag

SEQ ID NO: 1578 - DNA, 383 bp, Zea mays
  Peptide Sequence Number=SeqID_14313
  Probeset Number=SeqID_15981
cccacgcgtccgcccacgcgtccgaccacgcagtccggctcaactctcctttcctctcgtgggcgatcggctctctcctgcggcggcggcggcgatcaacgtcgacgactacggcccacgattctccttcgaagcgcgaatcatgattcgctccgtgctccgtatcagcaggcaggggaaggtgaggctgaccaaatggcacaccccatacccacagaagcagacacccatgaccagcacagagattagtacgcgcgtcctgacaagaggccccaagcggtgcaattccggcgactggcaagagctacagagttgtgtacaagagggacgccagccttgacttctgcaggggcagtggccccgctgacaatgaactggaaacc

SEQ ID NO: 1579 - DNA, 318 bp, Zea mays
  Peptide Sequence Number=SeqID_14314
  Probeset Number=SeqID_15982
tgcaggcttggagtcctacaagcacaaagcagtaaaagctgccatggattatggctttcacatggccattacaaagtggcatgatgaggttgcaagggaaatggaagtgatggttaaggagcatggtcaaaattctttcaagtttttcatggcatataaaggctcctcctacggaaatgcaagtcacttagtgcccttgctatggttcatgcagaggatggtgatgctggacaacagtggatgattgacctctggatagctggtctagaagggcatgctctctcaagacctccaatttttgtttcctcattcactgca

SEQ ID NO: 1580 - DNA, 650 bp, Zea mays
  Peptide Sequence Number=SeqID_14315
  Probeset Number=SeqID_15983
cctctctcctctctgtctccatctcttgctcgatcatcatacacacatacacgatcgaccgctccagcctccagctcggtgtcgtatagtagtgtatatggcaatgagcgagccgagctccgacacctcgtgcacgtcctcctgctcgtccggaccctccacgtccaccagcccacgcgcggcgccctcctccgctgccgccgccgcatcgggcggcggcaagaaacgtcgtccgcgctcaaacgacggcgggggcggcgggtccaggtccaggtccagctccgcccccgacgtaccgcggcgtgcgcatgcgggcctggggcaagtgggtgtcggagatccgggagccgcgcaagaagtcgcgcatctggctcggcaccttcgccaccgccgagatggcggcgcgcgcccacgacgtagccgcgctggcgatcaagggccgcgccgcgcacctcaacttcccggagctcgcgaacgatctgccccgcccggccaccgccgcgcccaaggacgtccaggccgccgccgcgctcgccgcggccgcggacttccaggcgcccgccaatgcagccgccgccacggaccccgacgacgggccggacgccggcgccgactccgcgtccgcctcgccgccgccgccgccgccacag

SEQ ID NO: 1581 - DNA, 404 bp, Zea mays
  Peptide Sequence Number=SeqID_14316
  Probeset Number=SeqID_15984
gcccgagtctgtggtcgccactcgccccccgtgcgtgtgtgggtgtcctgctctagacatatatatcagattcagaacagagcagggttttgccctgccgttttacgtttggtactcgcgacagctagagtatttcgcatttatctatctacgtataataaagttgcagttccttccatcttttatcgaaccctaacggacggaacgagctttatcaaatcaaacaagaatggaggagcgtcttgcgaacgcttcgaatccaatcagactaaaaaaattatggcggactcacatttgctcggcgccactaacctgtaaacgatttcgtgtggaccaacgaccaaagtgctcgagtgcgcttaaaaaaaaaaaaaaaaaaaaaaaaaaaaaaaaaaaaaaaaaaa

SEQ ID NO: 1582 - DNA, 294 bp, Zea mays
  Peptide Sequence Number=SeqID_14317
  Probeset Number=SeqID_15985
atgaaactgtggttgccgggcgttgccgccctgttactggccctgaatgcgcaggcggaagattaccgggtggtctactcgcccagcctgtcgctggaagtctatatcgataacgttgccagtaatgcgcccgacgactggtgtaaagagacgctgccgctgcgcatcgtgtccggcaaaagcagcgacaccagcattcttaccagcttcctgccgcgcgtcggtacgctgctggcgaaccagtgcggcctgctggatgagatcccctggcagatgaccagcaaagagggcagc

SEQ ID NO: 1583 - DNA, 296 bp, Zea mays
  Peptide Sequence Number=SeqID_14318
  Probeset Number=SeqID_15986
gtgatcattaccgaggcgttgtcacccgaagcctttgaacaggcgctgcgtgccaaaggcgcgtattaccatattcaccatccttaccatatcgcgatgcacaacggtgccgcgacgcgcgagcagattcagggctgggtggcgaaccgtttttactatcagaccaatattccgctgaaagatgcggcgatcatggccaactgtccggatccggcaacgcgccgtaaatgggtacagcgtatcctcgatcacgacggtcgtaacggtgaggaaggcggcattgaagcctggctgca

SEQ ID NO: 1584 - DNA, 330 bp, Zea mays
  Peptide Sequence Number=SeqID_14319
  Probeset Number=SeqID_15987
atggacactcttcacctcccgcaagccacgtcgcctctggacacgtggctggattatgttgagcatctgcattctcacgctatcgatctgggcctggaccgtattcagcgcgtcgccgcacgcctcgacctgctaaaacccactccgtttgagttcaccgtcgccggcaccaacggcaaacgcaccatctgccgtacgctggaaaccctgctgatggcccgaagatatcgtgttggcgtctacagctcgccgtatctggtgcgttacaccgaacgcctgcacctgcaaggtgctgagctggatgaagcccggcacagcgccagctttgct

SEQ ID NO: 1585 - DNA, 630 bp, Zea mays
  Peptide Sequence Number=SeqID_14320
  Probeset Number=SeqID_15988
gcgctgcgccaggccaacaagagcctgctgccggttggcgtgaaaaccgtgcagggcagcttccgtcgtggcgagatggtggtgtgcgtcggcccggacggccttgaagtggcgcgcggcctggccaactacagcgccctggaagcgcagaagatcattggccagccgtcggatgccatcgaaggcctgctgggctacagcgcagaaccggagttggtgcaccgcgacaacctggtgctgcgggtaatcggtgtggcggcattggtgctgccgatgctggccggggccgaggaaatcgggcaagtgtccaccgtgttcaagttcctcgggccgaatgaccgtattgtggtcgaggcgttcgacgaccccaaggtcgagggcgtgacctgctacctgtcacgggccaagactggtggcgtgaagggtgggttgggcctggcggaagatcgggcggaggcatcgattgcctgtcgtcaggtcgggccgatcagcttcaagggtgagctgaaggatggcgaggaagtgttcaaggaacgcacctcgctggtgttcaagaccatgcaggtggtgcgctttttggacaagaagcgcaatacgctggtgtacctggtgtacagcgatcgcatgatc

SEQ ID NO: 1586 - DNA, 528 bp, Zea mays
  Peptide Sequence Number=SeqID_14321
  Probeset Number=SeqID_15989
cccttggagcccagtgatgttggaacctatgttttactctctaacatgtatgcaaaagccaaccgatgggatggcgttgtgaaggtccggaagcatatgagggagaggggcgttaggaagtcacctggtgttagttggattcacgtgggaagtgatgttcatgttttcacatcggaggagaaggtacatccgcagatggaccaaatcgccaaaaaacttgaagagctgatcgaccagataaaagctatcggatatgttccaaactttgcagtggtcctacatgatattgatgatgaacgaaaagaggagcaccttatgtatcatagtgagaaattggctctagcctttggccttattcacacacctaagggagcaactatccatatcatgaaaaacctcaggatatgtgatgattgccatgttgctatcaaactcatatcagttgttactagcagaaaaatagttgtaagagatgctgttcgatttcattgtatagaaggtggcatttgctcatgcaatgattattgg

SEQ ID NO: 1587 - DNA, 352 bp, Zea mays
  Peptide Sequence Number=SeqID_14322
  Probeset Number=SeqID_15990
ccctgtctatttggctatgaaatttagagcgatgggtagagatattaatcagggctaccatgaattgctacacaatttttggcagatgcttccagttgaagttaacttggcttcaatttcttgagaagttatatcttggccaccattaattggcagttttggcccctgaagttggtgctttgaagaatatgaaagtgcggtcatttaacaacaacatgctagtttctgtccctgtagaactgcggcaatgtgttatgctggaggaattatcattagaacataacaagcttgtccggcctctattggatttcaggtaatttaatgtttaatgggggagtttttttttacagcg

SEQ ID NO: 1588 - DNA, 464 bp, Zea mays
  Peptide Sequence Number=SeqID_14323
  Probeset Number=SeqID_15991
atgtcgcacgaactgcgcacgccgctgaacagcctgctgatcctctcgcgcagcctggccgacaaccgcgacggcaacctggacgacgagcaggtggagtcggcacgcatcatcaacgatgccggcaccagcctgctgcgactgatcaacgacatcctcgacctgtccaagatcgaggccggcaagatggaactgtccaccgtcgattacccgctggcacaactggcgcaaagcctgcgccgcaatttcgaccacgtggcgcgcgacaagcaggtggcctacgaggtcgtgcttcaagccgggctgccggaacagatccacaccgatccgggcaaactggaacagatcgccaacaacctgctttccaacgcattcaagttcacgtcgcacggcacggtccgggctgtcatcggtcgccccgcggccgagctgccggtacccgcggccctgctcggccaatccct

SEQ ID NO: 1589 - DNA, 296 bp, Zea mays
  Peptide Sequence Number=SeqID_14324
  Probeset Number=SeqID_15992
atccggccaagaaactggtcaaggtgtccaagaacatggaggaggagcacctgaccagcaaggccaatcccaagcgtgcctaacgaaccagaggtccctgtgcagcacgaggatcacacgggaccaagaccctggggagacgcgacacgtggtctccactccagacggtagtgccccctacgaaaagggccaatccatcggtgtcatcccgtgtggcgaggacaaaaccggcaagcctaacaagctaaagctctactgcttcgccatcagcgccctctgaaattactgcgactcca

SEQ ID NO: 1590 - DNA, 824 bp, Zea mays
  misc_feature (1)..(110): n is a, c, g, or t
  misc_feature (163)..(163): n is a, c, g, or t
  misc_feature (711)..(824): n is a, c, g, or t
  Peptide Sequence Number=SeqID_14325
  Probeset Number=SeqID_15993
nnnnnnnnnnnnnnnnnnnnnnnnnnnnnnnnnnnnnnnnnnnnnnnnnnnnnnnnnnnnnnnnnnnnnnnnnnnnnnnnnnnnnnnnnnnnnnnnnnnnnnnnnnnnnncgccgccagaacccgagaaaaaagcggaggcgggggagccaccccccgagcgngcgagcggcaccgggacagcgggcagcgccaaccagcgggaaaacgacgagggcgccggcaccccgagccgcagcgcgagggcaagccggagcaccggacgtagccgacggcggcgggaggcgcgacggcggccaccacctttcgagctctctatccctctctcaccctgctcgttctcgacacgcacatcacttgggcaccgactccaccccctcggccaggatgacgcgcctgttggtagcaagagatcgcccctcactaagcccccccgcgcaatccgcaccggcccagtgatgcgtagttctggttccaccgctcaggaccattgtgcagtcctgatcttccgcacgacacggtgaaagagcagacccgccatgttcctcacacttgacccctggacaaggttccttaccgcaaagcccggcgcgaggaggacgaggatgcacagcagcgcgtcctccggcaggtcctccagctccgtgcccggccccgccgccgccgccggtatgctccccatggtggtggtgtgatctgagactgggggttnnnnnnnnnnnnnnnnnnnnnnnnnnnnnnnnnnnnnnnnnnnnnnnnnnnnnnnnnnnnnnnnnnnnnnnnnnnnnnnnnnnnnnnnnnnnnnnnnnnnnnnnnnnnnnnnnn

SEQ ID NO: 1591 - DNA, 300 bp, Zea mays
  Probeset Number=SeqID_15994
atggcacagcacatcgctgcactcgtcaccagcaagcaagctcaccggtccggggcagcagcaggaggaggaacggacggacatgcagagcgtcagcagtacaccaaagaggctaagacttccagctgtgcggacatcgatcagcattcaggactcaggaggcggccgtcatcctgtcctgcctaccatgtggccaaggagaaggaggaggagcaccgtgagtcgatccccatgacgtcgctgccggcattgaagggggaggcagccgcgcgctgcccgctggatcatgagtgcatgtga

SEQ ID NO: 1592 - DNA, 387 bp, Zea mays
  Peptide Sequence Number=SeqID_14326
  Probeset Number=SeqID_15995
gaagtgaagcttgacgagacggtgaagctgccgaacctggtctgcgacggcgtgatggtggccacgccggccggttccaccgcctacaacctctccgcgcacggcccgatcctgccgctggacgcgaacgtgctcgcgctcaccccgatcagcccattccgcccgcgccgctggcgcggcgcgatcctgccgcaccgcacccgggtcagcctgcgcgtgctcgatcccggcaagcgtccggtcagcgccaccgccgacttccacgaagtgcgcgacgtgcgcgaggtggcggtgcgccaggccgaggggcagggcgtgcgcctgctgttcgatcccgagcacaacctcgagcaacgcatcctggacgagcagttcgctgccgactga

SEQ ID NO: 1593 - DNA, 332 bp, Zea mays
  Peptide Sequence Number=SeqID_14327
  Probeset Number=SeqID_15996
atgatgccatgcgcatggattaaggaaaccccattgaagctggaattgcggaacagcttgtcggtcaagttgctcagggtcgtgctgctgtcggcgctggcggtcggtgtcgtgctcagctgtgcgcaaatcgtctacgacacctacaagacccgccaggccgtgaacaacgatgcccagcgcatcctcgacatgttccgcgacccctcgacccaggccgtatacagcctcgaccgcgaaatgggcatgcaagtgatggaaggcctgttccaggacgaatcggtacgcatggcctccatcggccaccccaacgaaaccatgctggcggaaaa

SEQ ID NO: 1594 - DNA, 485 bp, Zea mays
  Peptide Sequence Number=SeqID_14328
  Probeset Number=SeqID_15997
gcatgcctgcagcgtaaccgctcgggcaacggtccacgtcgcggtggcaacaacagcaaccgtcgcggcggtgccccgcgcaacaacaaccctttcatatgttggtggtgcgcgaagtgtccggcagtattcagaccgtcgcgcgaattaaacgcaaggtgcgtctggcggcaggtcttgatgcggccaaccatctctcggctgaggcgatgcagcgcggctggcagtgcctgcgtctgttctccgaacagttgcaggacattcccccggaacaaatcccgcgtggtggcaaccgccacgctgcgcattgccagcaacgcgcaggattttctgactcaggcggaacagattctcggctgcgcggtgaacgtcatcagcggcgaggaagaggcgcgcctgatatatcaggggcgttgcgcacaccaccggcggctccgatcagcggctggtggtggatattggcggcggcagcaccgagctggtga

SEQ ID NO: 1595 - DNA, 301 bp, Zea mays
  Peptide Sequence Number=SeqID_14329
  Probeset Number=SeqID_15998
ctgcagctgtttggttgcatttttcatggctccttggtgacttctactctagatgtatgttcatacaaaacctcactccgtggtctgaaaatgtcaacatttttcaggccgttccgtttcttgttggatgcccagcatgcttgaggaatttcttgaatctcttctgtgagatgtcttgttctccaaaccaaagcctcttcattaatgtgacttcagtaaagcagattaatagcactatgactgttgatggcatagattactatgtaactactaactatggtgaagagctatataactcatg

SEQ ID NO: 1596 - DNA, 447 bp, Zea mays
  Peptide Sequence Number=SeqID_14330
  Probeset Number=SeqID_15999
gtctggcaggcgacgacggccgccattctggcgatcgaagcgccgaccggcgtcggcaaaaccttgtcctatctgattcccggcattgcggtcagccgcgccgaagagaaacgtttagtcatcagcaccgccaacgtggcgttgcaggatcagatcttcagcaaagatctgccgctattaaagcaaattattcctgacctcaccttcaccgcggcttttggtcgcgggcgctatgtctgtccgcgcaacctgaccgcgctggcagccactgacgatcagcagggcgatctgctgctgtatctcgacgaacaggcggtgaccggttcgaaagaggagcagaaattctgcgcgcggctggagaaagacctcagcagctataagtgggatggcctgcgcgatcacagcgacgtggcgattgacgacagcctgtggcagcgcctctccact

SEQ ID NO: 1597 - DNA, 721 bp, Zea mays
  misc_feature (601)..(721): n is a, c, g, or t
  Peptide Sequence Number=SeqID_14331
  Probeset Number=SeqID_16000
agagcgaggaagcgaggaacaggggaacaacaaggacatggacgctttcggtgcagtgatggacaaggtgaagggccacccagaagcgatggagaaggtcagcgctgtgatggacaaggtgaagagccacccggaaatggtggaaaaggtcaaggacgaggtgacgagcctcgctggcgctctccgtctgcggagacacggatccgaagataaagaagctgagtccgaagagaaggcagaaggaggcgaggcaaagcagagcgtcgacgagggtgcctctgatggcaaggctggagaacctggtgtgttggagcaggccgtgcaagagattcaggctgtcgccgcagctttgcagcagacagctgaacccgaagctgaaattccagctgagaccgccgctgctgctcctgctgctgaaacttcggctggaggtgacaggcctgaagaaacgaacggggaggtggagaaagatgacccgaagaagcggctcgacttcgctgggttcttcgccatgctgctcgagaggttctgctccccggccagcaagaagaaagattaagttaagtggttgcaggtccggcttgtggatttctcgttctgnnnnnnnnnnnnnnnnnnnnnnnnnnnnnnnnnnnnnnnnnnnnnnnnnnnnnnnnnnnnnnnnnnnnnnnnnnnnnnnnnnnnnnnnnnnnnnnnnnnnnnnnnnnnnnnnnnnnnnnnn

SEQ ID NO: 1598 - DNA, 403 bp, Zea mays
  Peptide Sequence Number=SeqID_14332
  Probeset Number=SeqID_16001
atgctcgacaaactcgatgccgcgctgcgatttggtactgaagcattaaacctgcgggcgcagcgccaggagattctggcgtctaacattgccaacgccgataccccgggctaccaggcgcgggatatcgactttgccagccagctgagcaaggtgatgcagaacggccgtgccgaaggcagcagcctggcgctcaatgtcacgtcatcacgtcacattgaagcgcagaccaactcacagcccgcactggatctgctgtaccgcattcccgatcagcctgccgcggatggtaacaccgtggatatggatcgcgagcgtacgcagtttgcggataacagcctgaaataccaaaccgatctcaccctcatcagtagccagatcaaaggcatgatgagcgttctgc

SEQ ID NO: 1599 - DNA, 347 bp, Zea mays
  Peptide Sequence Number=SeqID_14333
  Probeset Number=SeqID_16002
cgcttggcgaccggcaggggtctaacctaccctggcacgagtgcctcccgaacaatgcatcgtgggactcgaatccggagaacattctgctgaccccagagctcgatcccaaggtcgactacttcaggctggccaagctgtgcaagagggacgcctgcgccggcgacggcgacagcatgcggctgtcgcgcatgacagggactgcggggtacatggcgccggattgggcgctgaacgtccccatcaacgccaaggtggacgtgtgcagctatggcattgtgctgctggacattgttatggggtgcagggcgtgtgaccagatctcggcggtcggcgagtgcttgtag

SEQ ID NO: 1600 - DNA, 627 bp, Zea mays
  Peptide Sequence Number=SeqID_14334
  Probeset Number=SeqID_16003
atgatgatgcagtcgccgccggtgaccggcaaagcctggtggagcctgtcgattcacggcacctccggcgtaccggatcgcccggcggtgattttcgtgcgtcacctgccggacagcagcggtttctgggcggtgattgatggtcactatctgatggactttatgcgcgccatcggcgagtcgaaccgttatcagatgagcctgcgcttcaacggcggcagccccatcgccagcggtccggacgaccagccagagctgctgtacctcagcagtgcaaattataaggcggagtccagccgctatccaatcagcgtcagcgtgacggtacccgctgccgagctgatcaaagcctggcgtcaggcgctgcttattttcctgccgatggccgccatcttttcgatattgctgatggtgctgaccgccaactggctgcgccgccgcctctcatgggcggatgaaattcgccgggcgatacgcaaccgtgagttcacggtgcactatcagccggtgtacagcaccgggattcagcgctgcaccggtgcggaagcgcttatgcgctggcagcggcccaacggcgaaatgatccgcccggatatcttcatcagccatgccgaagcggaaggcatg

SEQ ID NO: 1601 - DNA, 1234 bp, Zea mays
  Peptide Sequence Number=SeqID_14335
  Probeset Number=SeqID_16004
atgcgtcaccacttgatgtgccccatctcactgcagcccatgcaggaccccgtcacggcgcccaccggcatcacctacgaccggcgcgccatcgagcgctggctggccgccggccacgccacttgcccggtcactggccagccgctcgccctcgccgacctcaccccgaaccacacgctccggaggctcatccagtcctggtgcgccccgcgtccctccacgccaccggaggcggcgggtgctaataagccggcggatggcgacgacgacgcagtggagcactcgcagtcgcagaccgacgacgacgtcgtcaagaagctgctgcgcgcggctacttccccgcccatcgacgtgctccgcgaggccgcggcggctgcgttcgagagcgacgcggcgcggcggcgcatggtggacgccggcgtgctccagcgcgtgctccgcggcgtcgcggcaatcgccagcgaggtcaaggccgatgatccccgacaccatgagaatgagagcaggagcagctcagcgatcgcgcgcgccatcgaggccaggctcgacctcgcccgcgcgctcgccgtctctagctgcgacgacgacgagctgcggccgcagctggtctccgacagcctcgtgcacggcctcctcgacgcggcgacggacgtgctggcggccctcgagcgcgccggcggcggcggcggcgacgacggcgacgcggcgcgggcgagcgcggtccggctgctggactccgtgacgggggcggccggcgcggccgtgctggagcggctacggccggggctcttccgcgccgtcacggcggtggtgcgcgaccgggtgtcccccgccgcgacgcggtccgcgctgcgggtgctcctgcacgcgtgcccgctgggccggaaccgcgcgctggccgtggaggctggcgccgcgcgcgaggccatcgagctggagctcgacgcgccgccgccgccgcccggcggcggcggcggcaggagggccacggagctggccttggcgctgctggccgagctgtgcgcgtgcgcggacgggcgcgcggccgtggcggcgcacccggcgggcgtcgccgtggtggcgcggcggctgcttcgcgtgtccgcggccgccgacgcgtgcgccgtgcgcgtgctggcggccgtcggcggccgggccgcgtcccccgaggtgctgcgcgagatggcgcgcgtcggcgccgtcgggaagctctgctgcgtgctgcaggcatgca

SEQ ID NO: 1602 - DNA, 527 bp, Zea mays
  Peptide Sequence Number=SeqID_14336
  Probeset Number=SeqID_16005
tgcagtggctactcggtccgctgtcggataaatatggccggcgtccggtgttgctgttcggcattctgttctttgccgccgcctgtgttctcaccacctgggtgagcaacatcgagcagttcgttacgctgcgttttatccagggcatcagcctgtgcttcattggcgcagtaagctatgccgcagtgcaggaggcgtttgacgaggcgttagctgtgcgcatgatggcgctgatggctaacgtggcgctgctggcaccgctggcgggtccgctggccggtgccgcctggctcacggtgggcgaatggcgcagcatgttctggctgtttgcggtttgcagcctgctggcgtttgtggtgctgtggcgcatcatgccggaaaccgccggcgatcgcagccactccattgcgttaccgaacctggcgcgctgctacggacggctggcgcgcgataagcaggtgatgtacggctccttcgctatcggcctggtgttcatcccgattcttacctgggtggcgctgtcgccg

SEQ ID NO: 1603 - DNA, 272 bp, Zea mays
  Peptide Sequence Number=SeqID_14337
  Probeset Number=SeqID_16006
agccggggccccgcccgggtacaatccattgcaaatatttgttctggatttaggtctctgtaagctaagtatcgttcgtttacgggaaactaatttttttagaccagtaattcagaatgctgacaagtaaagcttgtagatgtttgtttctttctcctagttttttctgttagtagtggttgctcatgttcctattatgcactgagtaaaagggaaaaaaatcacctttgcaaaaaaaaaaaaaaaaaagtacctgcccgggcggccgctcg

SEQ ID NO: 1604 - DNA, 1930 bp, Zea mays
  misc_feature (1)..(99): n is a, c, g, or t
  misc_feature (1666)..(1930): n is a, c, g, or t
  Probeset Number=SeqID_16007
nnnnnnnnnnnnnnnnnnnnnnnnnnnnnnnnnnnnnnnnnnnnnnnnnnnnnnnnnnnnnnnnnnnnnnnnnnnnnnnnnnnnnnnnnnnnnnnnnnnccgccgccgccccgtcgtctgccgacacctttagcgctgggaaggatcacaggggatcggcgcgaggcgggggacctgcggtttttgtcgcccggatggcggcggagcgatgacactggcgtcgggagcggcgcggcgttgggatgcggacgatctgcgatgtgtgcgagagcgcaccggcggtgctcttctgtgcggccgacgaggcagcgctttgccggccctgcgacgagaaggtacacatgtgtaacaagcttgctagtcggcatgtgagagttggacttgcagaccctaataaacttgtccggtgtgatatatgtgaaaattcacccgctttcttctactgtgagatagacggcacctcactttgcctgagctgtgatatgactgttcatgttggtggcaagcgaacccatggaagatacctgctcctaaggcaaagggttgaatttccaggagataaaccgggccatatggatgacgtgcctatggaaatccaagatcctgaaaaccagagagaccagaaaaagccacccaaggagcaaacggcaaaccaccataacggcgatgatccggccactgatggcaactgtgatgaccagggtaacattgattcaaaaatgatcgatcttaatatgcgcccggttcgtactcatgggcaagaatcaaattcccagactcagggggtaggtcttagtgtgaacaaccatgactctccaggggtggtgccaacaagcaattccgaaagagacaccagcaagtaaacgttggaagatcggaatgtacatttcaactacatatactgttctatacgagttcattttgtcgtgtgtgtgtgtgtggggtggggggggggggggcagagatgggtttattcagtggtttctctatcactaatttttactcaattctaaattataagtcattctaacttttttgaagaggtaaagtatctcaagtttgactaaaattgtagaggtaatcacaaagatttatgacatcaactaggtatatttttaaaatataattaattaaaaaactaataatacttatttggtatcatgaatgtgattgttttattatataaatttgatcaaacttgagatgctttgtctctcttaagaaaattagaatgtactagtaagtatatttttggcagagttgtagctaacagccgcatctcaattggcttgtcatgacctagattggcaaaaccgccaaattactttcacatgaacttgttattgtcttacagacttttgaccattatacatatgattcaggaattccggtaatctgtcgggtgtcccggtgatactaaatgatcccctttatttgttcactagctggatgcccgtacgttgcaacgggaatatataatatcggtatactccgataacttaaatacaaaatctatgttatattgttatgagaaaatgtttcataatcaatttgtgatcctggtcatacataaattttgttattttaatctagttgtttcaccattacattgcaaccatcagtatcatgcagacttcgatatatgccacgatttatatggtctcannnnnnnnnnnnnnnnnnnnnnnnnnnnnnnnnnnnnnnnnnnnnnnnnnnnnnnnnnnnnnnnnnnnnnnnnnnnnnnnnnnnnnnnnnnnnnnnnnnnnnnnnnnnnnnnnnnnnnnnnnnnnnnnnnnnnnnnnnnnnnnnnnnnnnnnnnnnnnnnnnnnnnnnnnnnnnnnnnnnnnnnnnnnnnnnnnnnnnnnnnnnnnnnnnnnnnnnnnnnnnnnnnnnnnnnnnnnnnnnnnnnnnnnnnnnnnnnnnnnnnnnn

SEQ ID NO: 1605 - DNA, 582 bp, Zea mays
  Peptide Sequence Number=SeqID_14338
  Probeset Number=SeqID_16008
atggatgaagcacccgcatccccgccaagctatcgacatgaggacctagccccctcgccttacatgccctcgacacccgcaccgaggcacagacggcgaacgggcggagcttggcctgggcggaggcacggacgcgtggggtggagctcgaccaatggccctgaccgaagctcggtagggtgggccgcagagcttcgtcctagagtcggcggggcagggaagagcttcgtctggcctcctaggtcgctggggtgtggggtggggaggatctttgtcctggggcgcggggcgggcaagggcagcgccgacgagtcggcagtaggccaaagcctggagcagttgagcttcgtcctaggcggtgcgacggatcagcggacgccggctgggcgctggggtgttctccggcggaggcgtcctggcgtctcgggagctgagctaagcactttggccgtgtttgtgaccctgtccctggccagcgcggcccgttcatctgccaggctagaagaccaaaactacctaaacgcggaatccctgcgccacgagcagccaggctcccagaaaacggaccttgagctcgtttct

SEQ ID NO: 1606 - DNA, 595 bp, Zea mays
  Probeset Number=SeqID_16009
ggaagcccgctgtccaggcaagactcgggacccgatgcttttggtttgttgggcaacacatggagagctactaggcgtattgacttactacagggtggatacagtccaacatattggcatgaagaagggaacgaagacacccaaggaacttacccaaccccacgcggaacacacagctatctggagacgccttgagaccatatgaacgctggagggagaagcaccacggcgactgagaaggatggccaatctgatataggcagaaaagagtagacctatgaagatgacataacagataaatgcccgaagcaagaagaccatactgctgagctgcaggagacctacgccagctagagacaagaaggcctgaaggcgtatccagaaaaacgtgtgttccaactgaagaaaggaagctactcggaggctcagtctcaacatagggacaggaagctagcccacctgaaatccaagctatgctactaatgaggccaccaaccacatgaaggggggcccaaagagtgacaggaggactgggggacttaaccgaaggacatgccaggcagcgaacaggggattctctagagggggacccgag

SEQ ID NO: 1607 - DNA, 655 bp, Zea mays
  Peptide Sequence Number=SeqID_14339
  Probeset Number=SeqID_16010
atgaaaacgtcaggaaccaatctggaacatgcgcgcgcgcacaatcgtcaggtgattatcgaagcgatacgcctgcactgtgagctgacccgtgccgagctggcgcggctgacggcgctgacaccgcaaaccgtctctaatatcgtcgctgaactggagcaggcggaactgctcaccagccgtcatccgcgcaagcagggccgcggtcagccggcgattccggtgacgctgaatccagccagtgcgttttccatcggcatccatctcgaccatcagacgctactgattgtgctggtggacctcaccggtgaaatccattttcgccgccttattatggtgcaaaaaccgcagccggatgccacattagcgcgcattgccggggtgctggcggagatcaaacagcagaccgggccgcgctggcaaaaagtgctgggtattggcgtgatgagtggactgccggtgacgctggagaatgatgccaccgtcgcggcgattggcgaacgctttcgcggcgtggcgcgtcatcttaattcctttatttatctgtatattggtacgggcctgggcgcgggcatcatcatggatggccatgtgtacagcggccatgcgcacaacgccggtgaagtggggcatgtggtggtggaacccggtggac

SEQ ID NO: 1608 - DNA, 462 bp, Zea mays
  Peptide Sequence Number=SeqID_14340
  Probeset Number=SeqID_16011
gctgattgcgcaggagcagccccactttgtggtgccggaaatcgaagccatcgccaccgaaaaactgctggagctggaagcgcaggggcaaaaagtggtgccgacggcccgtgctgcacgtctgaccatgaaccgcgaaggcattcgccgtctggcggctgaagagctggcgttaccgacttcaacctatcagtttgcggatagcaaagcgcgtttcgtcgcggccgcgcacgagatcggttttccctgcatcgtgaaaccggtaatgagctcctccggtaaaggccagagcttcattcgcgaagccagccagctggatcacgcctgggattatgcgcagcaaggtggacgcgcgggcgcgggccgggtgattgtcgagggcgtcgtgaagttcgattttgaaatcaccctgctgaccatcagcgcggtggacggcacccattttgcgcgccattgcccatc

SEQ ID NO: 1609 - DNA, 328 bp, Zea mays
  Peptide Sequence Number=SeqID_14341
  Probeset Number=SeqID_16012
gttaatgcttttaagtgaaaccatttccctcctatctatgtattaagggtgtgccggagcatcatcattgatgaaagggttgtgctaaatttcatgcagcgcatgtgtggcattgcgaccctaacaaaggctatgtctgatgctgcccgtccagcatgtatattggaaacaaggaaaaccgcccctggtttacgtctcattgataagtggccagtaagcatacatttttttattcctcgtattgcaattttatttgatatggttatgataaaagataatcatatttctgttgctggtggcattgctgcaatgagatcaattcctgcag

SEQ ID NO: 1610 - DNA, 1183 bp, Zea mays
  misc_feature (1)..(219): n is a, c, g, or t
  misc_feature (820)..(1183): n is a, c, g, or t
  Peptide Sequence Number=SeqID_14342
  Probeset Number=SeqID_16013
nnnnnnnnnnnnnnnnnnnnnnnnnnnnnnnnnnnnnnnnnnnnnnnnnnnnnnnnnnnnnnnnnnnnnnnnnnnnnnnnnnnnnnnnnnnnnnnnnnnnnnnnnnnnnnnnnnnnnnnnnnnnnnnnnnnnnnnnnnnnnnnnnnnnnnnnnnnnnnnnnnnnnnnnnnnnnnnnnnnnnnnnnnnnnnnnnnnnnnnnnnnnnnnnnnnnnnnnnnntcggtggtcaagacggaggccgacgtgttccaagaccagtactacccggccgtccacctcaatggcgctggcggcggcgccatcggctcccacttccacggcaaggagcggaagcacttcccgttcctgaccagccacagcaacggcggcggcggcggcgacgtggcgaccgccgcggccctgggctgccagccattcaccatcaccaccacggcggcctcagagagcgacagcaagcagagcaacggcaactgtgctctctctcttctgtcagacaacccgacatcagcacagacggtcatgatccctactaccgcgcagtccctcgccgcggtgatgcagcacgggggcagactccctgggactataggtcctagtcgacgataacagatgctgcttgcagccttggatatttgtggagtgaacgcattgttgatagcatatggataagaaagtaatgtaattatctggagatgtgtaattatgtggcaatattatttgcaacaatgatgcatggagtactttcatgtatgatactgaggctttgcatttgatttgcttctatttggaaattatagtaaagcgtcgagcatacatattnnnnnnnnnnnnnnnnnnnnnnnnnnnnnnnnnnnnnnnnnnnnnnnnnnnnnnnnnnnnnnnnnnnnnnnnnnnnnnnnnnnnnnnnnnnnnnnnnnnnnnnnnnnnnnnnnnnnnnnnnnnnnnnnnnnnnnnnnnnnnnnnnnnnnnnnnnnnnnnnnnnnnnnnnnnnnnnnnnnnnnnnnnnnnnnnnnnnnnnnnnnnnnnnnnnnnnnnnnnnnnnnnnnnnnnnnnnnnnnnnnnnnnnnnnnnnnnnnnnnnnnnnnnnnnnnnnnnnnnnnnnnnnnnnnnnnnnnnnnnnnnnnnnnnnnnnnnnnnnnnnnnnnnnnnnnnnnnnnnnnnnnnnnnnnnnnnnnnnnnnnnn

SEQ ID NO: 1611 - DNA, 392 bp, Zea mays
  Peptide Sequence Number=SeqID_14343
  Probeset Number=SeqID_16014
cgctattggttccgcctgcgcgcgccgcagcgcagccacgtcagcgtgccggacagtcgtacgcatgacttgccgcgcgtgctgggagctgacggcgcaaaaatgctgcggttgctggatgccggcgtttcgctgtgcatttatggtgaaaccggcagcggcaaggagtatgtcagccgtgctctgcaccagcaaagccgctggcgcacgggcaagtttgtcgccatcaactgtgccgccatccccgaagcgctgattgaatccgaactgtttggctaccagcccggcgcatttactggcgctagtaaaaatggctacatcggcaaaattcgcgaagcggatggcggcgtgctgtttctggatgaaatcggagacatgccgctgacgctgca

SEQ ID NO: 1612 - DNA, 238 bp, Zea mays
  Peptide Sequence Number=SeqID_14344
  Probeset Number=SeqID_16015
atggtcatcgtcacggagacgaagcagcaacgtccattctccacgggtcgcaacctcgccaagctggctttgcatcggccgtgcagatcggggctccactgccgtctgccgcaggctccagtccctcctccgcctttggccagagattggatctgtggccaccggcccgacatcatggagatttcagaaagaccaagtgggggtccagcttgggttgtggcatatccgcagaccgcag

SEQ ID NO: 1613 - DNA, 207 bp, Zea mays
  misc_feature (65)..(65): n is a, c, g, or t
  misc_feature (133)..(133): n is a, c, g, or t
  Probeset Number=SeqID_16016
tgtgtgctcctttcctgtccggccgctgttgggcggtgtgcgtgccctttttctcggccgtgctngggtccggggtgctgtctgctcgcgtgggccttcgcgctgcttggctgggtggccggccccgctgtcntgctgctcgtctccttcgtcggggggccccccccccccccctcgggggtgtttctcgctccggcgtctgcttgc

SEQ ID NO: 1614 - DNA, 527 bp, Zea mays
  Peptide Sequence Number=SeqID_14345
  Probeset Number=SeqID_16017
ggtaacgctggcgctgctggccagcgcccggacgcttaatttgctggcttttggggaagtgttggcgcggcagcttggcctgccactgctgctgtggcgccatttgctggtgctggccattggctggctggttggcgtcagcgtggccatggccggttcgattggatttgttggactgggtatcccccatttggtgggcctcaacggcctgaacgattattggtaccttcttccggccccggcgcttgcgggcccggcggtacttctggcggcggaccatttggcccggctggtgcttaccttggcccaacttccgaatggggtgggtcctgccacggttggggggccgctggttatcctggtaataggaaagtttttgggccaacttcgggtggccccagtccaaccaccaccgggaatggccaataacctttaaccagccagacctggttccgttggccggtgaaaaacccccgctggcccagaaccagggcaaggtgctgttggtggttaacgaagcatcaaaa

SEQ ID NO: 1615 - DNA, 1328 bp, Zea mays
  misc_feature (604)..(604): n is a, c, g, or t
  misc_feature (1132)..(1328): n is a, c, g, or t
  Peptide Sequence Number=SeqID_14346
  Probeset Number=SeqID_16018
ctcgatccatcccagcatcatccccacaattgaggcgattgaagcagaaaaaatcagtcgccgtagcagcgccgcctccgccgccgtggggaggtagcatctaggcccattccgccgcctccatctccggtatgttcccctccgtccctcgattcgcacgaatgctgggccaaaaacccttgcgcgattccggtgcttttctcgcgccctgaatcaacactgtgttgctccaggccagcaatggcttcggcggtggagcggcggagggaggagcacgcgcggagatcgcgttccccagcacggggcagggagcggaggggaacgccgccacgcaggcggagttccccagagcggaggaagggttcgcctgctagggcacggtctcctgctgcgaagtcaagtgcgtcgcatagggacagggagaggtcgcctccgagggagaaggtgaaggagcctgtcaggtcgccagagtctcctgctaaagtcagcctgttggacaagaaaagagagattcgtctccgagagaaacaggcgaagaaggcacgtcaaagcgctcaaactgaagcaaggattcttcatttagagtttcatgtcaatttcctcncatgtattggcctattgctgtaaataaggttcttttaggttaacatgcattattattgtcttgacaaatgcttggttggatattgcttttcagtttaggaacagtatagattagcatcctcagtttggaaagccagatgtttagcgtcatatgctgacaaattacttttacagtaatacaatgccatagatctccatttccaccctcgaattgtgtaaacaatagtaacaattgatttccatatggtaatctgaattagtactgtatttaccacattttgttctatcaatttaacagtgtccctactggtgcacgatgtaagaatttctaatgctcattaagataatcaaaatcgaaaaacgataatccaaagtttctatttcaatttataagcatcgagtttcttttgtattgttgttgttttccactctactaatgggaactgtctattcttgcagtattgcggcatctgaattggtgagcgacatcactgttcgtatagggactacaaagttttaccttcacaannnnnnnnnnnnnnnnnnnnnnnnnnnnnnnnnnnnnnnnnnnnnnnnnnnnnnnnnnnnnnnnnnnnnnnnnnnnnnnnnnnnnnnnnnnnnnnnnnnnnnnnnnnnnnnnnnnnnnnnnnnnnnnnnnnnnnnnnnnnnnnnnnnnnnnnnnnnnnnnnnnnnnnnnnnnnnnnnnnnnnnnnnnnnnnnnnnnn

SEQ ID NO: 1616 - DNA, 509 bp, Zea mays
  misc_feature (9)..(9): n is a, c, g, or t
  misc_feature (25)..(25): n is a, c, g, or t
  Peptide Sequence Number=SeqID_14347
  Probeset Number=SeqID_16019
ttcaagacnggcgcgttccatgcgncggtggcggcgggcgtaccgatcatccggtggtggttctctaacacccacggcaaaatcaaactgaatcgctgggacaatggcttagtgatcgtagaaatgctgccgccagtggataccacgcagtttgaaaccacgtcggtacgtaaactggcgacccactgccgtgaattaatgtctgctaagctggaagagttgaacgctgaagtcgccgaacgcgaaaaaaacgggtgcgcattcatgcgcaccgggtcccggatgcgcatcgacctgacccggacacacagccgcgcctttcgggcgcttcacaacacgattaaaaataacaacatggacacggcgtcttcacgccacgctcaaaagctttctgccggtatggcgctggcttccagcgttatgccttacgccgcccgcgccgccgcgccattgggcgatgtacctttgccggtgccgccgctgatcgaatcacgccgcggtcagccgct

SEQ ID NO: 1617 - DNA, 399 bp, Zea mays
  Peptide Sequence Number=SeqID_14348
  Probeset Number=SeqID_16020
atgaggcgccgcgtcaggtacattggacggcatcgtgatgaagctcccaaggaggctagtgttgatggctacgacacagagtccagtgtcagggaggtgcagcagcctccagcgacgcaggaagttaaaaggagcgaaagaaactgtaaaagaaagcgggaggcggaagcgagcagcaaggacaacaacggagacgagggcaagaagaataacaaggttcagggcgccagcaagaagatttcaaaaaaggcgaagaagcggaccgtcgaatccaaggacggtgaccctcggcacggcaaggaccggtggtcagccgagcgctacgccgcagcagagaagagcctgctcaacatcatgcgctcccgagacgcacggttcggcgcaccggtgatgcggcag

SEQ ID NO: 1618 - DNA, 228 bp, Zea mays
  Peptide Sequence Number=SeqID_14349
  Probeset Number=SeqID_16021
gattgcttagagatgcagtccgaacccatcgaccgccttggtgagcgcgtgctgatcaccgacgaaattggtcgcaacgggaggacgcttttgtgctgcaatcaggcttcctgaacgtgctgaagctcctgtggtggagtgcgcatgcctcattggccaaccaaaattcaaggtaccgttgctgaactcacaactaatctgccctgcgcatggcgcgcacaggtgtga

SEQ ID NO: 1619 - DNA, 545 bp, Zea mays
  Peptide Sequence Number=SeqID_14350
  Probeset Number=SeqID_16022
tgcatgcctgcaggatcttttcgatgagatcgcgctggagagcctgccgctgctgcgccgcaaagggctgacgctggtggtcaacaatcagctggccaacgacgagatgcgctttggcgatcgccgcgcgctgcgtaaagtactgaccacgctgatgcactacgcgctcaccaccacgcagtggggcaagatttcccttgatatcaaagccagcgacagcaaagccaacagcgtgctgttccatctggtggataccggctcaggcctgaccggcgacgagctggccaacgtcgatttcccttaccttggcgaaaccacgcaggatcgttacggtcaggcgtccggcatggcgtttttcctgtgtaaacagctgtgcaaacagatgggcggccagctggagattatagccaaaccggatatcggcacgcgctacaacattcatctgccgctggcgctagagcagcagagcgagcaggaagagaaactgctggaatgcgtgactgcgctggtggatatcgcggtcgaagacgtacacaaaattgtct

SEQ ID NO: 1620 - DNA, 426 bp, Zea mays
  misc_feature (26)..(26): n is a, c, g, or t
  misc_feature (28)..(28): n is a, c, g, or t
  Peptide Sequence Number=SeqID_14351
  Probeset Number=SeqID_16023
tctagaagtcgaacctgcagcattgncnactactgaactcaggcatcactggcgcggcatgggcttttacaacagctttatagaaccggtaacgcataccctggataggacacgcggagatacagtgcagaccgggcttgccatgtggtaaccatagaaaggaagtcaaggacccccaatgggggtctcaaactatgcagcaatagaccagagacgcattcgccatacttccaggcctacagcgaacccacgttaaatataggccggagttaaacgctctagacaaaacgaatcccatattgggtatgaccttaaccattacaataggtctcgtacacatgaatacccccggtcgcccgggaatgcaacaaaatctattagatctacgccgctttgggttgcggggcttacctcccaaccccagag

SEQ ID NO: 1621 - DNA, 418 bp, Zea mays
  Peptide Sequence Number=SeqID_14352
  Probeset Number=SeqID_16024
tgcaggtgctcgacacggaagccggcacgtgcgacgtcgtgctgcccgcgcacatcgtcgacggtatcggcacgtggttcaaccgcgcggtggtgagctcgcaggcgttcgcgaagcaggtcgcggcgctgggcctcgcacccgatgcggcgccgaacgcggaccaggcgctgaagctgcgcacgtggctcgcgaacgacatggagcaggtgttcgcggagatgctcgatcctgcgtcgcgcgcggtgtcggcggtctatcacctcacggacacgctgtgggcgctgcccgcgttcgacgcattcgggcgcaagcacggcgcggcgtcgctcgcgatcgtctacgacgcgcacgcgactgcgcgcaagggcaagccgccgctgccgtcgccgaaccagccggcggtcgacgcgctgca

SEQ ID NO: 1622 - DNA, 202 bp, Zea mays
  Peptide Sequence Number=SeqID_14353
  Probeset Number=SeqID_16025
atgagtctgcgtaatattgttgccatcgatttaggcgcatccagtggccgcgtcatgctggccagctggcaggctgaccgtaagcagctcagcctgcgcgaagtgcggcgtttcgccaacccgcgcgtgcagcgcggcgattatgactgctgggatttggaccggctggagcaggagatccgcgccggactgcaggcatgca

SEQ ID NO: 1623 - DNA, 506 bp, Zea mays
  Peptide Sequence Number=SeqID_14354
  Probeset Number=SeqID_16026
caccgccaaaatggtcaagaagagaaagaacaacggccgcaacaagaagggccgcggccacaccaagcccatccgctgcagcaactgctcacgatgcactcccaaggataaggcgatcaagagattcaccatccgcaacatggttgagtctgctgccatccgtgatatctccgatgcctctgtcttcgccgagtacaccgtccccaagatgtacctgaagctgcagtactgcgtctcttgtgccattcacggcaagattgtccgtgttcgttctcgtgagggtcgccgtaaccgtgctccccctccccgtgtccgctacaacaaggacggcaagaagatcacccccaccgttgcccccaaggtctaaatatgggaataatggtgtttgggcgaagtctggttacgtttaacggcttcatgtaaaaatttgattagatgaatacccgggacagaaagaatcctggcggctaaatgaatcggactttttcttgttaaaacttcaaaaa

SEQ ID NO: 1624 - DNA, 1220 bp, Zea mays
  misc_feature (1213)..(1220): n is a, c, g, or t
  Peptide Sequence Number=SeqID_14355
  Probeset Number=SeqID_16027
aattcggcacgaggggagatccggtgccattttttaatactactagtctcgttcgatcggatcggcttcccgtcttggctgcatttttctatccccgcgtggccgcgtgtagtcctagtctctcgccagcaccatcatcatcaatcacggcggcgaccccgccccgcctcgatcgcccacgctgcccgactggaaccggacgctgctgctgctgctgctgctagtaggctgacagcgacgacgagggggaggacgaggcgaggggagccatggctcagatcttgctccacggcacgctccatgccaccatcttcgaggccgagtcgctctccaacccgcaccgcgccaccggcggcgcccccaagttcatccgcaagcttgtggaagggattgaggataccgtgggtatcggcaagggcaccaccaagatatacgccaccgttgatctggagaaggcccgcgtggggcgcacccggatggtctccaacgagcccgtgaaccctcgctggtacgagtccttccacatctactgcgcgcacatggccgccgacgtagtattcaccgtcaagatcgacaaccccatcggggcctcgctcatcgggagggcttacctgcctgtcgaggacatcctgggcggagacgagatcgacaagtggcttgagatatgcgatgagaagcgcgagcctattggggacagcaagatccacgtgaagcttcagtacttcgacgtcggcaaggaccgcaactgggccaggggtgtccggagcaccacgtaccctggtgatccttacaccttcttctcgcaggtccccccccccaagtgtactctgcattgcgtccatcctgtcccgatcgagttcgggccccgcctgttgttttttgatgttttgactatgcatggggcccctttttttttaaaaaaaaaaaaaaaagttcaaaaaaaaaaaaattaaaaaaagttattccgcgataaaaagggccttgggcaagggggggcgataggagttaaagttgtttataactacccccaaagacgagattgtgttgccccctgtttgggggagcttggggagctttttgcgttgcagggctgtttgtaaaggcgacttcaaagttcagaattaaaacaagggtggttttttcaaaaaaaaaaaaaaaaaaaaaaaaaaaaaaaaaaaaaaaaaaaaaaaaaaaaaaaaaaaaaaaaactcgnnnnnnnn

SEQ ID NO: 1625 - DNA, 568 bp, Zea mays
  Peptide Sequence Number=SeqID_14356
  Probeset Number=SeqID_16028
tgcagaatctgcacaaacaagacctcagtcggatccccacggggcaagcccctctgccggccctcctccgcatcccactctcgccggccgccgcagccaaggcaagaggacgcctccccacacccgatctcccctcccacctccgatcgctacgaaaagcccacgcccgcctcgtccctccggccctcccctccgcacgcctcgcttgccgcgctatttcaaatcccgctcgaaccctagtaactacctaccccgcatggtcgatcgtgccgccgcgcgggcacaggcggtgagctccgacccgccgccgcctgcactgctggagcccgacccgcggctcagccagcccggggccgctgatgggcaagaggtcgcttcggcgggtgcgaccgcgggtccgccttccctgccccaggccagcgacgctgaggaagacgctcttgcctcgccagcggggcagccgggcgagcggtgcagagcgatgatggaggtggtggccaaagacggggcgtggaaggtgaccaagctggtggtggagcactgccacgagctgcaggtcctactctag

SEQ ID NO: 1626 - DNA, 233 bp, Zea mays
  Probeset Number=SeqID_16029
acctatctcgagtcgcgagccaaagaaagaacttgcatcttggaggggcccagtggtatatcttaatttacccacaaggatgtgatgtctgcaatcacctctcactctttctttgtgttgccaaccatgataagctactcccaggtagatgcttaattttttgttcaggatggagtcactttgcgcaatttacaatagctgtaattaatagagaccctaagaaatctaagttt

SEQ ID NO: 1627 - DNA, 334 bp, Zea mays
  Peptide Sequence Number=SeqID_14357
  Probeset Number=SeqID_16030
tgcagggcagcttcgccaaaggcggcgtgaaggtggaagtgcagccgggcttaagctctgaagtctccacccgcgtgaaggcgcatcagtatgaagccacgctcaacgcctggggcgcggattacttcgacccgaacaccaacgccgcgtccttcgcttacaacccggaagatggcagcaaaaccattgcttatcgttcagactggcacatcccggagctgagcaaacagacgctggcggcgacggccgaagccgacagcaataagcgcgttgcgctttatcaggcgatgcagcgcgaagtgctgaagaactcgccgtacgtgattggcctgca

SEQ ID NO: 1628 - DNA, 335 bp, Zea mays
  Peptide Sequence Number=SeqID_14358
  Probeset Number=SeqID_16031
gtgtgtcctgtgcttgttgtgccctccgctcctgctgttggcgtgggtgcatcctgtggcggtttgcttctggctgttccgcccccagcgccgcgtttgtccgtgcggtggtcgtgcctgcccctggctcgctgcgggtgtgcgtttctgtggtctctctgcccctggttctgtggggtggctggtgcttgtccgttggctcctgggcttgtgtgccgcggccgcggcgcccggccccgcccgccgcccggcccccgggtctgtgtgggctccggcagcgggtggtcggtgtccccgtcctgttggcgccctccggcgtctccctgtccttgccc

SEQ ID NO: 1629 - DNA, 377 bp, Zea mays
  Probeset Number=SeqID_16032
ctgcaggccgaaagtctggttaaacaggtacctaaagggaactactttttgatgggcggttcgccggtggataataacgcgcgtctttttcgtgcccggcagatgaaaatgttaaaaccctacatcgataacggcagcattaaagtggtgggcgatcagtgggttgatgcctggctgccaaaaaatgcgccgaaaatcatggaaaacgcgctgaccgcttacagcaaccacattggtgccgtcgttggcttcaacgatgccaccgccggtgggggcattcaagcgcttagcgcgccaggaccggcgggccaaagcgccatttccggtcaggacccccatcttgccggccttaaacgcattatgaacggggcacaaac

SEQ ID NO: 1630 - DNA, 214 bp, Zea mays
  Peptide Sequence Number=SeqID_14359
  Probeset Number=SeqID_16033
gtgggtcctgtattaggtttctaagctgggcgccctctaagtatgcaggaatattcggattgcccctgctacctctagggcgttcaaaggagggcctcgctgaatccaagctgcaaagcataagttaaacaagtacggtagtcctataatggcatgtcctactcatagaccccctgggaatatcctcgaacaacttatggtatagcgtgttaag

SEQ ID NO: 1631 - DNA, 287 bp, Zea mays
  misc_feature (16)..(16): n is a, c, g, or t
  misc_feature (170)..(170): n is a, c, g, or t
  misc_feature (193)..(193): n is a, c, g, or t
  misc_feature (200)..(200): n is a, c, g, or t
  Probeset Number=SeqID_16034
gggtcaggcatgtcancagccagccggcgcgccacacccgggtcaggcaccagcaccacttcgcccacaacgacctgaaatggcgcaacctgctggtcgacgaccagaacacagatattcttcatcgactgccccaccggcgatttctggcgcggcttcatgtggcggcnccggatgacacaccacttggagngcctggncaaagtggccaaataccacctgtcggcaacccaacgcctgcgtttctacctgcaataccgtggccgcgaccggctgaatgtgcgtga

SEQ ID NO: 1632 - DNA, 301 bp, Zea mays
  Peptide Sequence Number=SeqID_14360
  Probeset Number=SeqID_16035
accccacgatactgattattttgtggcaaaagatgttatagaagggatcaggcttcaggctatggagaatatcaataaatattatgttaaaacaataaaatggcgtgacaagccagggcatttagtacttcggagagtggccaacccagatatagtatgcaagctacagttgaagtaggaaggaccttttctggtataacttgtactctgcggttgattgtggatctgtttccttacgattgtttgctcctccataatagaggggatttttccatgtaaatctttgtgtatattttatttt

SEQ ID NO: 1633 - DNA, 569 bp, Zea mays
  Peptide Sequence Number=SeqID_14361
  Probeset Number=SeqID_16036
agcaataccttgtgtatgatggagtgcagctcgaggacgatcgtacgctgattgactacggcatggaacataaatctgtgcttgacctcaaagaaaagatgcaaatctttatagtggaaactctagcaggcacaaccatcactcttgaggttgaaagttcagagactatcgacaacatcaaggaaaggattaaagaaagtgagggctttcccaagggtcagcagtgtctcatatttgacaacaagcagctagaggacaacagcaccttggcggacaacaacatttccgaggggtctaccctcctccttgtcctccacaggcttctcggaggaactatgcgtatctccataatcatatcaccgggtgagcgtatcactctcgaagttaagaggtcagatacgatcgataatgtcaaattaaagatctatgagaagacccatattcagcccatacagcaaaggatcctatgtgaatggagcatgaatatggagggctgcaagacccttgcagactatgacatagaggatggggataccctagatatgataccctgcatgtgtggctgctaa

SEQ ID NO: 1634 - DNA, 226 bp, Zea mays
  Peptide Sequence Number=SeqID_14362
  Probeset Number=SeqID_16037
gccccgtgttttttttgatgggagtacgtttcagaactgttaaaatcttgatttgctgttcttctaatcagggaacacgcatacccaaggcacatagcgctggtaattgctcagatcctgatggctgttggtcatttcctctttgcaatggcttggcctcgaactatgtacataggaaccttcctggttggactcggatatggagctcattgggctattgtgccag

SEQ ID NO: 1635 - DNA, 267 bp, Zea mays
  Peptide Sequence Number=SeqID_14363
  Probeset Number=SeqID_16038
ccgtcatccctacggaacgcatcgctcaactgctccacgaaaagcattctcgctatcggcaggtccaattggagccggccaactgcgctgcgattccggacggcctgatcgaatcgctgctcttgggtcacacgaaaggtaccatcacaggcacggactgtgcgcatagaaggctatgcccaacaggcggcggtcggcacgctaggcctcgacaaagtcggtgagctgacgctgtaccagcaggtcaagctggtgcgcgcgctctag

SEQ ID NO: 1636 - DNA, 286 bp, Zea mays
  Peptide Sequence Number=SeqID_14364
  Probeset Number=SeqID_16039
gtcaacatcaagtacggcatggtggcgctcggcgcggtggtgctcccgcagcataacggcacgagcggcggcggccgccaaggcgggcaccgtggccaggcaggtcttgtagcgcattcttgcaggcgacgaccacgactgctacgtgttgtacacgcaggacctccatgtgttcctcgtcaagtgcactgacggcctcgtggcgctctgcatggccgactacgccgccgggcgtaagcaccagtgcacgttttggtcgtcgtcgatcgtcgcaaccaacctgcag

SEQ ID NO: 1637 - DNA, 280 bp, Zea mays
  Peptide Sequence Number=SeqID_14365
  Probeset Number=SeqID_16040
gaaagcaaactgtgccaggtacgcggtcgccaaagcgcggctgggcaggggagtctgccaaaacgcgcggagacgccgcctgctgcgcacacctggtgctggcgacagaagtcaacaaagcgcgggcggccaccgcaggctgcgagacaatctcctgatggtgaacggaaccagcagggggaagctcaccaggctccagtcttatgaacagctagctcctactgctgccgtgacaccggtgcgagcacgcctacgagtcgaaggcgctgctttaacataa

SEQ ID NO: 1638 - DNA, 277 bp, Zea mays
  Probeset Number=SeqID_16041
ctgcaggctattcaaaatgagagagaaattgagtcgttgcgtaaaaaaatgacattctgccttgaagcaaaagagaatcttgaaaggtatatagatcatttatcaaatcatttggtttcacttctccacattgacaatattgttaattctgacgctcagatggaacttaagactttggttgatgcaatagcttctgcgagtcaacgggaggcagaagctcatgaaactgctatcggtttggccaaagagaatgaagaattgaggctgcaggcatgca

SEQ ID NO: 1639 - DNA, 653 bp, Zea mays
  Peptide Sequence Number=SeqID_14366
  Probeset Number=SeqID_16042
cgcgtggccgccgagttgggagagaaggcaatcttcatcgccacggatattaccaaggacgatcaagtcagcgcagcggtcgccaaggttgtgagtcgtttcggaggcgtggactttttggtgaacctggcctgcacgtatttggacgacggcttcaagtctccccgcgctgattggcagactgccctcgacgtcaacgtggtgtccggaatcatgttggcccagaaggttcatccagagatgaaggcgcgtgggggcggtgcaattgtcaactttacgagtatctcggcaaaggttgcccagacggggcgttggctctatccggtttccaaggcggcaattttgcagctgacgcgcagtatggcgatggacctcgcgccagaccgcattcgtgtgaacgcggtgtccccgggctggatctggtgcaggttgatggacgaaatgagcggtggcaatcgagcgggtatcgacgaactcgccacaccgttccatctgttgggacgggttggtgatccggacgaagttgcgcaggtggtgctgtttctgtgctccgacaatgccagtttcgtcaccggcgccgactacgccgtggacggggggtattcggcgatgggccccgaacagaatgtcccgccatacggcaagcaggccgg

SEQ ID NO: 1640 - DNA, 308 bp, Zea mays
  Peptide Sequence Number=SeqID_14367
  Probeset Number=SeqID_16043
aaagcgactttagctttcgtctgggaacaatttgttttttaggttctcagtgtcaaatagcaggatgttggtgggctataggatgtgaaaaggattcttctagatactattctgctccctttgacgtataatcgccttatttcttctaaattgcgcaaacaacatgggatcgctaaaatgaatgtccgttggacttctaggctttactcgcgaaagcctgaatactcactgaacttttgtagcgtcaaaggtccagaacccataaacatatatgttgcagaaacagaaaagaatgtttaggatatttt

SEQ ID NO: 1641 - DNA, 296 bp, Zea mays
  Peptide Sequence Number=SeqID_14368
  Probeset Number=SeqID_16044
ctgcaggagtggtggggcctcgtgttctgcatggaggatcgcgccatcctgtgccccgattgcgacgaccccatccacagcgcctacgacctcaccgccaagcacacccgcttcctcctcgtcggggccaagctctccgccacgctcgtcgaccaggcgcccccctcccctgacgacgatgatgacgacgacgggctcacaactggattgaatgaagagctcgcgtccgcgctcgtgacacgcgttggctgggtggtggctgtgccctccgggaatgcggagggcgcatgaaaccc

SEQ ID NO: 1642 - DNA, 434 bp, Zea mays
  Peptide Sequence Number=SeqID_14369
  Probeset Number=SeqID_16045
cgccatcaacgccccctcgcgccctccgttacctttgctccgcgatccgccacctcaatcggttccgctgagctcgctccctccgaacgcgtacccgtcgcggcagttttcgcccccaccacgcccaagctcatcgtcgtcgtgcaccgcgcctcctcccctcaaccaacgtcgaggccgctggccacgagcgcgcgcacgccatctgggcgctagattcactacgcacccgcgcttgccctgcctcctcctcctccaccagctgaccctgctccagatgtggatcccgagttcgagtcctcgctcgaggccatggtgctactgcagcgctccgtcgcagatctccctctacgagcaccgacggaggatccgacgcctgctcctgcatccctgcagcgaggcctcctcgtcctcgcccttggcggcaccgtgag

SEQ ID NO: 1643 - DNA, 259 bp, Zea mays
  Peptide Sequence Number=SeqID_14370
  Probeset Number=SeqID_16046
tgcagtaagttgcagtctgcggttctcaaggatgccatctcccagattgttggggcactaagaagaagaataagaagctcaccgagactgttgaacttcaaatcagtctgaaaaattatgatccacagaaggacaagcgtttcagtggctctgttaagttgccccacatccctcgaacaaagatgaatgtgtgcatgcttggtgatgcccatcacattgaggaggtaagcaaggagttgatgatgtgcttcaaaatgca

SEQ ID NO: 1644 - DNA, 240 bp, Zea mays
  Peptide Sequence Number=SeqID_14371
  Probeset Number=SeqID_16047
gagttcttcatgtgccacgcctgggaaaaccttgatgcatgccagatcattcggctggcagctcatactccttttgccacctggcgtctgagcgatgaggcctgtaccgagcgctcttcccaacacaagcacatcctgagcggggaagggcgcctgatgcacattcatctacttacccatctgggcggtatgtcacaccgattcgtggggactctagacacactctgctattacgccggc

SEQ ID NO: 1645 - DNA, 321 bp, Zea mays
  Peptide Sequence Number=SeqID_14372
  Probeset Number=SeqID_16048
ttcatcgctgatcttccagtagatatcgatgggatcatgagcctgtttatggttctccactttatggacaacaatatgatttctggagtgagtattcatacttctgcgtcgatcgaatagcagttttactcgctttggagagctgcatctgttcatgaagggtaatacaagggcggcgcttatgagcacaatgtttatcacttctagcttcgtgtagcttgtcatatgggtcagtcaggtgggaactgagtaaccgtctagggatgctgccctcgcctgctgatgcaattaagctcggttcaggggatctacaaagggacc

SEQ ID NO: 1646 - DNA, 448 bp, Zea mays
  Peptide Sequence Number=SeqID_14373
  Probeset Number=SeqID_16049
gttggcaagcgcgcaggttgagtgcatagtatcccctacaagttttgcaaagaggaccagttcatcaaagagcattaagagaggtaaagccagggttgatacagttaacaactcgtactccaccgaccacaggggatcttgtgtggttacaggtggcagcttcggaatccccggtaagatgaggcagttgtccacatgaaatttaaaggacatgtcaaaaagctaccgtcaagaaagttggtataggaagtttgtagttaatagcaagatttatgtcgcagagttatacagggtattgaatgcagttttaatggcgttcagaaagttagtggctgtacttttcaggcatgcaacatagttggtccttctgttcccaagcacaaaggttatgtatgctcaatatagatcgcaccaacagggtcataaggggagcagcagagggtaccga

SEQ ID NO: 1647 - DNA, 363 bp, Zea mays
  Probeset Number=SeqID_16050
gccacaccactgtcgtcttccgtgctggatccgcctagaccgtgcgccggtggcgtcttctacgccagatccacgctagcccgcgccatcgtgcgccatttgcatgtcgggacgtcgtcttctgtgtcggatccgcctctggacgcctgcgttccacgccgaatccgcacccgcctcgatccgaccgtcgtcgtaccagtgtaccactatggtccacgcaggacctacccgcctggcatccacccatctccagccaacatcgtctctgatgaggacctgtcccgtgcaaactgctggccagatccgctccaggctgaccagattcgtgtccctccacaatggtgctcttctggttgctcctag

SEQ ID NO: 1648 - DNA, 371 bp, Zea mays
  Peptide Sequence Number=SeqID_14374
  Probeset Number=SeqID_16051
atggaactgctgtgtccggcggggaatttacctgcgctgaaatcggcggtggagcacggcgctgacgcggtgtacgtcggcctgaaagatgacaccaacgcccgccactttgctggcctcaattttaccgataagaaactggcagaagccgcgcgcttcctgcatcagcaccggcgtaaactgcacgtggcgatcaacaccttcgcccatcctgacggccttaaccgctggcaaagcgccattgacgtcgccgcacagaacggtgccgatgcgctgattctggccgatatcgccacgctggagtacgccgccagccgctatccgcaggttgaacgtcacctttcagtgcaggcgtccgctaccaatctgca

SEQ ID NO: 1649 - DNA, 320 bp, Zea mays
  Peptide Sequence Number=SeqID_14375
  Probeset Number=SeqID_16052
cacatctcttacttgctgcacgctgccgggccatgttcgaacaccgcaggcctgccactcggcggcgaacagcccttttgctctaagcttcttcagccacgttacgaaagttgcgcgcctgaatacctgcaagacactggatgtctccgccgtggctgtacacaaggtgaacctcgtcttgcctgattgtgaagagcacaatgctaatgctccaaactacgcctacctgcttgacgcatccgagactgtcggagtggagttgccatactcgaagccggctggggcttgcttcaccgataccgatactagaacttatgctt

SEQ ID NO: 1650 - DNA, 390 bp, Zea mays
  Peptide Sequence Number=SeqID_14376
  Probeset Number=SeqID_16053
atgcccgttgagtcggagcgggaggtcgccgagctgagagcaggggcactacgaggggtagccccctcccggaacacagaaggagagcgaacacgcacgacaagcacaggcgagcaaacggccaccccaaggcccgaagaggtagacaggccccgcatgcggagagaggcaacgaaagccccacccgccccaaaagagcatcgaacgaccggacgcgcacgggagaggaagcacaaccccgaagagaaggaccaccccggaaggtgcagaaggaggcacccgaagaccgcacgcggacgaacccccccgcaaaccggagccctccgggcgacgggaccaacgctaagcgcgacgatttgggcgccgacgcacggaagaaaccgaaaaaag

SEQ ID NO: 1651 - DNA, 674 bp, Zea mays
  Probeset Number=SeqID_16054
tgtggatcgtggaagatgccgcgtacgaatctcgatgtcgctagagcgcccccaatcccacagcacatgatgggcctaaatcacatgcatgctggttctgtgcctcctggtaatgtacccccaatgggtgggttcccaagtgggatgggcaacatccaaggagcatcaggttcgtctggcgggcgggattttcctatgggtggcatgtatactcggcctcaggggcaaatggctccacaagggcaaatgacatccattcctggtgtaagctctttccagggaatgggcaatgttggccttacaccgcccccgcctttagctctcgccgcctcgaggtggctcggcaacacagtggccatccctggagcaaaacaaggattgtactgaacctgggcgttcgggtgcccctaggtttgtagcatgtaaatccatctcgaagcaatatcagcgtatctagactcccgcccctcccccgggattttttctcgattattgctcaggcagctagggtttaatgctatcccgtcactgtggtttccccctgggggccttctgtcctgcgcctcctttgttttgtaataaaaaaagaaaccaaaacaaaaagaaaaaaaaaaaaaaaaacaaaaaaaaaaaaaaaaaacaaaaaaaaaaagagaaaaactaacacatgagcc

SEQ ID NO: 1652 - DNA, 259 bp, Zea mays
  Peptide Sequence Number=SeqID_14377
  Probeset Number=SeqID_16055
ttaatggacggcgccctgctatccgaacaacataacgctgctggtgtggaggttacacccatgcgtgacctccacacttgccagagcgctaccgccccctactgttcgttttatgccttcctttgtgggcacttacgccggctgtcccagtaaagctctagatcgggggctcccttgcagggaacgatttaatgctttgctgtatctcaaccccaagaggctttattagggcgatggcacacgtgaggagacatctccc

SEQ ID NO: 1653 - DNA, 234 bp, Zea mays
  Peptide Sequence Number=SeqID_14378
  Probeset Number=SeqID_16056
tcacaagtgcaccgggcattccggcatgtccgggcggctcccggcatctttcggctggcatcggtcagatccgcacggcacaactcccgggaagcggcgcgcattcgccaatggtaggccgcccggagccgtgtccacccccacgcggcgacatcccggctgtccggtctccccagtcgcggcccgtcccgttgcccgcgggcaggccctcctgccggcagcgctgcccggcgg

SEQ ID NO: 1654 - DNA, 210 bp, Zea mays
  Probeset Number=SeqID_16057
acttcgagtaagtcattcgactggctcttggaggcatgggcactgatgaggatgacctcaccagggtcgtaactactcgcgccttgtgtcgacctgaagctgataaaggaggcttatcagaagagaaacagtgtgccgctatagcatgctgtggccaatgatacacctagagattatgaggtctttccgcttgtaccccttggagctgtt

SEQ ID NO: 1655 - DNA, 796 bp, Zea mays
  Peptide Sequence Number=SeqID_14379
  Probeset Number=SeqID_16058
atgctccagcctgttctgccgcttgcctcgctaccggacttcaacaacgaagtcgccggactgattcacggttacctgttcaacccggatgcgccgccacagcggctcaacgcccgcgaggccgcgcagctggcgcggcacaccttacccgacggctgctttctctggctgcacattaacctgaatcatgcccgcgccgagcgctgggttcaggaccacttccgcgtagatgacgattttttcgatgagattcattcggcctcaccgcgcacccggctggcgcagcaaaacgatgcgctgctggcggtgctgaatgacgtcaccttcagtaaagaggagcgcagcacgcaaaatgcgacgctgtggatctggtgccggccgcaggtgatggtcagcgcgcgctatcgcccggttggcatgattgaacgtatgcatcagcagattgatcggctgtgtttcagcgcgccggatgcgatgctgctgtggctgctcggcgaacaggaagcgcagctggagcaggtggtgcggcgctccagccaggcggtggatgcgatagaagagcggctgctgagcgcggcgatcaaagccaaccgcagcgagctgggccatctgcgccgcatgctgctgcgcgtccagcggctgctggcgccggagccggccgcgctgtttcgcctgcttaaccggccgccaaactggctcaaccgggagccgctcaatgagctgcggattttcaccgaggagttcagcgtagcgcttaacgatctcgccagcctgaggagcgcatacgcctgctgca

SEQ ID NO: 1656 - DNA, 624 bp, Zea mays
  Peptide Sequence Number=SeqID_14380
  Probeset Number=SeqID_16059
tgcctgcagaagtttattttaagctttgtgttctcattgcttaattttaaactgacatttatccttgtgaaaggttatttttaaaattgtagaggatcatccaagggatgttaacgcccaaatggaaaattttagcattgtctatggtgacgagtctgtgcctcgcttgtatgagaactctcgaatatcttcggatcaacttcctggccaatcaggtattgtgaagcgggctgtggcgcttggacgttaccttcagaacccgttggcaatgattgcaacactgtgtggacctgggaaagagatactttcttggaaactgcatgctctggaacagtttctaactcctgatgagaagtatgaaattgttgagcaagtaatggttgatgcaacaaatcagataggttttgatgtcaatcttgctgctagccatgagtggcatttttctactctacaatttattgctggtttgggtccgcgtaaagcttcagctttgcagaaagatctggtaagagagggatccatttttagtcgcaaagagcttgtaaaacctctaggcaggaaagtattcatgaatgcttctggatttttacgtgttcggcggagtggtgcagctgcaggcatgca

SEQ ID NO: 1657 - DNA, 558 bp, Zea mays
  Peptide Sequence Number=SeqID_14381
  Probeset Number=SeqID_16060
ctgatagcccgcatccacccggtcgtcagcgtgtacaagttaaaagggaatcagctaggctactccggcaacgtgatcaactttcctcaggaggtgaacgagttggcaaccacgctgccgcaccgcgtcgccgacttggactgtctgatcgcagtgcggtcccagggagctgggggctacatcgacttccaggtccgcgccgggagggtgcgcgccgcgctcctgtacttgaagacacaccatcgctattacagcgacgtcaacatttcggaggaaaacctcgcggagctccccgaagatggctgtgtcttcaaccaggtaccaggcttccaggatccccaccctgttgctgacacggtcccggacgtcgatgaccccaccgccttacatctcccacaccttgcatctccgggtggcgtgggcgccgacgccgtccgccccgccccgccgcctgaaggccccgctgctgaccctgaggtgcacgaagacgttcccgacatccatgtcacaggggtccccatgctgcaacctcagccccacggcgaccaagtgcgggct

SEQ ID NO: 1658 - DNA, 1076 bp, Zea mays
  Peptide Sequence Number=SeqID_14382
  Probeset Number=SeqID_16061
atggccgtggacgcgctggcggtccaggccgagatggccgacgaggacgcgccgttcgaggtctccgcggccgcgggggacacgggcgtgttcgactcgctggtgccctcggacgagtggtccgagtctggtgcctcggacgggcgcgtcaccctggtggcggccatccaggtgcgcgacccgtcgcggcggtacgaggcggtgggcgcgcccatggtcgccgtcgtgcagtcggcgaggctgttgggcgcggcgggctacagcgccgggaggttcaaggtacgaagcctgcacgtcggcggcgtgcagatgaggtgcacgccgtccggaggtggcgggagcgcgcgctggggcgcggagaggcagaagctgacggcgatgcagtggatgctcgcgcacgggccggcccgcgctggcaagagggcggcgacgacgacggcgcaggcgggggcgagagtgcagcggcccgacgtcgtgtggagcctgtcgtcgcgggtgctcgccgggatgtggcttaagacggtgcggaacccggacgtaaggattggcggcggcggcggcggcacgtcctgctgcgctccggtgtcgcccccgccaccagtgcacgccctgcgcgccttgctccaggacctcagcgacctgcacgagtacgccgaggagatcgcccgcctgcccaacaactgggacgcgctccgcctgccccggcaccggcggctcgtggagggcgagctagaagggtcggtggcgctgctggacctgtgcggggcggcgagggacggcctcgccgacgccagagaccaggtccgggacctgcgcttgctcctccgcagacaccgcgcggcgagccacggcggaccacgccggggcggcggcgccgccgccgctgccgccagcgccagggcggaggcgtgcgctgctgggtcgctgaagaaggtggccagggccatcaggcgggagtcctgctacaggcgttctgccgttggtaacaccagagacgacgacctctctcgcagcggcgcgccgaggccgctggcgatgctggcggaggtcagggagctcaccgtgtgcgccctgca

SEQ ID NO: 1659 - DNA, 236 bp, Zea mays
  misc_feature (7)..(15): n is a, c, g, or t
  misc_feature (18)..(18): n is a, c, g, or t
  Peptide Sequence Number=SeqID_14383
  Probeset Number=SeqID_16062
ccttgannnnnnnnnacngggaaaaccgtggagtttcccagattactcggctcggagcacaaaccccttttgccagctggcgtgatacctaagaggaccggacctatcgtccttattaccaattgcgtaccatgaatggccaatggcgccagaggcggggttttctacttacgcatctatgcggcatttattaccgtggattgagcgctctctttacaatcgggaaaaaatgcccg

SEQ ID NO: 1660 - DNA, 366 bp, Zea mays
  Peptide Sequence Number=SeqID_14384
  Probeset Number=SeqID_16063
atgcgttctggttcgagaaaaacgacacgggatcccagtaatcgacgccaggcaaaagcgagaggcacctccgctccgctcggcttgccgtgggttccgtcggcccggcccctcgccactgctgtagagtacgccctttcctctccggtcgagtcagccgcgctcctttacgcctcgccgctgcccccgccaccgcaacgcctggtgcccgggggccgggccgggtcgcgtggtggatcgacgctgtaccagtaccaccctgcctgccggccggccggcctttggtgcgtcgcgtggcatgtgctgcttgcgcgcacgtcgcgtttcgccgtcgagtcttgtgaagggacgccggacgcgcgctga

SEQ ID NO: 1661 - DNA, 390 bp, Zea mays
  Probeset Number=SeqID_16064
attacggcacgcagatggttggcggtattcacccgaagaagggtggcgaaacctggaccggttccaagggtgaaaccctgccgatcttcgcaagcgttgccgaagccaaggaaaagaccggtgcggacgcatccgtgatctatgttccgccggcaggtgcagccgacgccatcatcgaagccatcatgccgaaattccgttcatcacctgcatcaccgaaggtatcccgggcctggacatagggcgcgtcaaggttcacctcgaccgttccacgtgaggcttggtcggcccaaactgcccggccatcctgaccccggaagattgcaaaatcggcttattgccgggctcaattttcccaaggggttcggccaggattcttttcccgttcgg

SEQ ID NO: 1662 - DNA, 782 bp, Zea mays
  misc_feature (73)..(73): n is a, c, g, or t
  misc_feature (733)..(782): n is a, c, g, or t
  Peptide Sequence Number=SeqID_14385
  Probeset Number=SeqID_16065
cgatatgcagacagcccctttcttgtgaagtttgtgcgctgttcttgctaccagctgatcacagggttcaganaatctgagagtacccttattttaaatcaaattaacccactctattattccatgttagcaaatgattcttgggagatttttacatattcctgattactccaatttgtgctttggcaacctgcaagtttgaatagcttggacattgatttatggttatatttccctcttttgctttgctttcataatccagaagaaacagctgagcgcgatgttggatgaggaccccgctttgatggagaagagggatgccttggtcaagaggctagagctgtacaaatctgcaaggaatgagatcgactcggtcgcatggaaatgattggcttgtgacagctacatctggaatgtatgtaaaatgtacaaccgcagcagcacacgtgtgattgcagtagaatgttcaattcttttttacatttgaatttactctggaggccttgtacgcagttttcactcgagtctttgccggacatgcttatttggccgtcttggccttaacacgattgtgttatgcgtggatgatctggtctccggttgatataagagagtgtatatgtattcttttgttgattttattactgccttgatggcctccaaacttctattgggtggggtgccaggctggacaatctgtcagatgctacaaaatgaaattgtgggataggannnnnnnnnnnnnnnnnnnnnnnnnnnnnnnnnnnnnnnnnnnnnnnnnn

SEQ ID NO: 1663 - DNA, 354 bp, Zea mays
  Peptide Sequence Number=SeqID_14386
  Probeset Number=SeqID_16066
gtatgttttctaatctatacaggtcatatattatagcatcacatgctggaatcgcaatctcgacacagaggaccatttatgtcgattggcatgataggcttgttacagtcacagcatcctatcataagcatatgaatgcaagaatttagatatataaaaagctatatgaggatgatctctcccgagttaatttgagctccccatttcgatatgcaggccttacattcccaagcgaaccaggtgttgctgatggttagatgcatccgcaggtgcaatagactaatggtgttcattaaaaaccaaataacgggtatggagggacgccacaaatcaccaaggtggcgcgttctcagg

SEQ ID NO: 1664 - DNA, 310 bp, Zea mays
  Peptide Sequence Number=SeqID_14387
  Probeset Number=SeqID_16067
accccagcggtcgggccgatgccctcaaataaaagaggctgtattattcttgcgctggatatcatcttgctgattgctttgctgaagtttttggcttatagcgaaaaagcaaatgcagggttggcattgatggcatttgtcggtgtggtatggcttaccgaaactattcacgtcacaattaccgcactgggtattccaattcttgcggttggaatgggattgatgaataccggagacgcgctgaaatcttttgcaaacccaaatatattcttattttttggtgggtttgcactggcgacagcgcttcata

SEQ ID NO: 1665 - DNA, 556 bp, Zea mays
  Peptide Sequence Number=SeqID_14388
  Probeset Number=SeqID_16068
gacacctgtcttccactgcccgcagcacaatcgggccttgcgaaacgactgtggccgaaccatggacatctctgaatgcgcttcttgctattccaagtctgaggatagatgtgagaactaaatgcgcctattatgcctgctgcctgataaaattgggagcgatgcctcttgctgcgactataacccgagcagggaggcattgagggtattaacagatagagaccctgtttaagagggggaaaagagagagcaacttggagagggtatgcatgctgtagggtagagactaaagctgagtggacaagtccgcacttgacactatatcaatggtgacacagtgaatccatggggacagcaaaatcataaggactacgctggacactgggtccctccagggggtgcgagcactgttcagggtatgggcagactctaccattgatggatgaatctagagtaacacttcactaggacgtgatgatgaattcagggttcagggacccttcaaaaacagatgaagtgctacctacactactagaatatgcttatactctgacca

SEQ ID NO: 1666 - DNA, 358 bp, Zea mays
  Peptide Sequence Number=SeqID_14389
  Probeset Number=SeqID_16069
tgcagacgtactgctcggaagatctcggcggcttctatctcgacgtgctgaaggatcgcctgtacacgagcgcgcccgattcgcgcgcgcgccgctccgcacagaccgcgctgtaccacctgacgcacgggctgctgcgcgtgctcgcgccgttcctgtcgttcaccgcggaagaagcatggaaggtgttccagccggccagcgacaccgtgttcacggaaacctactacgcgtatccggaagtggccggctcggccgcgctgatcgacaagtgggcgctgctgcgcgaagtgcgcggcaacgtgacgaaggcgctcgaggaagcgcgcaccgcgaaccgcatcggttcgtcgctgca

SEQ ID NO: 1667 - DNA, 694 bp, Zea mays
  Peptide Sequence Number=SeqID_14390
  Probeset Number=SeqID_16070
tgtggcgcagtgccgggaaattctggccttagttgaacatacagaagccagtctggttgatttgaacaggcgcccccgtggccgtttacgcgttgatatgcccggcggtatagcgcacttcatcgtcatgccaaacctgaaagagttctacagccgttatcctgacatttacctgatgaccggcgtcagcgaccggcaggttgacctggttcaggagggtgtagactgcgtgatcagaaccggagagttacttaactccacgcttgtagctcgtccgctcggagaatttcgctggataacctgcgcctctcccgactatctcagggagtacggtattccgcagtcacctgaagatctgtctcatcatcgggctattcattatttttccggacaaagccggcgtacagacgaattgcgttttgtaaagggaacagaaacgctgtccgtatcggtcagtgggcaggcagccgtcaacgagacggggctttatataaaaatgtgccttgaagggttcggactggcgcagcttgctgaaaatgttgtagcagaacacctggagaaaggaacgttggttgaagttctggccgactggcagccgccgtctgttcctgtcacgctactttatcctcatcaacgttttctttcccctgctgtacgtgcatttgcagactggataggtgaaatattcagttga

SEQ ID NO: 1668 - DNA, 662 bp, Zea mays
  Peptide Sequence Number=SeqID_14391
  Probeset Number=SeqID_16071
tgcagggcgtgattgaactgccgcagctgaaagatggcgggcggatgatcaatgcgtttcgggccgatccggcggcggcaccgctaccgacaccgagcggcaaaatcgaaatcttttccgccaccatcgccagctttggctatgaaaattgccccggccatccggtgtggcgcgcgccgcagcagcagccggatgcggagcatccgctgtggttgatcgctaatcagccggccacgcgtctgcacagccagctggattttggtgactacagcctgagcggcaaacgcgaaggacgtgaggtgtgcagcctgcatccgcacgatgccgccgcgcgcggcattaccgacggcgacattatcgagttgtacaatcagcgcggtcacgtgctggcctgcgctcgcgttaccgaaagcattatgccgggtgtggtgcagttgccgaccggcgcctggtacgatccggtcgatcccaccgcgctgcgaccgctgtgtcgccacggcaatccgaatgtgctgacgctggatatcggtacttcatcgctggcgcagggctgtagcggacaaatcaccgtggtgcaactgcgcaaataccgcggcgaactgacgccggtgcaggcatttattccgccgcagccggtcagctacagcactgagattatctga

SEQ ID NO: 1669 - DNA, 335 bp, Zea mays
  Peptide Sequence Number=SeqID_14392
  Probeset Number=SeqID_16072
tgcaggagatcatcgccaaagctaatccggatgcagtaaagggcttccagcatgaggtgaaaaatgccggcagcgcgtcgccggaaggcgagggcaactgggccaaatcctcctttgaggatctggtgcaatacaacgacggtttcaaaaccaatctgattggcacgccgcagcaaattgctgagcgcatcatggagcagaaacgcgctggcgtggatttactgctgctggcgtttctgcatttccatgaagaggtggagttctttgggcgggaagttatcccacgcgtgcgagaactggaacggcaggaggcgcttaacgccgtcacggtctga

SEQ ID NO: 1670 - DNA, 381 bp, Zea mays
  Peptide Sequence Number=SeqID_14393
  Probeset Number=SeqID_16073
tggatcttcggctggacccagacccgcctgatgctgccagcctggcttggctgggaaacggcattgaacaatgccctggcccgtggccagggtgaactgctggcgcagatgcgcgagcaatggccgttcttccgcacccgcattgacatgctcgagatggtgctggccaaggccgatgcacagatcgccgaggcctacgacgaacgtctagtgcaaccgcacctgctgccattgggtgcgcacctgcgcgacctattgtcgcagtcgtgcaaggtggtacttggccttaccgggcagccggtgctactggcgcacagccccgagacgctggaattcatcagcctgcgcaacacctacctggacccgttgcaccgcctgcag

SEQ ID NO: 1671 - DNA, 203 bp, Zea mays
  Peptide Sequence Number=SeqID_14394
  Probeset Number=SeqID_16074
ggagaacgtggtgttcatgttgtggagcggaacctcgtcaaggcagcagcgggccgtggagaggcatccaagactcggcgccggcaacggtacagaccgcgcccgccacaacggctgtgtgcatgggacggcatccatgcgaggatggggtggatcgtgcccagccacgaggcgaggttccgtcaggtcaagatcggaccaag

SEQ ID NO: 1672 - DNA, 310 bp, Zea mays
  Probeset Number=SeqID_16075
tgcgccgcataacctgattgacgtgcaggcgctgggctgtgatttcctggtgtgctccgcctacaagttctttggcccgcacgtcggcatggcctatatcgcgccgcagtggctgcaacgcctgcggccgtacaaagtcgagccggccaccgatgtcggccccggccgtttcgagaccggcacgcaaagcttcgaggcgctggccggcgtcgcggcggcgatcgactatctggcacagtgggggacgccgggcgcgccgttaaggcagcgtttgcaggagagtttcgccgcctaccaccggcatgaagag

SEQ ID NO: 1673 - DNA, 459 bp, Zea mays
  Peptide Sequence Number=SeqID_14395
  Probeset Number=SeqID_16076
cgacctatgggatcctccgcccaattttccgggaatcgcgccggggccatcacaatccgttcgccgcgtccccaacaatctcgagcaccgggccttccaaagaacaccaacaaggaccgtgtggctgctgctcctcaaggcgcgcaccgcactgtcgggtgcctcgcctcgctagcctccgtcgccatcacactggccggtgccgccaggcactgggtgggtgtggggaggaccggcgtggtggtcgccgccggcaagagccccgtggtgcgctccaggttctacacatctttcatcaatgccttcctcatcatctccttgctcctctgggccatcgaggttgccatgtacttcaatggctgggacctcgctgcttccacgctcgccctccccgccctttgcattgagtcattgtacgtctcttggttgcgcttccatgccagatttcggaccacttga

SEQ ID NO: 1674 - DNA, 656 bp, Zea mays
  Peptide Sequence Number=SeqID_14396
  Probeset Number=SeqID_16077
atgagcaaaaatctcaccatcaaggatattgccgtactcgccggtgtgtcgatcactaccgtctcgcgcgtgcttaacaagcatgcgtgggtgtcggaaaaaacccgcacgcgggtggagcaggtgatcgccgagcatcagttcagccccaacctgatggcgcgcggcatgatatcgcgccagagctatacgctcgcggtgatcgtctctgacatcactaacccttacttcgtcacgctggtggcgcagattcagcaggcctgtctggccatcggttacaaaatcaccctgtacgatacccagtcggccaaccgtagccctcagcacgacgatgacgaaagcgcaatttttcagtcgattatcgatagccagatcgatggggtgatcgtgctcggcggccacagcgactatgcgccgattccggccggctacctgacgctgctggaatcgctgatggacaaaatggcggtggtggtggtggggcagccgcatcctgctggccgctggccgtgcgtgatgcgcgaccagcagcactgcgtcgggctggcggtgaatcatttgctggcgcgcggcctgcgtgatatcgcgtttattggcggttcgcgcaaagtgtgggtgacgcgcgagcgcgtcagtcatttccacgccacgctgca

SEQ ID NO: 1675 - DNA, 571 bp, Zea mays
  Peptide Sequence Number=SeqID_14397
  Probeset Number=SeqID_16078
tccggtcaatctgcactaccgtttcccgtcggaaagctggatcgatgaaaacaattcgttcctcaacgtcacgctgaacggtacttttctgcgcaacctgacggtgaacaaagtcgggctgctggagagcgcctggcaccggctgggcggggatgcacgccaggagcagtacacgctgaagctggagccatacctgatttacggcgacaaccagctggcgctctacttcaacatcaagccaaaggcggatgcgccgtgcggcgtgctgctcaacaacaacatcaagagccgtatcgaagaggattcgtggatcgatctgagccacacgcgccacttcaccatgctgccgaacctgtcgtacttcgtcggtgcttcgttcccgttctcgcggctggcggatttttcgcagaccacgctgctgctgccggaggcgccgggtgatgccgagatcgccacgttattggacatggccgcgcgcgccggtaacgctaccggcgtgccgctggtgcagaaccaggtgttgtttggtctgccgaacggtggcaccaataagacgcgcctgcaggcacgc

SEQ ID NO: 1676 - DNA, 607 bp, Zea mays
  Peptide Sequence Number=SeqID_14398
  Probeset Number=SeqID_16079
ggtacccctgagacagcgaacagtgtacgagacagcaatgtacctttagtttctaatgctgcgaatgaggaactagttgtacaagcaccaaaaatcaagtatgaagatgaaattgacaaactgttggatgaacttggcccaagatacactgactggcctggatctgacccgttaccagtagatgcagatttacttcctgcaaacatgccaggttacaagccccctttcagagttctgccatatggtgttcggccatctcttagccgaagggacactaccaatttacgccgtcttgctcggggactgcctcctcactttgctctcggacgaagcagacaactccaaggcttagctaatgctatggtaaagttgtgggagaaaagttctattgctaaaattgctttgaagagaggagtacagcttaccaccagtgagagaatggctgaagatattaaagtaagtacagaaagtgtctcttgttagatttgtacaatttggatagcatatgtaaatatttacatcctagttagaaatattatttgatcattagcaacagcacattacagattcgatcattcgaagtcctaggtttttttttgccaaggga

SEQ ID NO: 1677 - DNA, 453 bp, Zea mays
  Peptide Sequence Number=SeqID_14399
  Probeset Number=SeqID_16080
ctgcaggcattttgagtggtgatgagctggtggtcaccggcatgggcgctgactgtgatattatcgcctgctaccacacaggtggccttttggacagactggatctagtcattgctccccaatgggtggctaccatgcggggcaggatatggtgctcatctggtatgtcgcccgtttcaaatatcctccgcatagggttccattgcaacttctttaggaagccatgaatacgactgatggcttaactggacttctgaaagggttaatgcttatatcaagaaaggttgcaaccccttcattgttgcacacagtgagtggcagagatgaaaactggaaaaacatgtcgagcttttgtgttgaagatttaccaagtcttctgaaggtgtcgttccagtgttgcaagagccggcgaatttcagatggagggctatagaggaagcgttacgcattcaa

SEQ ID NO: 1678 - DNA, 590 bp, Zea mays
  Peptide Sequence Number=SeqID_14400
  Probeset Number=SeqID_16081
gaggagctgaacagtccgctggaggatctgctgttcgtctccgacgataacgagcgcaaaaactacctgcgccgcttcgagcattaccttaaaaaccagcaggcgtttctctattttcgtcgtaacgatgaagcgcgtaaaagcggacgctggaaagtgatcggagaaacccgggtgtacgcgatgctcgatccccgctcggcggaagcgcaaaacctgctcaacagccgcggtttcaagctggtgctgatgcgtcagaccgaagaggatgagtactggcagctgttcgatccgcaggcgcatccctgtttcccgctgtcgcgcaagatccagtttttagtggtgctcagcacgccgcagcagaaaatgcccagcgcggtgatgccgggtaccgaagtggggcggcgcgtcaaggcgaaagtgttccagcgcgccagccaggcggagttcagcgcggcggtgaaagcgcgctatggtgcctgcattattaccggcacgcgcttaaccgagcgccacagctggccgtgggtggaagcctgccatatcgacacccaggagaatgaagagggctttctggcggatggcagcgt

SEQ ID NO: 1679 - DNA, 858 bp, Zea mays
  Probeset Number=SeqID_16082
tcacaacagggtcttcggccttaaaaatctcgcgtccaaaactctcgtctgcttggtcgaaacctcgaagtgtctgcagccctcgcgggacagcgcattcatggccccttcacagctgacgagggaggcgagggacatgaaaccctccataatggtcgggagcaccagcagctcctcctgcaaccattcgaggaagtgaaggcctgcttctcggtcgggtatttcgaagtcagaagtccgcgcacccagctcgcagtacgcgtccacgaactgtgcgtgcgtccgctcaacttctgagcgcgtcgaggcctcgactttgtccacacggctgtgcaaggcgttgaaccttgcctccagctcctcggcgcgttgactggcgagactgctctccgcccgtgccactttggcctccgctcgcgcagtctgcgcttcagcgatggcctgattcgcctccctcctctcctccgccagctggcgccggaggtccatcttctcggcctccatggcggcaactttctccgccagcctgcggtttttactttccgcagccaacttctcccggacaacatccgcatgctgcgcccgaagcctctcgacttcggcatccacgtccacagtcaggacacccgacgccacgcggtcggtgaagtcggccgcacccttcgccccttccgccgtcgtcggcgaaggggccgccaccggagccgggacaagagacagttgccccacatcagacctgatgtctgtgtcgaagtcggccacatgcgccccctcctcgccagcacgcaccggaaaaggaacatttcgctccttggcgggctcgcccgagggcggcttgcccgcaccagatgcaggtcg

SEQ ID NO: 1680 - DNA, 223 bp, Zea mays
  Peptide Sequence Number=SeqID_14401
  Probeset Number=SeqID_16083
aagatctgtctgaaggagaaaacagagaagatgctggtgatccatctgtcgcatacggggactgcaccttttttagctcactctgagcgagtgcaattgacacgctatggatcttatcgagcacgatccatggtctggtccgcggcgagaatatagcgcttgcgcactatacgagacaggtggccaggacgaatacgtgacagctcaaataagacttgatcaa

SEQ ID NO: 1681 - DNA, 475 bp, Zea mays
  Peptide Sequence Number=SeqID_14402
  Probeset Number=SeqID_16084
agccgagcccccatcaccaaggctggttcggagcgtttgcgcatccaactggagcgtctgaagtcggtcgagcggccgcgcatcatcgccgcagtggccgaggcgcgggcgcacggcgatctgaaggacaacagccgaataccacgctgcgcgcgagcagcacgggttcaacgaaggtcgcatcgcggagctggaggcgggtttgtccaccgccgaagtgatcgacgtgacccgtctcaatgccggcaccaaggtggtattcggtgccaccgtggaccttgaggacgaggacacggacgctgcggtgacctatcagatcgtaggtgacctggaggcctacatcaagcagcgcctcatcgaggtgtcgacgccgatcgtccgtgcgctgatcggcaagagcgagggcgacagcttcaaattcaccgcgcccaacggggtgaagcactacgagatcaccggcgtgcgttacgagtga

SEQ ID NO: 1682 - DNA, 319 bp, Zea mays
  Peptide Sequence Number=SeqID_14403
  Probeset Number=SeqID_16085
tcgttgtgttgtgacggcccgtgccgtgcctgcctcgctgccgtgcagtcatcaccggtgcgaagagtatacggtggtcgggctacatggcgtgctcttcaaccgtcttctgcggttgtttctgaatcaccagtctgctggtttccgccgcctcggttgtgtggtctcctccctgcttttcgttggtcatgggccgcgggcgctcatcttccggttggccgtgtttttccaaagcaagtgcagccgtgtctgctcgctcgcgcgtgatgcgctcctcctgccgaaactgacaatgccttgtctcctctggtcgctgttt

SEQ ID NO: 1683 - DNA, 657 bp, Zea mays
  Probeset Number=SeqID_16086
tttattttcaagacagcaattctcctgtaatagaacatttaaattttttacatgatcatacaataataatcttatgtataattacattagtagtttcaatctcactatataatgcattaacaaactcacactttaatcgattttttttcagaaaatcaagaaattgaatatttctgaacatctctaccattactaattttaatatttttagcactaccatctataaaaattttatatatgacagaagaatatacaaatccttccctcacagtaaaaacaataggacatcaatgatactgatcttatgagtattcagactttactaattatgaattcgattctttcttatcagagagaaatttaattcgattattagatacatctaatcatttagtattaccaatcaaaatagctattcgattactagtatcatcagaagatgttattcattcttgaactatcccatcattaggagtaaaagttgatgcaattcctggacgaatcaatcaaattataataaatattaatcgaactggtattatagtaggacaatgtagtgaaatttgcggagcaaaccacagctttataccaattacaatctcagcaattacagcaaataattttattaataatatataaaaaaaaaaaaaaaaaaaa

SEQ ID NO: 1684 - DNA, 204 bp, Zea mays
  Peptide Sequence Number=SeqID_8127
  Probeset Number=SeqID_16087
cgagaggcccgagaccgggcggaacggccgtcctaggcctctcaaacaggcgcaagtggcccgccgccagcacagcgacggtccacaataccaaacggagcgcgggacacccgaacggtccagcaacaaaaccatgggaacagcacgccggtggacgccaaaccgccgaagcacggagcgcccagcgagctacaatcccacaac

SEQ ID NO: 1685 - DNA, 386 bp, Zea mays
  Probeset Number=SeqID_16088
gcggcggcacaggctcgtcgtgactcgtgcgcagcgtgcaagtgccagccggactgcatatatttgcgccttatttcccgcccgataaaccagacaagttcgcacacgcgcacgcgcaccgcgtcttcggcaccagcaacgtgatcaagattctcaacgacctccagccctactaccagcgcgaggacgccgtcaattcgctcatttacgaggcggacatgcgtgtccgcaatcccgtctacggctgcatcggcgtcgtctctattcttcagcactgcctcctacgggactctctccagcaacgtgcgctatatgctcctctactctatatttagcgcacggcatactattttaggtggagaaaaaattaatatacatcgtatttt

SEQ ID NO: 1686 - DNA, 353 bp, Zea mays
  Peptide Sequence Number=SeqID_8128
  Probeset Number=SeqID_16089
atgattaccctgtctcgcctgtatattcacccggttaaatcgatgcgtggtttgcagctgtcacacgcacaggtgctggaaagcggtctggccttcgatcgcatctttatggtgaccgaagcggacgggacctttattaccgcccgccagtttccggagatggtgcgtttcacgcccgccctgcgcccgacgggctattcatcaccgcacgacggcagccaggcgctgatccgcttcagcgatttcagcgccagccggcgccacggaagtgtggggcaaccagttcactgccgcatggcctacccatcaaccagggctgagcggcttttcccgcgcccggtgcagtgcgctgg

SEQ ID NO: 1687 - DNA, 320 bp, Zea mays
  Peptide Sequence Number=SeqID_8129
  Probeset Number=SeqID_16090
tgcactttgatcaccagggtccagttgtggatacatttcatgctgacatccccaatgcagatctgggtttcagagtctagtggtatgagtgatcgcactttcaggtgcaccacgagctcatgtgccatttttctagcaatccttgggttggtggagcttcctgttattgctgttgttggaccattcatcaacattatgtttgaggacaagtttgtgcatttttcattcctcagcaccagcagtggtcaagcattggcaactcctcatggtctaacgaagactgctggtagtaaacaccatctaaggctgcgaggtggcga

SEQ ID NO: 1688 - DNA, 311 bp, Zea mays
  Peptide Sequence Number=SeqID_8130
  Probeset Number=SeqID_16091
ccgttacggcatcacggccgccagccacgtgctgaccgcacgcttattatatatttgttaatccgtttgataaagccgggattccgctgctggacgttaccgcagccaactgggcgctgggcaataaagccggtgagcagcagcgtgcacgttcaccgcattttccggagggtacggtgcgccaccagaccgggcgcgataatctgacttacatcgaccactggctgccggggcgcatccatcagcgcacgcgcgacagcgtacgcattttgcagccgctactgacggagctggctaatccgacgttgtaa

SEQ ID NO: 1689 - DNA, 759 bp, Zea mays
  Peptide Sequence Number=SeqID_8131
  Probeset Number=SeqID_16092
gcagagatcgggacatccgccacagtgccaaggccgaccgccgcagcgctggcgagcaactgagctcgaccctggcggacttggccgatgaagacttgctacccgtggccagggccttcaaccagttcctcaacctggccaacatggccgagcagtatcagctgatccgccgccgagacgccgaccagcccgagccgttcgaggcccgtgtgctgcccgagctgctggcgcgcctgaagcaggccgggcacagcaatgatgccctggcacggcaattggccaagctcgacatccagctggtgctcaccgctcaccccaccgaggtggcccgccgcaccctgatccagaagtacgacgccatcgccggccaactggctacccaggaccaccgcgatctgaccccggccgaacgcgagcaggtgcgcgagcgcctgcgccggttgatcgccgaggcctggcacaccgaagaaatccgccgcacccgaccgacgccggtggacgaagccaagtggggctttgcggtgatcgagcattcgctgtggcacgccatccccagccacttgcgcaaggtcgacaaggccttgctggaggctaccggtctgcgcctgccgctggaggcggcgccgatccgcttcgcctcgtggatgggtggtgaccgtgatggcaaccccaacgtgaccgcagctgtcacccgcgaagttctgctgctggcgcgctggatggctgccgacctgttcctgcgcgacatcgatgcgctgg

SEQ ID NO: 1690 - DNA, 308 bp, Zea mays
  Peptide Sequence Number=SeqID_8132
  Probeset Number=SeqID_16093
atgcccttggcgacgccgacattccaatgcagcgactactgcacggagctgctcgtcgtctatagcgcgacagaaggatatgtgatgcgatgtggtggtgctggaacagaggcacgaccggcaggagcaagtgccacgccgacgtttggacggagcgagcaagcgtggcccggcgacctgctgatggcggcaaaggagatggcggcaggagcaagtgtgggaacgaaggcagggacaacaggagcaaatggcacgcctacatccaaacggagcgtgagagcacagcccgacaacctgctaagaaaatt

SEQ ID NO: 1691 - DNA, 281 bp, Zea mays
  Probeset Number=SeqID_16094
ctgcgcttcgcagagcgccagggatggcatgtagagatgatgtcggaaagaccgccggatctcggcggctacaaagaagtgatcgtacggatcgtgggccaaggcgcgtatccccgcctgaaggtccaataaggcggacctcacgggcaacgcgtgccggccaccgagacgacaggggcgcattctcacattcgcgtgcacagacccggtgatgccggaagccaacgatatcggcgagggcgagatcaacccggtcgacctgcggatcgacaccttccgag

SEQ ID NO: 1692 - DNA, 381 bp, Zea mays
  Peptide Sequence Number=SeqID_8133
  Probeset Number=SeqID_16095
atgtcacctcccgccgggccccgcttcgtgggcccagggcgaaccctacggcgcacgataaaaggagacgttggagaggctttcctcccagtcgtgtcgtccccccggccccgaccccctccgttggcgaacgactccgggctccactgtcgctctcgctcccttccctcccacgcaatggtggccgatcgcctccgcctcgcgctgctgctctccgcgtgcctctgctccgcgtgggcgcgcccacgcctcgagccgaccatccgcctgccgtccgagcgcgcggcggccgacgaaacggatgacgacgccctcgggacccggaggcccgagaccatcagagaagaaaacgaatactacaacaaacgcaacactcctcca

SEQ ID NO: 1693 - DNA, 253 bp, Zea mays
  Probeset Number=SeqID_16096
cgacctgcaggggcgtgagatctgatttgatggaggcgctcgttccacgcctcgctctacttaaggagcagctctaaatcggaaggatgatatcttgcatttccgagacatttgctagaattttgttcctaagcaatccgctagcgtttatgatgctttacgtttggaacaagcatagccctttcatccatatgactatatgagctttctaggtctgttcacctttacgactgcatacttaccatgggtagat

SEQ ID NO: 1694 - DNA, 439 bp, Zea mays
  misc_feature (9)..(9): n is a, c, g, or t
  misc_feature (23)..(23): n is a, c, g, or t
  misc_feature (51)..(51): n is a, c, g, or t
  Peptide Sequence Number=SeqID_8134
  Probeset Number=SeqID_16097
gtctagcanaatgttagtacatntgttgctttatcaggtttccacactatntgacgaggaagtgcacttttttcagtgttagattgttcaacttctcagggacacaagcaccagacagtacaatagaaaccactatgctgagtgagttgcaaaatttgtgcttacaaaacggtgatgggaacacaaccagtgtgctagaccaagggtcagtggatctataagttaaccactacttcaagaacttgctcgatgggaagggtcttcttagctctgaccagattctcttttccagtgaaaatgccacggcaactactaagcctttggtccaattttatagtgttaatgagagagttttctttgtagaatttgcctatgccatgatcaagatggggaatataaatcctctaactggttgtgaggccagtaaaaggaggaactg

SEQ ID NO: 1695 - DNA, 391 bp, Zea mays
  Peptide Sequence Number=SeqID_8135
  Probeset Number=SeqID_16098
tgcagtacccacagatgcatgaagatattgttgaaattgaacagtcagatgcagatggaggagcagcagcagcgttccacggccagaagacagacgccgcgagcctagtcgggagagccctgtcttgcttcaacgatcgctacatctacagcgggtgccagggcgcgctccggctgggccccgagggcgcgctggacgtgccgccggggtcggtggacgccttctgcggcgggccgtgcctggcggagacgcacctcgtgctgcgctgcgtcgacggcatcgtggccagcttccgcttctacaacggcgcctccgccgccgacgtccgcctcgcgctcgcccgcgggtgcggccgctccggcctccggggcgactttgacgacgtgctgca

SEQ ID NO: 1696 - DNA, 597 bp, Zea mays
  Peptide Sequence Number=SeqID_8136
  Probeset Number=SeqID_16099
tgcatgcctgcagctgtgacaagtacggggtgccgcacacctcaccctctcgggaccctatgtggtggtggtggacgtcagcctggagggcaacctgactctgagcggccggcagatgtacggtggatatggaccagcccaggatgatcggcaaaggtcgctagcatgctcggttagagtgtgtagcttcatgagcgtgggctggacgttccgtggcaagcaggcgatagatcatggccatcggcgaccgccgctgacgtagagcccgacaaggagacgctggagaagattggggccattccggctatcaaggagttggttttcctcaagctctgccaaacgccaagtaacacggctgcgccactaccactagcacggcgtcgcgtctccctcgcgcagcatggtccagtgcagccgtaccgggctgggtgctggcgtgctgccacctttcctctttatccgcaggccacacgcccgcacacgtcgcccgctgcccacgcacgcgcgcaatcctccaccgcaccgccgccagccaccgcgctcgccacgcctccaccaccgctcctccacctcgcgcgccgccaccaccgcgcccaa

SEQ ID NO: 1697 - DNA, 239 bp, Zea mays
  Probeset Number=SeqID_16100
aaaaatcgcaggtttcaggaaagaactgcatgacgctataagtgaagctaagcaaaaaaggggctggtgattttatatcaactcgtgctttgttcattgtcagtcgctgaactcgttgactaggcactctgcaacttacgcctgagtcaacaataaaagcatagcctcaccagcatgagactggttctttgacagaggagaggtgtaggatatagattgcgaatacccctgcaacccga

SEQ ID NO: 1698 - DNA, 297 bp, Zea mays
  Peptide Sequence Number=SeqID_8137
  Probeset Number=SeqID_16101
cggcggcgactcccgccgtggagatccgccacctccccgcggaccgccccctctcagccccctctagccaaattgagcccgcccctaggttcgccagctcctccctgtggtaagacacctacccgctgcccgagaaccgggccaccggcggccaggtccttccccgcggacgaccggttcatcccgccgtcaaccgtagcgcctttccccccccccttccactctcgctggcgtgtgggccccacggtgatggcatcatccccgcacgcccgcgccgtctcccactttgggccgcag

SEQ ID NO: 1699 - DNA, 311 bp, Zea mays
  Probeset Number=SeqID_16102
gcgcgctgcaaacgctgggtgcgcagacctggtttgccggcctgcgccgcgatcagtccggcagccgtgccagcctgccggtactggccgtgcagcgtggcgtgttcaaaatcctgccgatcatcgactgggacaaccgtcaggtgcaccagtatctgaagcagcatgggctgaagtaccatccgctgtgggacgaaggttacctctccgtgggcgacacgcacaccacgcgcaagtgggagccggggatggctgaggaagagacgcgctttttcggcctcaaacgcgaatgcgggttacacgaaggctga

SEQ ID NO: 1700 - DNA, 257 bp, Zea mays
  misc_feature (182)..(182): n is a, c, g, or t
  Peptide Sequence Number=SeqID_8138
  Probeset Number=SeqID_16103
taacaacaaaagtgacgatgtatataggttctctaatgcatatttctggcttgtgaatttcttcattttggcttgtgaattgaccccagatttttataagactacatgcccagatctttatagaatagttagaagcgagggtcaaaaagctctaaaatatgagatgcgaatgggtgcttctntgcttcggcttcacttccatgatttctttgtaaatggaatacacccttttgatttattaaacgaaaatgattaga

SEQ ID NO: 1701 - DNA, 231 bp, Zea mays
  Peptide Sequence Number=SeqID_8139
  Probeset Number=SeqID_16104
tgatggcgctggaactgacggtggtgcgtgtggataccagaatgctgtggaccagccacctttttcatccatgaatgccgctggctggttttccatttacgaatttggcaaaggctgtggcttttgctatcaggtgggtaaacttcaaagaatcggacctcccttcaatcaaggaagcctgccttttgacatttgtaaggttgattatttatcaggctgtgtgcacaggca

SEQ ID NO: 1702 - DNA, 957 bp, Zea mays
  Peptide Sequence Number=SeqID_8140
  Probeset Number=SeqID_16105
atgcaacgtgtcgtttccttcggccccatttccagcgccgaggtgctggccgacctgggccggcggtaccactttcagcgtttcgaccagccgctggccgaccgcgaacgctttcttgcggcgctggccactgccgacgggctgatcggcagtaccttgccgctgggtgcggagctgcttgaccgggccccggcattaaaggccattgccagcgtctctgcgggttttgacaactatgacctggcgtacttgcgcaagcgcggtatccgcttgaccaacaccccggatgcggtgaccgaagccaccgccgataccgggttcatgttgctgatgatggctgcccgacgcgctggcgagctggcgcagatggtgcgtgatggcgagtggacgcacgctatcgacgccacgcgcttcggccgcgatgtgcacggcaagaccttgggtatcgtcgggcttggccgcatcggtgcggcggtggccaggcgcgggcatttcggttttggcatgcaggtgctgtacagcggcaatagtgacaagcccgagtatgaagcgcagttcgccgcaaggcgggtgccgctgcaacaattgttgggcgaggcgcacttcgtctgcgtctgcgtgccgctgagtccggccacgcatcacttgttcggccgcgagcagttcgcagccatgcgggccgatgcagtgttcgtcaacatcgcccgtggtgctgtggtcgatgaggccgcgctggtgcaggcgctggtcgaggggcagctcggcgcggccgggttggacgtgttcgagcaagagccgctgccggccgcctcgccgttgctggcgttgccccaggtggtggcgctgccgcacatcggctcggccaccgtcgaggcgcgtgcattgatggcgcgtactgcggcggccgagctggcagcggtactcgagggcagggcaccgaaccatcctgttctgtag

SEQ ID NO: 1703 - DNA, 265 bp, Zea mays
  Peptide Sequence Number=SeqID_8141
  Probeset Number=SeqID_16106
agaatacccctccaggacgaccgatggttaacggaggccctgggcagaggtttttctagatttttcaataccgagaccagccctagacgaagggatgcagaactggctaccgacatagacccaaaagaagctcaacgagcacttgtaagagaccgagctaactcgagcaaagctgtcggtaccaaagaattgggggaaagccaatctagctctcacacgacctaggaaaccgaccgaggctgtcaatcgtatccccccatccaag

SEQ ID NO: 1704 - DNA, 356 bp, Zea mays
  Peptide Sequence Number=SeqID_8142
  Probeset Number=SeqID_16107
aaacaagccctcgcatcaactaacaactaaagaataaagggcaaaacacttggtgcaatatttaaaccacgaacaaacccagggaatttctgatccataacaaactggcttagtaaaaaaaactaaaattactcagtaaacaacaaccgaacgcaaagagactccaggcggggacactacatgaatctgcctacttggacctctgcctcatttttcggggcttccttttaagccgcctcatccgcttttttttccacttggccctcatcggggggggatgactgcctctcggacgggtttgggggaaaaccggaaaacgggaaaagaggcttgggatgcgacaggggcccccgcgt

SEQ ID NO: 1705 - DNA, 367 bp, Zea mays
  Probeset Number=SeqID_16108
tccgagctgggtgatgctttgcccaaccgcggcggcgcccaggttgatggcggctctgccaccggcaacgacgagccatcaccggttttgcgtaccagagcggcccatcgcgaagcagagacaatatcctcgctggagaaggcactcacctcccgagaagacatcgcagggtgtgcaggcggattgatgcggccagggcagacgtctgccattggtgagccctcgcttgacccctcccacaatcgcactgaggcaccacaagaccccatatatggcgcagggatgaagaagaagatatgcccagcaaggcagaccccaccagtcggggatgaacttgagtccaagcacgcacggagccaagtccacg

SEQ ID NO: 1706 - DNA, 419 bp, Zea mays
  Peptide Sequence Number=SeqID_8143
  Probeset Number=SeqID_16109
atgagcgaagaaaaccaggtcgaaggcgaagagctgccgcacctgctgctggtggatgacgatgccacctttacccgggtcatggcccgtgccatgagccgccgcggtttccgcgtgagcaccgccagctctgccgaggaagggttgatcctggcccagcaggacctgccggactacgccacgctggacctgaagatggacggcgactccgggctggtgctgctgccaaagctgctggagctggacccggagatgcgcgtggtgatcctgaccggttactcgagcattgccaccgcggtggaagcggtcaagcgtggtgcctgcaactacctgtgcaagccggcggataccgatgatgtgctggcggcgctgctgtcggagcacaccgacctggacaccctggtgccggaaaacccgat

SEQ ID NO: 1707 - DNA, 618 bp, Zea mays
  Peptide Sequence Number=SeqID_8144
  Probeset Number=SeqID_16110
cgtttcggtgctggcggtgggtgcctttgtcgcatcctgctccggcttccggtcggtgcttgtctgttgatgggtccggggggcagtccagcctgtctgggggtgtcggcgggtgttgtcgggtgttggggttggcttacctttcgggcttcctcgtggcttgttctggtggtgccccctctgcggtgtgggtttctgtgctgttgcgtttggagtgtttctggcgtcgggcgcctttcgcctttcaggctgcgcttctgttggtccgggcgttcggttcgggccttttcgctttttcgcctgctggggttggggggctgtgttgcctggcggtggcgttgggttgcctctgggttttccccgtctcgtggttgtccttcttcggtccgtggccagcttgcttgcctgctgtcttgtgggctccttggggtgtcgcggttctgccgggcgtctggcttgggtgttctcccggctgcgtttgtggcctttttgtgggcttgcctccggcttttgttggttccggcccctgtgggtctgctgtggccggtggttgtaatataaccccctccgttgcctgtgggtcccggcgttccccgttcgcgtgcttggcttgggttg

SEQ ID NO: 1708 - DNA, 383 bp, Zea mays
  Peptide Sequence Number=SeqID_8145
  Probeset Number=SeqID_16111
gacctgcaccagccaagtggcactagtatcccttaatgtggagctcagtctaattaacaaggatgaaatagccaaatgggttttgtcttttcaagttcaccctgcggcgaatgatgatataggttctgggttgttctatggattctgtggttctagatcaactcaatttcccttgcctaatgtgaaggatccttgccacaatgttagtcatcttgcaagcacttattctgcccttgctatcctcaagattattggctatgatctagcaaatattgactgcaaggcacttctattatctttgaaaatgctccaacaaccagatggaagcttcatgcctactcatattggtgcagaaacagaccttcgctttgtatactgtgcag

SEQ ID NO: 1709 - DNA, 534 bp, Zea mays
  Peptide Sequence Number=SeqID_8146
  Probeset Number=SeqID_16112
ctgcagatccttcaggaccaggtgaagctgtgcaaggaaaccctgcaacagctggtgcgcgccgccgaagccaaccgtcgcctggccgtggtggagcaggacgtcacggcctggctggacgaggcgctcaaccgttggcacctgatgcgcccggaagccagctaccgcttgcagcgcctgcgcgacggccaggtgccacgcctgaccccggcgccggacctgacccaggccctgttgaacctgttgaacaatgccgccgacgcctgccccgatgaccttgaagtgcgcctggactgggacgcccatgacatcgtcatcagcatccgcgaccatggccccggcgtgccgccggccatcgccgaagccatcggcaaacccttcattaccaccaaaggcaaaggcttcggcctgggccttttcttgagcaaggccagcgtgacccgtgcgggcggttcggtgaaactctatagtcatgaacagggtggcaccctgaccgaactgcgcctgccttatggcaagcgaggagatgaatga

SEQ ID NO: 1710 - DNA, 251 bp, Zea mays
  Peptide Sequence Number=SeqID_8147
  Probeset Number=SeqID_16113
gtagaggtgacggtgctatccccggaagagattttgttcatgttcttgacaagttcaaaccgtctttgcagtgggatggataaagtttggagcacttctttatctattcagatgaaggcgtgaagcatgttgtattttatccaacactgatgtcactctgtgtacgtctgtatctagccctaaacttgtgagaacaggacccttcattttgggcgatcgtacaaggattagactacttcgttgagatttta

SEQ ID NO: 1711 - DNA, 413 bp, Zea mays
  Peptide Sequence Number=SeqID_8148
  Probeset Number=SeqID_16114
taccctgacggaagggatagaaggccggggcaattttctagtaccagctctgaaaggttaacgagaccatgtagtgacttaataagaaaatgcactagatcaccacactgcttgcaggtccggtgcagggacagcgagctgtgcatgtgacggaccaggcgcggacgtcgaaccgcacggcgctggtgctgagcgcctcggcgtacgcggccatggccagcgccggcaaggccgcgcgcctcagggaccggcgcgttgtcgatgtccagtacaagagggtaccttgcgggtacatgaaggaccgcaacctatcgatacgcgtggaggagaagagccggccgccaagcaacctatccatcaggttcctgtaccagggcggccagaccgacaccgtcgccgtcgacatcgccact

SEQ ID NO: 1712 - DNA, 362 bp, Zea mays
  Peptide Sequence Number=SeqID_8149
  Probeset Number=SeqID_16115
atggcgcgcagggacgagctcagtgagctgcgcgtcggggagttggacgccgaactcatgcacgacacaaggaggaatccgtgccctggagctcggcaacttcatgggagcgtgagttccgtgctagaccaagcagatggggaggtgaccagcgcgacggccacaagcaaggctcgcgcgcgcgcggttggaaggcgccgagggagcttgggcgcaggccaagcgccgaccagcagaacgccgcgaggaagcagggagaccgcggagctcgcgcgtaggggcgagcgccatggcgaccaaggagcacggcgcgcggcatgggaacttgagaggagggagctgggcgtagcgctgggctgcag

SEQ ID NO: 1713 - DNA, 370 bp, Zea mays
  Probeset Number=SeqID_16116
tcatgtgttcccgctggtcggcttgatctttcttgtgtttaggtcacctgtgcggctcagatggtttgtctcctgccctttcatgcttgcattgttcgcttggccaccttgttctctgtctattcctccgctccactgttccttctcgtgcggtgtcttttggtcgctcgttccattttcttctcggttgatatttgggtttctcttttttttcacttccgttccctgtatgcctcttctccggccgcgtgtctcttccggcggcggtctctgcggtggtcctggctgttgctgttgccgtggttctccttggcggttcgtctggctttgtgctcggccccgccgtctcggtcctcctctggggtcctct

SEQ ID NO: 1714 - DNA, 238 bp, Zea mays
  Peptide Sequence Number=SeqID_8150
  Probeset Number=SeqID_16117
gtggaggaaggagagcaaccagaactgccgaaccattggaggacgctggcgggcaacagtgacgtcgcaaaaaaggcgacgatgcgtcggcacgccggtgacgcacgcgctcggcatctctcgggaccgccggcggctcggagtcttcctttcggccgcgcctccctccgaccagataggactttggacgcttgggaccttgcctagtggctgctctgggtgggttactagtgctgat

SEQ ID NO: 1715 - DNA, 621 bp, Zea mays
  misc_feature (1)..(96): n is a, c, g, or t
  Probeset Number=SeqID_16118
nnnnnnnnnnnnnnnnnnnnnnnnnnnnnnnnnnnnnnnnnnnnnnnnnnnnnnnnnnnnnnnnnnnnnnnnnnnnnnnnnnnnnnnnnnnnnnnntggggcaagtgggtgtcggagatccgggagccccgcaagaagtcgcgcatctggctgggcaccttccccacggccgagatggcggcgcgcgcgcacgacgtggcggcgctggccatcaagggccgcggcgcgcacctcaacttcccggagcgcgcgcacgagctgccgcggccggcgtccacctcccccgcggacgtccaggccgcggcggcccaggcggccgcggccgcggacgtgcagtgcgacgcgccgccgtcgccgtcgccgtcccccgaaacggccgccgcgtcgccggacgacgctgcctgctgcctcgaggcggcgacgacgacgacggtgcacagcggcggcgacggtgggcagggccaggagaacgcgctgttcgacctgccggacctcctcctcaacttgagggacgggctgtggtggccgccggtgtggccctcgtcggcaataatggccatcgaggagtacgacgggtgcgacgtcgtcgggatgcacgagccgctcttgtgggccgagtag

SEQ ID NO: 1716 - DNA, 491 bp, Zea mays
  Peptide Sequence Number=SeqID_8151
  Probeset Number=SeqID_16119
atgtattactggcctcaggcatcgctggcctacatgcccgcgctcgctgccgtctgcgcattgttctggctttgcctggcaaccggcctcgaatcccggcgggcgaaatggacggccgccgcactgctcgtcgccgctgcgtgctcaatcgaagtcggtgcaatgctcgttttcgccgttgcaggactgaccgtcgctgcacacgttatcgtgccgaagctgcgcaacggctggcgcacgtcggcctggctcattcttccacttctcgcgtccgccggggtactggcgctggtcgctcatggccgtgtgtcgaacggcaacgaagtgatgggcgatccggcgatcgcccatcacgttcgccccgcgcttcatgccgctctcgtcgatttcgcaaaggccatcgccgcatccggctggagtggccggagtcggctcgagatcgcgatggccatgatcagcaaggtgtgcgcgttcggagcgttcttcggcct

SEQ ID NO: 1717 - DNA, 666 bp, Zea mays
  Probeset Number=SeqID_16120
cgagcagccaaggcaacgtcccgatacagttgcccagcatgtcgctcgtcacgggagagaagacgaacttccagttcatcttgcgtcttctgaacaccaacgttgatggcaagcagaaggttatgtacgccttgaccaagatcaagggtgtcggtcgccgatactctaacttggtctgcaagaaggctgatgtcgatctgaacaagcgtgctggtgagcttacctccgaagagctcgagcgtattgtgacgatcatccaaaaccccacacaatacaagatcccttcctggttcctcaacagacaacgcgacattgttgacggcaaggactctcacatcctggccaacggtgtcgactccaagctccgtgaggatctcgagcgcctcaagaagatccgcgcccaccgtggtctccgacactactggggtctccgtgtccgtggtcagcacaccaagactaccggccgtcgcggcaggactgtcggtgtctccaagaagaagggtggctaatggttttattgttttcggtctggggtggacaggcgtgacggctgggtttttcatcgttatgatgagcatttcgaagggattgctttctggcatacgcagctggtgctgtactctagatcagagtcaaatgaattaaaaagcattttcaaaaaaaaaa

SEQ ID NO: 1718 - DNA, 652 bp, Zea mays
  Peptide Sequence Number=SeqID_8152
  Probeset Number=SeqID_16121
gccgggtttttcccaaccggccggcccccattcggaaaaacatccccgttaaaaagggcgggccgggccaaaaaattaaaaaattcctcaaacaaccggaaaagacgcttttggacattttgcccccccaaatgcaggccctcaaggtcattacgacgctggacatcctttttttgcactcgcccgacaaggagtacatgggggagtttccggaacccttgtggctggcggagcccatggttaaggcggcgttttaaaaattcggcggcaggataaaagaaatccaggggtttttctacgagtgcaacaacaacctgggcctcaaaaaccccttcggccccgggattgttccgtacaaactgctcaaacccttttccaaaccgggagtccccgggagggggatccccaacagcatttccctttgatccatccccagcatgcattagtcccattaattaaatcgggggttgttctattattgcatccaaaggctgctttttgaataaaacgtactatatgtacgattgttttggacatgtgggtcaaagccccaaaaggcccgttttagaaaaaaaaaaaaaaaaaaaaaaaaaaaaaaaaaaaaaaaaaaaaaaaaaaaaaaaaaaaaaaaaaaaaaaaactcgaggggggg

SEQ ID NO: 1719 - DNA, 436 bp, Zea mays
  Peptide Sequence Number=SeqID_8153
  Probeset Number=SeqID_16122
tcaccgtcaacgagcgcgacgccgtccagagcgtcgccacggcacacccggccgccaacggggaatcgcagggacaggggatggacaagctggtgattgagggtggtcgccggctgtcgggcgagatcgtcgtgtcgggcgcgaagaacgccgcgctgccgatcctgtgcgcgggcctgctcagcgccgagccggtcgagctcgacaacgtgccgaacctgaaggacgtgcgcaccacgctgaaggtgctgaaccagatgggcgtgaagagcgaagcggacggctgccgcgtgcagctcgacgcatcgcgcgtcgacaacctcgtcgcgccgtacgaactcgtgaagacgatgcgcgcatcgatcctcggacaagaccactgctcgcgcgttcggcgaggcgaaggtgtcgctgccgggcggctgcgcgacggcgc

SEQ ID NO: 1720 - DNA, 494 bp, Zea mays
  Peptide Sequence Number=SeqID_8154
  Probeset Number=SeqID_16123
agctttcttttgtgcatcagactcaagtttaacctgcagtacatcagtcgagatgtccagggtcgtgagcacgtgcccatcaaagtgacccgagccaagctgtaatcacaggtataagattaggttgtccgttcaattgaaccgctcaaagttgcggtgcttatcccataccagtctgtttcagacatcatagtcgttatcctgctatatggtcacacgcttaagcccctggtgcagcttaaagcggatgtcttgttcggtaaacagccaggtacacacgttaagccgcactgaagctggtcttctatggatgctgcggtacagggctccgttatgggcggtcaagtaaaactctttagactgccggacgtcacacacctgtcagtggcagtccaaaacatgagtcgggttgttgagccattgatcagcaagcgccccacgattccacgccaagacagggaggtgctgtcgactgtgaaggcgcactgtctgcc

SEQ ID NO: 1721 - DNA, 299 bp, Zea mays
  Peptide Sequence Number=SeqID_8155
  Probeset Number=SeqID_16124
caaagcatcataatgagtcagcaaaccaatacggtggacagtcatcagagccttaatcagacacaggcccagcacaagttcagaggtgagatggacctccctgagtggcttgacattgtgaagagtgcaagatggacctccttatgatcaatcaatgcctagattatttacctgaggcaaggcattggtgtggatggctttcagaagatttatggtggtcgccaaaggaatggctcccgcccgcctcacttctgcaagagcagtggtgccgtttcacgcggcatcctgcagaggagcaa

SEQ ID NO: 1722 - DNA, 783 bp, Zea mays
  Peptide Sequence Number=SeqID_8156
  Probeset Number=SeqID_16125
ctagtcagggaattcatgtcaaccatcccctctgacatatcaaacagaaaaagtgatgattatcaaagagtgttgtcagaggaaagtgtgttacattctccccctgctgtgattaacaagtatctgggcagacctactgatggagtgatagatattgctgtttctgagcatcaaattgccaaggaaatcactgccaaacaagtccagcattgaccaaagaaagggaagctttcagcaggaaagctaagtgtgaagtatgctattctacacaggattggtgctgcaaactgggtacccaccaatcatacttccactattgccacaggtttgggtaaatttctgtatgctgttggaaccaagtccaaatttaattttggaaactatatatttgatcaaactgttaagcattcagaatcttttgctgtcaaattacccattgccttccctactatattgagtggcattatgttgagtcagcatcccaatatgttaaactacactgactctgtgatgaagagagaatctcctctatccctgcattacaaactgtttgaggggacacatgtcccagacattgtctcgacatctgtctcaacatcagggaaagctgctgattcaggtgctgtgtccaaggatgccttgattgctgaactcaaggacacatgcaaggtgctggaagcaaccatcaaagccaccacagagaagaagatggagctggaacggctgatcgaaagactcacagaaagtggcattgatgatggtgaagcagctgaggaaccagaa

SEQ ID NO: 1723 - DNA, 266 bp, Zea mays
  Peptide Sequence Number=SeqID_8157
  Probeset Number=SeqID_16126
agacccctgagagcctgctccagcccagcagcggcccgcgggcgggccaccaccaccaccaggagcagcacttcataacctctctgcaggttcacaacaacgacggctgcggcggcggcaacagcagcagcagcaacaacaacatcatcctgtcgtgctcctcggtgtgctccagcgcgctgccgtcggccaacggcgaggtctcggaccagaacaacggcaacgctggtggtatgcataacctgttcgaggtggacttcatgtag

SEQ ID NO: 1724 - DNA, 234 bp, Zea mays
  Peptide Sequence Number=SeqID_8158
  Probeset Number=SeqID_16127
atgggagagaagcagggaaaatcgcggcttgggaaaatgccagggagagggacgcgccaccataggcgagcgctggggcacgcaggccgagcagggagcgcggcggccatgggagatggtggccaagctggagctgagcgcgcgcagagaagggaccaggaggaggtaagagagagctttggccagaaggacgctcggctacttgcaggggagggcgcggaggctggcgcttga

SEQ ID NO: 1725 - DNA, 233 bp, Zea mays
  Probeset Number=SeqID_16128
tgcaggcgcagggcgtgacccagatcgtgctgctcggcgttgcgacctcgatcggtgtcgaatccacggcccgcttcgcgcaggagctcggctacaacatcaccctggtgaccgacgccatggccgatctccggccggaggcgcatgagaacagcatcgcgcggatcttcccgcgtctcggcgaacgcggaacggccgaggaggtgctggcgctgctgccgccgatgggttga

SEQ ID NO: 1726 - DNA, 203 bp, Zea mays
  Peptide Sequence Number=SeqID_8159
  Probeset Number=SeqID_16129
atggagctctcagcacgggctaaacctggcgacttcccgggcccaagcggggggacgactagggcttctacttctgctggggttgctgggcccaagggcgaggaccactgggctgctagcggcggtatgcaccttcctcgacgagcacgcctgatcccacctaacgggcgtatggagagccacgatggagaagaacacgtgtg

SEQ ID NO: 1727 - DNA, 219 bp, Zea mays
  Probeset Number=SeqID_16130
ggcctcgctggccaacttgttccatatacaagacgacatgtcagacgatctatctccgtcgccgcaaatagagtacgatcgtcttctgggcggccttctcgtcgagggttttgacgacaaatcatgcagaagcaggtaccgtttcgcacgctaccacagttcaccgagcataccttctccgtacctcatagagaggctaaggaaacaagaagctctgca

SEQ ID NO: 1728 - DNA, 214 bp, Zea mays
  Peptide Sequence Number=SeqID_8160
  Probeset Number=SeqID_16131
ggtggtcaccagcattgcgctgttcctcaccggctggctggggccggatcgcgccagcatcgtccgcgagaaggccggcgtattccgcggcggtaaaccggcggtggtcggcgaggccgatatgcccgacaccattgcccaggtgtcctcggagaagggtgcgcagctgttacaaattaaccgcgactggcagtggcagcgcgagggcgactaa

SEQ ID NO: 1729 - DNA, 202 bp, Zea mays
  Peptide Sequence Number=SeqID_8161
  Probeset Number=SeqID_16132
tacctattcgactcgtacccctgatgatccccatatgagaaaaccgaataccacaaaggctaagcaactgctactttgggagccaaaggcctctctcagagaaggccttccgctaatggtaaaagacttccgtcaaaggatctcggatgaactcgtttctggtacaccagcagctctgacaacggcaaagccggaggcgcca

SEQ ID NO: 1730 - DNA, 534 bp, Zea mays
  Peptide Sequence Number=SeqID_8162
  Probeset Number=SeqID_16133
ctttatatcaacacatggcaatcatacggtttcttgtagagcctccaaccattctagacgatgtaccctacaatgggtgaggtgcttgattaatacttcttttttgaatacatgcctgatgtcctatacaacacacaattgactatgtgtactaaggatagaaattaaactgctacttatggtggatagctccacctacgttagaattatagattgacctccctgcgcaggcattatattattgtcgttttggattggctaactaacaggtgtccatgattatttgctgtcaaccactgttagttctttttcgctttagaatctattcaacgattgctattgggccgaagggcactgccaccttcttttgcttttacttgatgcacggccattgatatgtgttccatgttgatgattacttaaaacatggctcgaatacactggttcagcctcagctcaatccatgctaaggtatggggttggatagtcctcagctgtttattaatcctgtgagcaagtgatttactgactatt

SEQ ID NO: 1731 - DNA, 204 bp, Zea mays
  Probeset Number=SeqID_16134
tcatcttgtttctgggtatccggcccctgttctctcctggtgtctgtacggtgtcttcgagcgtggtgtgccgttagcggtcttggctggcggctcttgcatggtctgcgccctttttggcttgggtccgcgttcgacacgctgcctggtgcgccctgccgcccgggcggtccccttgtcgggtgcggatactttaacaaggcc

SEQ ID NO: 1732 - DNA, 427 bp, Zea mays
  Peptide Sequence Number=SeqID_8163
  Probeset Number=SeqID_16135
cggcaacgagcgcccacaggaccccggcgcccacccacgtgagcgtgttcggcaccgcgtcgccggcgaagagcacgaacagcatggtggccccgaaggcgaacgcctcgcgctcgggtacggtcccgcgcgacagcggccaggctcgggccatgttcctcggcatcacgaacactccccgcgactacgcctgggggtcggtcaccgcgatcccggagctcctcggccggaccgtcaccggcgctccgcaggcagagctctggctcggagcgcaccccggcagcccgagcgtcgtggtgaacccggcgatggtgggcggtgccgacacgctccgcgactggatcgaggcggagccggagaccgccctcggcgccgaccgcaccggcctgccgttcctgctcaaggtgctcgcggcggcggtcacact

SEQ ID NO: 1733 - DNA, 549 bp, Zea mays
  misc_feature (62)..(62): n is a, c, g, or t
  Peptide Sequence Number=SeqID_8164
  Probeset Number=SeqID_16136
gaccatccatcttcctcacgcacaggcgcacaacccttccccgggcagggccacaactccgncgacgccgccaagccaaggcgagatccatggtcacgacgtcctacaccgccatcgccggagctctgttgcacgcagagcacgatccgtttccgagcttcggtgaactgacgatcaagctggggggaccccgagatcaagctcttcgagttctacaaggttgaagaccctgagcatctgtttggtgaagaccaaggatgggcatcaggaatatcagcacctgcagtacaagggcttttagaggtgttgggagaggggggtgcagacaatgtgagccaaggctttcttgaagctacaccctatggaagcactgagcttgggcgggtcctacttcaggaatcataggggctatgcaccataagaccgaaaaggcgtggagacttctcagccatgagcagaatgggcagctattaacatttgcacccctatttgtacatcctccaaggatgctcttgcaaattgttaccattatataattcttgcagttgc

SEQ ID NO: 1734 - DNA, 549 bp, Zea mays
  misc_feature (488)..(488): n is a, c, g, or t
  Peptide Sequence Number=SeqID_8165
  Probeset Number=SeqID_16137
gcaactgcaagaattatataatggtaacaatttgcaagagcatccttggaggatgtacaaataggggtgcaaatgttaatagctgcccattctgctcatggctgagaagtctccacgccttttcggtcttatggtgcatagcccctatgattcctgaagtaggacccgcccaagctcagtgcttccatagggtgtagcttcaagaaagccttggctcacattgtctgcacccccctctcccaacacctctaaaagcccttgtactgcaggtgctgatattcctgatgcccatccttggtcttcaccaaacagatgctcagggtcttcaaccttgtagaactcgaagagcttgatctcggggtccccccagcttgatcgtcagttcaccgaagctcggaaacggatcgtgctctgcgtgcaacagagctccggcgatggcggtgtaggacgtcgtgaccatggatctcgccttggcttggcggcgtcgncggagttgtggccctgcccggggaagggttgtgcgcctgtgcgtgaggaagatggatggtc

SEQ ID NO: 1735 - DNA, 210 bp, Zea mays
  Peptide Sequence Number=SeqID_8166
  Probeset Number=SeqID_16138
aaggcggagctggctatcattcgattggacgagcgcacccggggccgcccctcgcaggacgctaccggggctgatactccacacaccgccaggaagaggggcacgcacctgctaagggctagacgggtcaccccctacccggacctggtcgcggcctacgagcccaggatctgtccggagtggacagaaggcgacaccttgcaattctaa

SEQ ID NO: 1736 - DNA, 530 bp, Zea mays
  Probeset Number=SeqID_16139
ggagggcctgctgttccccatgctcaccgtcgccgagacgctctccttcgccgccgagttccgcctcctgcgggcgctgtcgccggccaagaagcgcgcgcgcgtgcaggcgctcatcgaccagctcggcctccgcgccgcggccggcaccatcatcggcgacgagggccaccgcggggtgtccgggggagagcgccgcagggtgtccatcggcaccgacatcatcctcggcctcctcgaccgcctcatcctgctctccggtggccggacggtcttcagcggcccgacttccgcgctcccgtcctacttggccgagttcggcttgccggtgcccgacgacgagaaccgcgccgagttcgcgctcgacctgatccgcgagctggagtcgtcgccgagaacaagcaggctgggcttttttcgcgttcgctatgatttttctatcacccgggcttcgggctgggccccgatccactttggggcctggggtttttcgggcttggaccgggcccgaaaaacgggccgaaaggccc

SEQ ID NO: 1737 - DNA, 269 bp, Zea mays
  Peptide Sequence Number=SeqID_8167
  Probeset Number=SeqID_16140
ctggtgctctcgcaatctctgcaaaaccatcctcaaatgtatcttctatacttgacgccaggtgtttcctgaagctctgtttcatcagttgctgttaacaatgatacaccctgaccatgaagctcgtgttgctgcacaccgcatttttgccattgtcttagtcccatcttctgtttccccttcgattcaagccagtccatctagccgaccaaagaaacatgacatgcagaggacactctctagggctgtctctgtattttcttcttcag

SEQ ID NO: 1738 - DNA, 558 bp, Zea mays
  Peptide Sequence Number=SeqID_8168
  Probeset Number=SeqID_16141
aaaaaatttccatgggttaacgggtatcgggtctcgctgttcgcttgattgtaatctgtatcggcttctactgtatctataatatttttgtctatataaattgcagatgaacggcatgctttaatcccgtctatctccagcggtcttctcatctagcctcataaactgatgcaatgcaggtcgttcccctgttcctttctgagatcgcgccgacgagaatccgcggcgggctcaacatcctgttccagctcaacatcaccgtgggcatcctcttcgccaacgtcgtcaactacggcacctccaatatccacccgtggggatggaggctctcgctggcgctggcaggcatcccagcggtgctcctcactctatgcgcgctcttcgtgacggacacgcccagcagcctcatcgagcgcggccgcatggaggagggaaaggccgtgctcaagaagatccggggcaccgacaacgtggagccggagttcaacgagatcgtggaggcaagccgcgtcgcgcaggaggtgaagcacccgttccgcaacctcctgcaggcatgca

SEQ ID NO: 1739 - DNA, 215 bp, Zea mays
  Peptide Sequence Number=SeqID_8169
  Probeset Number=SeqID_16142
ctgcagcccgagaagaggtgccaggtaggcgtggttatcctggatatatgtatactgatttggcaacaatatatgagcgtgctgggcgtattgaaggaagaacaggctccattacccagattcctattctaacaatgcctaatgatggcagggtactgctgccagttgattcacgggagcctaatccatgcaatgaggggggttgcccaaacgcg

SEQ ID NO: 1740 - DNA, 555 bp, Zea mays
  Peptide Sequence Number=SeqID_8170
  Probeset Number=SeqID_16143
atggtggggttccccgcgaaccacgcagtcgccgtcggtcgcgccaccagcagcttcctcgtcgcatggggccgcaccatgcgcggtttcccgatcggcctgccgccgccgccgctgcgccgccacgcagggctcttcccgccccgagacccgccgcgctttgagttcgagctccgcggtgtggagttccgcgcgcgcccgacgccgcctgcatcatcatcatcaccatcccacctcgtcacagcccccggtgagtcgaccctccgccacgacatcgtgatccacaaggcgcacttcaccggggaattcatcgccgcgctccgcgccaaggcatcagaaggccgcggccaccctttcagccggttcgagaccatcgtcggccatgtatggcgtgccatgacgcgcgcgcgcggcctccgtgacccgtgccaggcgtccgccatacgaatctccgtcgacgggcggccgcgcctcggagttccgcaggaatacttcggcaaccaaattaatattacgttcccgcgcaccacggtgggcagcctgctgacgcagtcg

SEQ ID NO: 1741 - DNA, 503 bp, Zea mays
  Peptide Sequence Number=SeqID_8171
  Probeset Number=SeqID_16144
ccgggctgcaggaattcggcacgagtaatagcatcctcggcctgctgtggagggaaccacttccctggactggttgagtacgccggagtgacgggcccagcctacacctttgaccactatgccgtcgcccttgatgaagtagaccgggacggtagggaatccaataacaaggcagagcgggtgaagcaagagctgtgggatttctttagatgcgaggctggatacgaggctagggtggatgtggtggccaccatgagctgtaagaagctcgtcatggacatgcactatgaggcacgaatccaggccatcgttagttaccacgaccctgtccttagggagaaggtgaccaagcattaggcccgaatcatgtcgtttatcagggaccaatatttgcagacgattccttattggtgtgccacacatcctcattgctgagagcagatggtggataggtggtgctcggttgagtgggatgaggcgcacaacgctagccgggacgtctg

SEQ ID NO: 1742 - DNA, 609 bp, Zea mays
  Peptide Sequence Number=SeqID_8172
  Probeset Number=SeqID_16145
ctgcctatgtaggcctatcctgtgtgacagatcatctccgcaccgtggcctggtcgtccaagtttcgcccacacctgttggagaagtatggtgatacatcgaacatgttggagttcctgcaggtctacatcaccgctatcattgtggctggcggaaatggcgctgtgatggcgagctacttccatttagccttaatcgggccaccctagacttcactcgagaacctcaccccaggatccatctattcctgggaagagctctgcacgtggttcatcgtgaacttcgccaacgcttatcagcagcatggcgtggaggccccacccccatgtagtaagaaaggaatctagagagatgctctaggcattcatctcctgcttcaccaaggtacggggaaccataccttgtatatctgatccttttatcatcattactttccgacagggggtacgtgatgaaaagatgcttgggaagctgtcgacacatgatgtagaaagcgtcaccacactcttcactctggcagaaaagtgcgctagggccaccgagggtcgtgcatggcactcgcccgcacaggctggggctacccaaatgggtggtccaggggtaccgagc

SEQ ID NO: 1743 - DNA, 210 bp, Zea mays
  Peptide Sequence Number=SeqID_8173
  Probeset Number=SeqID_16146
gaacccccaatgtagggctagatgcgcctccaatagttggttaggtaaacgccctgtagtaacagtggtagttatataccctggggaccacctcacatgcgggtggtaaagggaaagccaccattggtataaaaataccctcatcgcgtcggggttatccgggccttggaagaatagactaggacaaagtagattagtatagtgatagtt

SEQ ID NO: 1744 - DNA, 355 bp, Zea mays
  Probeset Number=SeqID_16147
tttaaagtcaacttgcaggatattaacccccagggcgccgtaagtgtaccttctggtggattggaccggggcaaaggatccggcaaaacgccaaatcccgttgctgaccacgcttttacgcggcgtcagcgtgccggtacaggttggcggcggtattcgtcatcgtgacgatgtggccgccctgctggcagccggtgtttttcgcgtggtggttggctccaccgcagtcaagcagccggaagaagtgaaaggctggtttagcgaattcggtgccgacgccattgtgctggcgcttgacgtgcgcattgacgccagcaatcgcaaagacgttggcgatcagcggctggcaggaaac

SEQ ID NO: 1745 - DNA, 1550 bp, Zea mays
  misc_feature (1)..(1): n is a, c, g, or t
  Peptide Sequence Number=SeqID_8174
  Probeset Number=SeqID_16148
nccgcccggccagcacaaccgcagtcccagtcttctagacgaagcgaacgtgcgacaggaaaaacacggccgctgttggtcgaatccacgccggcgatgtcccctgccgccgcccaactgagtggtacaggtgccccgcacggcggagaacttcttggccctctgcgctagcggctactacgacagcactgtgttccaccgcaacatcaagggcttcatggtataaggcggcgaccccatcggttccggcaatgcagggcctccatctgggcaccaagttcgccgacgagttcagggagtcccaaggtagcacactatgcagtgcaggagctaacagcagacccaacgccaacggcagccgattcttcatcacctacgccaagcagccgttctgaaaaaaaattgaacagagtcacccaagaatgtgcatgtatggaatgacagcttcagattaacgacaaccacaattttccaattgtgtggttttgatggagtcatgtatgggtaaccaggaggccatctaaataaatccgagaactacgactcattatattaagaagataggaaaaaaaggcttgagaattacgccccatgattcatcgcatttttcttggtcgttgttgcttcaaggataacaggtatatttactgcaactactcagcatgttaggtaatatcaattttttaagttgttgcatcatcatatcttattttaagttgttgtctcaccacatgtactactttataacatgattactaagttgagtgcataattattttgtgaccactaaaaccaatattttgtatgttcagtacatgtatatatatccatttagcaatctaataactagactgctcatgagtctgtatttgtaaaaaaaaaaaaaaaaaaaaaaaaaaaaaaaaaaaaaaaaaaaaaaaaaaaaaaaaaaaaaaaaaaaaaaaaaaaaaaaaaaaaaaaaaaaaaaaaaaaaaaaaaaaaaaaaaaaaaaaaaaaaaaaaaaaaaaaacggccccccaaacttaaaaataaagcgaaaaaaaaaaggtgcgtgtttttttagggaggggggggaaatttaaaagggctcccttttaaccttccggaaaaaaaacctttcctttttggtgaaaaaatcaaaagggccccccaatttgaaaaaagcccctacctatcgggaaaacttccccgaaaaagccccctgaatggctaaaatttttctttccccttccccggaggttataaaaaaactcaaaggttcccacacaaacattcaaaaaatccccccattttaaaccacagaacacccccacaaaaaaaaaccaaaaaaacacccaccgttttttggccccaaaacctgcggtttttttatatgcatcgacaccctgaccaggatacaaaaatttattctcccctcagacccggcgaaattccacaggaggataaagatacaacccccttttctctccaagaaaaaacgaggggtctcctgctccgaccctgaaaaggaaaaaatatctctttggcggtccccataaaagaggcgtgac

SEQ ID NO: 1746 - DNA, 407 bp, Zea mays
  misc_feature (36)..(36): n is a, c, g, or t
  Peptide Sequence Number=SeqID_8175
  Probeset Number=SeqID_16149
gtcacagaatttatgagaggtatgtggttcggcaanaacgagcagaaggaaagaaggccctaaaggatattcttctctatggaaagtcattgcctcatttacaggtgaaagatggaagcacaggtagctttgctaactcacatgcaattccgaggttcaaaacgtttaggaaaggacctcaaactcactggtcatcgaattcatggcaaggcgtacacaatcacagaaagaggctttcgtcccctgcctcacaaggtcgagaagggtttccccgacctctcgcgcacccgccaccgcttcctctgtctctcgcagccgccgtcgcctcctctccctcgtgcagtcagaagtcagcagcccctccccctcgcgcgccgtcagcagatacataaaccgctgaccggcca

SEQ ID NO: 1747 - DNA, 208 bp, Zea mays
  Peptide Sequence Number=SeqID_8176
  Probeset Number=SeqID_16150
cagcttgcatgcctgcagcccttcaggtttttggaggagtcagcaaagggttaggatattccggtggcaatggaacggtcacaggaaaagcttgcccaaagggtctttatggtacattttgcaaggtataacctttgcaaagttggagtgcgaaaacagtgggctgtttgaagctgcaggtcgactgtagagctccagtggtaccgag

SEQ ID NO: 1748 - DNA, 487 bp, Zea mays
  misc_feature (140)..(140): n is a, c, g, or t
  misc_feature (142)..(142): n is a, c, g, or t
  Probeset Number=SeqID_16151
taccacccccaccacgggggccgccttcggttggggggttggccggttcttattgttgttgtccttcccgttgttgccgttcacggggttcttcggaagcggaagggccttcccggggccggggggcggggcggtttttncncgggcaacggcttccccttccaatgcaagcccaaaccaaaggggggcgcaacgaaagttcttgctggaccggcctttcaccccggggttgccgggcaagagcccgttgtcgttttccctttcggggggcaacgggttgccgccccgcaacagggaccgcttcccgaccctccccgagggccacctcaaggtcgtgctttacgtgcacaacgggccccgctacctccgcctggtggtcgatagcctctcccgcgtcgagggcatcggcgaggcgctgctcatcgtcagccacgacggctacttcccggagatggacaggatcgtgcagggcatcggcttctgccag

SEQ ID NO: 1749 - DNA, 556 bp, Zea mays
  Peptide Sequence Number=SeqID_8177
  Probeset Number=SeqID_16152
ggtagtagtagttccccgaacctctatgtaggaatctggtacaaaaatattccaatcagaaccgtggtttgggttgcgaaccgcgacaatccaatcaaagacaactccagcaaattgagcataaacacaaagggctacctggtacttatcaaccaaaacaacaccgttatttggtcaacaaacacgacaacaaaagcatcccttgtcgtagcacaaatgttagactcaggcaacttggttctaagagaccagaaagacacgaatcctgaaaactacttgtggcagagctttgactatccctcagacacgtttctacctggaatgaaattgggatgggacttgaaaaaaggccttaatagggtcctaactgcttggaaaaactgggatgacccttcaccaggggacttcacactgactattttacatacaaataatcctgaagtggttatgtggaagggcacaacacaatactacggaagtggcccatgggatggaactgtattcagcggtagcccctccgtgacatctgactcaaatgtaaactacgcaattgtgt

SEQ ID NO: 1750 - DNA, 233 bp, Zea mays
  Peptide Sequence Number=SeqID_8178
  Probeset Number=SeqID_16153
tgcagctgtgagacatctaattagtttccatttaggttgctgagatccttaaggatcgtgcatcgtggtatcgcgattgtcggcatgttgatgtcctccatgttatccctacgggtaacggtggaacgattgagctgatctatatgcagacttatgcactgacaactctcgcggaaccacgagacttttggacgctccgatacactagtggtcttgacgatggcagtcttgtg

SEQ ID NO: 1751 - DNA, 245 bp, Zea mays
  Peptide Sequence Number=SeqID_8179
  Probeset Number=SeqID_16154
atggcggggatcctggggtgggtgccttacgtggttggtggggccggagacattgaagacgagcagcaggtcgacgcgcgcgccgcggcgtcggccgccatgaccccggcccagcggctccgcgccgccgacctggacgcgcgggcggcctcgctgcgccgcgccatccaggacctccgcctccgggtgcccccgccgcacgtcgcgcagcgcctgccccacctccacgccgactcactcgcgtc

SEQ ID NO: 1752 - DNA, 242 bp, Zea mays
  Peptide Sequence Number=SeqID_8180
  Probeset Number=SeqID_16155
ctgcagctcatactaaatacctttgatgacacaatgtctaattattttatgggacttgtgccaaaaagttatgatgttgttgttaagctgaatgacaatcagactaattcagagaagtgagttagcaaaaccaatatggaaggataacctgctctcacattggatgtttcattcagcaggcctataattgttatgccccctgaaactgatagtactaattttatgaaaatagatatagctgc

SEQ ID NO: 1753 - DNA, 222 bp, Zea mays
  Peptide Sequence Number=SeqID_8181
  Probeset Number=SeqID_16156
atggactccgagcttgaagacatggctgtgagggagctggaacagcacgcggcatggacagagctcgagggagctgcgcgcagagagggatcgagcgccgcggcacgggcgcgagctggagactcggaccaggacgcgcaggggcaagctcgcgcgcagcagaggagccaggggcgcgcaccggcgatggaatgtggagctctggccgagcggctgcctgag

SEQ ID NO: 1754 - DNA, 637 bp, Zea mays
  misc_feature (11)..(11): n is a, c, g, or t
  Probeset Number=SeqID_16157
tcactccagcngtatgcgcatgaagcatgtcaataaggatgaactggcggcgatggataaagagtccgaccgctgtgcgctggagctgtccgacgcgcgcgttgacgtgctcggctatgcctgtctggtggcgatcatggcgatgggcccgggctatcatcgccagtcgcagcagcgcctgacgcaggtcacgcgcgacaacgaggcgctggcaccggtgatcaccagtgccggcgcgctggtcgatgcgctgcatgttatgggcgcgaagaagatcgcgctggtggcgccctacatgaagccgctgaccgagctggtggtggattacatccagcgcgaagggattgaggtaaagcagtggcgcgcgctggaaattgccgataacctcgccgtcgcccgccacgacccggccaatttacctggcatcgtggcggacatgacgctgacggatgttgatgtggtggtgctgtcggcctgcgtgcagatgtcatcgctgccggcggtggcaaaagtggaggcgcagaccggcaagccggtaattacggccgccattgccaccacgtacgctctgctgaaggcgctggagctggagccggtggtgccgggcgcgggcgcactgctgtccggtgcgtggtaa

SEQ ID NO: 1755 - DNA, 251 bp, Zea mays
  Peptide Sequence Number=SeqID_8182
  Probeset Number=SeqID_16158
tgcagggatggaaagagcttcacatacaaaaatagtatcaacattgctatagcagtggccatagatggtgggttgattacatcggttcttcaagatgctggtaagcttgacatttattcattgtcaaggaaacagaaggagttagttgataaggcgctagcaaagcagttgcagccccatgagtacaactctgatatttttttgcctcatacacttcctctcatatttcttcgtctattttttggcctatt

SEQ ID NO: 1756 - DNA, 368 bp, Zea mays
  Peptide Sequence Number=SeqID_8183
  Probeset Number=SeqID_16159
ggctcaccggccggagcccgaccggcaaatcggggcagctccaccgcctccttgctcaccagcggcggctctgtccgcccggcccacgcgtgtgcgtacaccacgtccacgtgcaccgccgcgtacggatgagtgaagaaaggcatgcacgcaggcagcacgcgccaccgcgccaggaacgcgtcgtgcaccagcacgtccaccgcgccccggccctgctccgactcagaccgtgcgagcgaccgggccgcggtgcgcggcgagaggcggcacttgccgaactggaggattgggttgacggggccttggctcgggtacgggagcaagatgacgaggatgctgcgctccgacgtgtgtgagtcggccat

SEQ ID NO: 1757 - DNA, 289 bp, Zea mays
  Probeset Number=SeqID_16160
ctgcaccaggtcccaacctaaacaattctgttgtatcctcctttgatgtagtcggcagtctgctgctgcgtctcagggcctttgtgcatcagcatcatctgcgcttcaaccagaccgcgctggcgctggaagcggcgctgagtggtcagggtatcgcactgaccagcccgcattttgtgcagaacgatctggccagcggtcggctggttcccgcctggcagcgtgagatgcccgttgatgccggctggtatctggtggctccagcgtcgtcccgcgtgagcaggcaacg

SEQ ID NO: 1758 - DNA, 349 bp, Zea mays
  Peptide Sequence Number=SeqID_8184
  Probeset Number=SeqID_16161
cccctgacagggcaggtgacagcaacccttactgcggccagagtccgagtggtggtgagcttggagctgttgccgacccctcccggtcagagccccaactacaatatacgggcgcagctcaacaaccagcagccggagcagtcccattgtgcgcccctgcccactcagtaccccgggcagcccctcaccagctccccgagtgccatcgcccagcagcgccccgcgtcctcgcccggctccctcggccccccgcagggatccgccctcgacctcgctggcgactcacggcccgtgagggcgtcatcgcggtcctacttgccgccgcccgatggcgtctgctcgtgcaggg

SEQ ID NO: 1759 - DNA, 523 bp, Zea mays
  Probeset Number=SeqID_16162
tccgggcatccctgttgggggctcacggtcgtttatctttggcaaggtggataagggggtgacactgtctaaagccacccgcatagcgcgcaagttgggctttaccaagcgggatccgcgagacgacctgtccggtactaacttggcgcgtaaactgctgattctggcgcgtaaggcgggtcatcacatggaggtgagcgatcaatttacatgtaaccgctgctgcccgccagcctgacggacattgccgacgtggatcagtttatggcgcgcgtgccggagctggacaacgcctttcccgcgcgcgttgccaaagcgcgtgatgagggtaaagtgtcacgcttcgccggcgcaattgaagagggcggcgcctgcaaagttaaaatcgatgcggtgtacggcaacgatccgctgtacaaagtgaaaaacggcgagaacccgctggagtttttcagccgctattatcatccgatcccgctggttctgcgcgaatatggcgcggggaatgatgtccccccgcagg

SEQ ID NO: 1760 - DNA, 1600 bp, Zea mays
  Peptide Sequence Number=SeqID_8185
  Probeset Number=SeqID_16163
gatgctccttaagggagcaagtgctcatggtttgttgtgcagagcccagatcgataagcgaccctagttcacttctgcaaagagttcttaatccaccagatccagatgctattgaagaagcgctagaatcactagttcaaattcatgcattggagaagacagcttctggacgctacgaacccactttttatggctgtttgctcaatagtttgccattgtcatttgattcttctgttcttgcccttaaattttgtgagcttggtgctatccatgaaggaattctaataagcatcatgctggacatccagccgcttcctatcttgcacacttttggctatcgagaactgtgccagaagtacatagacaattatttcaagggaaatggcagtgtacaaatcggcaaaaaggaagctaccaccattggaaatctttgtgcatttcaattttgggagcgcgtttttaaggacaaacaccgtctggaatatctaaaatatgtggcgaagactcaagaaccagaagaatcacataccttccttactaaacctgaagaggaatggtgtgcagttcacaacctcctccctgcagcgtttaagaacatatctgaaatttatgatgttgttgtgatgcaactgcaccggttcaggccaagttttcttgtcaaaatcaatcctccaaagtttcttcagccttctgaattcaaccacacatgtctccatcgtgaaatactggatctagaggaggacgtggattcactctcattagagactgagaatgctcacagcgattcacagaagcgatgtgctgcaactccatatgtttcaccaactgattttgagaccagcaccattgttgaaatgctaaagacacttgtcaagatgaaaacacaacatgctgagaataaaatttcttataaggggcgacttggttctaatgtgaagccaacctttgggaactcaggcccagtatgcaagttctatctcacactacagggttgtcgaaatggtagatcttgtccatactcgcatgattctggctccttggtctctgcacctgtcacatctggaatatgctctcaggaaagcagagccacctcattgtgcgatacaaggttgcttcctgctgatggagatgggcatattcttgtcgtgaatgacaaaacccatcagttttatattaagcatagtcagttttgcgatcccggcaagattgctgttgttccaactggtcatgagtatgctgagtcgaattcagttccatagggcctccacatacttgagactttgtccgttccatctattctaatcagtgggcttgagcaagctttgccagagccttgggcaaatcttaatagagctctctggttagatccctttggtaactgttagtcagccaccgagcaagctctcttgcagaagtttttccctagtctggccgtcaacaatttgtcataacggctgtcctacctgcatgtcatcctgggcttgaaacacccgagatacattcagttgcaggtaagtcccataccataaaggcctgtttctcattcgacagccgacactcgtcattgtgcgcaactgtgagatatcctttttgcgttcag

SEQ ID NO: 1761 - DNA, 482 bp, Zea mays
  misc_feature (323)..(323): n is a, c, g, or t
  Peptide Sequence Number=SeqID_8186
  Probeset Number=SeqID_16164
cttacgccactgtttctcagtcaggtgcgcggcttcagcgcactggagactggactggcgatcttctccaccggggtgtttcagattctgtcgatcccgctgtatgcctggctggcgaaccgcgtcgatctgcgtattttgctggcggcggggctgatctgttttgcgctgtcgatgcatttcttcgtgccgattacccatgactggggggcgaaggagctgctgtttccgcaggcatttcgcggtatggcgcagcagtttgccgtggcacccacggtgacgctgacgctgggcagtttgccaccggcccgcctgaagctcgngtctggcctgtttaatctgatgcgcaaccttggcggcgcgattggcattgccctgtgcggtacggtgctcaacgaccgcaccaacctgcactttaatcggctggcggatcatctcaacagcgccagcctgacgctgggtgaattctgcaggcatgcaag

SEQ ID NO: 1762 - DNA, 290 bp, Zea mays
  Peptide Sequence Number=SeqID_8187
  Probeset Number=SeqID_16165
ccgttccgatacggtctcatatgctggcacgatttccgtcatcggcgcgctgcgtcaaaccggtaccggcacgacgattctcgtcggcgtcatccgctacaccggcggcacggcgatcgccggcggcgcgctggcggtcggcgacgcgtcgcatccgctggcgacgagcggttcgggagacgtcgccgttgcttcgggcgcttcgcttggcgggtacggacagatcgcgggctcggtgcataacgtcggcacgcttgcacccgccaatgcgttgccggtcttttccgcag

SEQ ID NO: 1763 - DNA, 311 bp, Zea mays
  Peptide Sequence Number=SeqID_8188
  Probeset Number=SeqID_16166
tgcagcagcgtcgcgcctcttcctcatcatgcaggatgctccacgtgtggtggcctagcgcttctcaagcgcgttcctcccacagagcgtctagttgcatctcttcccaccagttgcagcaaccactggcgcgtccttacccctctacgacgctggcgaccacatcccctgcctcccaccagcgcgtcgcacaccctgcttccgttggcacgtccttccccctccgcgacgaggaccccaaacccttcctcccgctgatgagctcctctctctccgccaaccgacggcgcagacccacgctctctcgctaa

SEQ ID NO: 1764 - DNA, 602 bp, Zea mays
  Probeset Number=SeqID_16167
cgcatccaggcgctggcgcgcaagcacggctacaagctcaacgtcagtgcgcgcaatctgcgcttgcggcgcagccacacggtggcggtgatcgtggaaatgacgccttcgtccagccgcaccatgtgggatccgtacccgctgtcactgctgggcggcatttcgcaggagctgacttcggccggctacagcgtgctgctgaccacccgccagggcgccgcaaatgccgcggtgcaggcggccgacggggtgatcctgcttggccagggcgtgcgccaggacgcggtcaagctgtacgacaagatgggcttgccgatggcggtgtggggcgcggaaggcgaccacgacaaccatatcgtggtgggcagcgacaaccgccagggtggcatcagcgtggccgagcggttcctctcgatcggtcggcgccgcccggtgttcatcggcaattccgatcatccggaaatggcacagcgcctgcacggcttcgtcgacgaactggccggtcacggtatcaagccgttgctcttgcagcgggtcgactggacgctggactcgggcgccgacgcggtgcgctcgctggccagtcgcaaggtgcatttcga

SEQ ID NO: 1765 - DNA, 429 bp, Zea mays
  Peptide Sequence Number=SeqID_8189
  Probeset Number=SeqID_16168
agcagcagccgcaacctcagaagttgcaacatcatcaacagcagcagcaacaacaacacatgcagatgcaacaaatcctattacaaagggctcagcagcagcagcagcatcaacagcaacagcagcagcagcagcagcaacctcaacaacagcagcagcagcagcagcagcaaccacaacagcagcatcagcagcatcagcagcagcagcaaccacaacagcagggtagggatagggctcatctcttaaatggtggtacgaatgggttagttggaaaccctagcacagcaaatgcactagcaacaaagatgtatgaggaaaggttaaaattgccccttcaaagggactctttggaagatgcagcaatgaagagatttggagaccaaatcttagaccctaatcatgcctcaatattgaagtcatctgcag

SEQ ID NO: 1766 - DNA, 397 bp, Zea mays
  Peptide Sequence Number=SeqID_8190
  Probeset Number=SeqID_16169
cagcttgatgcctgcagagctgggctcgggcctcggttccggcgcggtgatcgtgatggacgagaccacctgcatggtcaaggcctgccaccgcatcgcgcgcttctacaaggccgagtcctgcggccagtgcacgccctgccgcgaaggcaccggctggatgtaccgcgtgctcacccgcatcgtggaaggcaagggcacgcaggacgacctgcaccgcctcaaggccatcgccggccagatcgagggccacaccatctgcgcgttcggcgaagccgccgcgtggccggtgcagggcttcctcgccaagttctggaacgaattcgaatactacgtgcagcatggtcgctcgatgaccgaagaccggctcgccgccaaccgtggagtcgctgcatga

SEQ ID NO: 1767 - DNA, 317 bp, Zea mays
  Peptide Sequence Number=SeqID_8191
  Probeset Number=SeqID_16170
cgcgcatcgacttccgcctgaagacgcgttacgtcgacaagaaggcgcgacggctagacgaagcgctcggcatgatcgaagaagcgaagcgcgacggcaagccggtgtcggtcggcctgctcggcaacgcggcctacgtgttcgcggaactcgtcaagcgcggcatcacgccggactgcgtgaccgaccagacgagcgcgcacgacccgatcaacggctacctgccgcagggctggaccgtcgcgcagtggcgcgaggcgcagaaggtcgatccgcagagcatcgtgaaggtcgcgaagcagtcgatggccgtccag

SEQ ID NO: 1768 - DNA, 214 bp, Zea mays
  Peptide Sequence Number=SeqID_8192
  Probeset Number=SeqID_16171
aaggtaggagcgtatgactttattactagctttgaacttctgatgttggttggtagagttggccctcaaatttgtatgttgaaaactcatgtggatatattatctgattttacaccagattttggctctaagctccgctcggtatccagcaatttcccattttgccctttcctcatccacagctctaagactcacggtaacactagggctgcag

SEQ ID NO: 1769 - DNA, 212 bp, Zea mays
  Probeset Number=SeqID_16172
ttagttgttgtggccttgtttgtgcgggtccgcgtcgtgacgtgttggtttctgttccttgcggcgctgcgtctccccttgggtctttgtcgggtccctgttggtttcgtcgcccgtgttcttgttctcgtgctcgtggtttagcgccttcggcctttggccttttctgtgtggcggcccccgctggggcttctttgttgtgctctcttgcc

SEQ ID NO: 1770 - DNA, 426 bp, Zea mays
  Peptide Sequence Number=SeqID_8193
  Probeset Number=SeqID_16173
tgtttatctggttatatcggttgactgcacttgagtccgaatatattatttttgatggcacctgcacgaagagtttgacactcatgatccaaaggataacactttgctcctcccttacttgaggaaaaggccaaacatcatagagataggagcagcgcgtgatatagtctttgctctatcaccgataggagtatgtgctgcttttagtagagacacaaatcagagaatatgctttttgaacgggagtctacatgaagtcatccgctatttttttcacagacaagactaatgattcattcaaaactgcatcagtatttggctctgaaatcttcagtgctctgcgatgcagtataactcgaatatagtacgttcgccgaggaccagaccaacccggatgctggtttccctctttttgactcaccatgc

SEQ ID NO: 1771 - DNA, 536 bp, Zea mays
  Peptide Sequence Number=SeqID_8194
  Probeset Number=SeqID_16174
cgctgcatgagtgcgcagcccaccagcaccgcccccgacctcgtcaacatcgagatcgacggcaagcccacgcaggttcgcaagggcgcgatgatcatcgaggcggccgacgccatcggcgtcgccatcccgcgcttctgctaccaccgcaagctgccgatcgccgccaactgccgcatgtgcctggtcgacgtggagatgggcggccgcccgatgcccaagccgcagccggcctgcgccacgccggtgggcgagggcatgaaggtcaccacgcgttcggacaaggcgctgaagttccagaaggacgtgatggagttcttgctgatgaaccatccactcgactgcccaatctgtgatcagggcggcgagtgcgacctccaggatcagtctatggcatttggtgctgaccgcggccggttcactgagatgaagcgttcagttgtggacaagaatttgggtcccttggttaagacagtgatgactcgttgcatccaatgtacaagatgtgatgctattttattttcaaattgcagggg

SEQ ID NO: 1772 - DNA, 266 bp, Zea mays
  Peptide Sequence Number=SeqID_8195
  Probeset Number=SeqID_16175
ctggtatcatcatgggaagcgttggactgataagttcaatcatgtcatcggtgtagttcatacaaattacttggaatatatcaagagagagaaaaatggtgctattcagtcttttcttgttaaacatatcaataactgggtgactagagcatactgccataaggttttacgtctttctgctgcaactcaagatctaccgaggtctgttgtttgtaacgtacatggtgtaaatccgaagtttcttaatgttggtgagaaaatagcag

SEQ ID NO: 1773 - DNA, 919 bp, Zea mays
  misc_feature (1)..(1): n is a, c, g, or t
  misc_feature (871)..(919): n is a, c, g, or t
  Peptide Sequence Number=SeqID_8196
  Probeset Number=SeqID_16176
ncaattactttacaagtccaataaaaaagttgcaccaaaagcatgattaaaaaaagcaatgacttgaatatttacccaaactcaagcatgtcattcttcagggtgaggaacagaaccatggacttttttatggaaaagtgaattgtcttatatcatctgaaatatctagccaaaacagccagttttcagcaatattcagcttggttggattggtgttatctccagcaatgagaactctatcagactgtcagttcatagcaaccacgaaatgagctcaaaatggaatacacagcacaacagaaataacctgtttttcttacaacatttgttctctgcattcagttaaaacgagctattgcttgcaggagctgcaccaagttcacgcttcatattcgcagagaagaatgcaaactatgttctgcttacctgaacaataagtgtcttgaggagttttttgtaaatgaggtgatctctacttatgcacagtagctctttccttgctgactccaacatatctgttaccaaatcatcctgagcttgaagactttattctggagctttgagctgcatcgagtaatcaattttcttcttgatgccaataacttgctagctggattccaccgtggtcaagccttgtgatgaaatcagatgatgatgacgcaattggcttctgtgacctacaattatgggcatgctgatgctacctagaacctcactacactggatgacaggtgaataagcagacaatagttgagtgttgtcatcaggttgcatctaccatgactgagattgtgagcttatgtatctatcgatcattgtattactcactctttctcagtataagttgaatactcagcatactatatatatnnnnnnnnnnnnnnnnnnnnnnnnnnnnnnnnnnnnnnnnnnnnnnnnn

SEQ ID NO: 1774 - DNA, 770 bp, Zea mays
  Peptide Sequence Number=SeqID_8197
  Probeset Number=SeqID_16177
tcatgtttaagtttgaagacgtccgcggatacaggagacttgtctgtgctgcgatacacaccagtatcccaagatgcctcagcaagtgcttatcagatgatgagttactttttgttggatattgattatgggatacatacaaatcttttaaaaaccccaaatacggatggcagatatatcagggatatatatgaattcatgcgggattgtttaataaactatctcatcgctgaagaaaagatagaactagtaattaaactacttacacgtaatgaaaaagatcaagaaagtgtattagctaagattgttagtatatttgatcgcaatgtggtaaagaaaatgtttatgcccatgatgtatgggaaaaccgattataccttaaaaaaggatgttgaagatctattaaagggtaagtcggattccgagggaataaacctaatttcaaaacatatttctacatattggaaagagaattttggaaaaatgaaagatcttatggatcttatcaattatgttagctggtttggagcaggacaggataaaccggtggtatatagtacgccgtactgggtaacgctgcaaacatataagcggggaaaacgcgtaaaatgaaatacagttatacaaccaaaataacgaaaggaggttaaacacatggctaaatgcttgtccgtaacgatacatttaaaagagctaactaacttgcaattatcataaagagcttatgttcactgtggttatataaccaatctctatctttccagctaatt

SEQ ID NO: 1775 - DNA, 231 bp, Zea mays
  Peptide Sequence Number=SeqID_8198
  Probeset Number=SeqID_16178
ccgctgcggcgcggcgccgacgaggcgcacgcgcaggccaacgccacgggcggcaatgcgctcgcgtttcatgcgcccgtcgacgagccggccgacgccgagcggcacaagctcgaggccgacctgaacgacggcgtgcgcaacggcgagttctcgctgcacttccagccgatcacgcgcagccagtcgggcgcggtggtaggcgtctaggcgttgatccgctggcgccat

SEQ ID NO: 1776 - DNA, 686 bp, Zea mays
  Peptide Sequence Number=SeqID_8199
  Probeset Number=SeqID_16179
cccctgcaggttgacacccaggccgagaacctcatcaagtcccgcattaacaacaagcccagccacggctccgtcaacggtgtctacaagaccatggaggactccgtcaccggcgagtgcgaggtgatgtacgacatcagccccctggcccagtaccagctccagagccgccccgagctcgctcccatgccccagctccgcggtgacggtcagctcatcgacatcgtcaagaccaagaacttcagccactgcgagcagcgccctggctaccacttcggcatcaacggcctcaccgacgttgagcccgcctccagcaagatgggcgagttcatggcccgctcctccgtcagccgcgtcgtcctgtccggcagcctccagcgctacaccatccagtcctccgtcaccaccaacaaggtcctcctgagccccgtcctgtacaacaaccagaacggcatgggtcgtctcccgcatgaacctgaccctggactccgtgcacgccgcctccggctcccctcagggccccgctaacccccgcaagatcaaggacctcgtctacgactacaacgacccttctcgcctcaagaacgctgacatgagcgacgactccagcagttcctcttcttcatcttccagttcctccagctattcttcttccttcctccagcgagagcagcgaagagcagggg

SEQ ID NO: 1777 - DNA, 285 bp, Zea mays
  Peptide Sequence Number=SeqID_8200
  Probeset Number=SeqID_16180
ggtggtcgtgagatgactgatgaggctattagaaaaaacaagaaagaatctcacgacacccaagaagaagctaagcgagctgaagaggttgctgagcgcacgaggcgtatagctggactttcaccgccgcctgagccgtataatcccaaggccaatccagccatgaaggaagcattagaaacgataaggatcgccaacgaagctgttgaagaagatgttctcatcaggcacaacagattttccatcatcaactggtggggctataggagggtccgagggcttcaa

SEQ ID NO: 1778 - DNA, 416 bp, Zea mays
  Probeset Number=SeqID_16181
atgacgcccgtgcccaccagcgcctactcccgttccgaacacctgcgcgccctgtggccgtggctgccgctgtggctgctggtcgcgctgctggcgatcttctcgcacgggccgatgccgctgtattccacccgcaccctggcggtggcctgggagatgtggagccagcaccactggctggtgccgcatctcaacggccagccctacagcgagaaggcgccgctgctgttctggctgatccatgccggctggttcgtgttcggcgtcagcgacgtgtggccgcgcgtgctggaagtggccttcggcggcatcgagctggtgctgctgtcgttgctggcgcgacggctgttcccgacccagccgtgggtggcgaaagcggcgccgtggatgctgctggcgttgtcctacgcattcct

SEQ ID NO: 1779 - DNA, 351 bp, Zea mays
  Peptide Sequence Number=SeqID_8201
  Probeset Number=SeqID_16182
atggtgctgctctatccggtcatcagcatgcgcgccggtctggcgcatgaaagttcacgcacccgcctgctgggcgcatggccggatcaaaaaagcattgatgcttattcgctggagacgcgcgtgcacggccagacgccgccgacgctgctgatccacgctgctgacgatgagacggtttccgttaataacagcatggtgttttttagtgccctgcgggagcacaaggtgccggcggaaattcatttttatcagaaaggcggccacggctttgggattcgtggcgtggcggatctgccgctggccagctggccgatgctggtgaccgaatggctgcgcgcaaagacctga

SEQ ID NO: 1780 - DNA, 298 bp, Zea mays
  Peptide Sequence Number=SeqID_8202
  Probeset Number=SeqID_16183
aaaatggcgctgaatgatattcgtaaatatcgtatccgaggtctctagcttaggggatttcagggaattgcacatttcctcgatcatctttttcaggatggacagggcaagacaggaacacttattgctatcaacgcccagaaagggcttactgctgagaaagacaaggcactgaacacgctgcttgatgaaacggaatatttttatgcagattgcatcaatattgtgcgtgccattcagcgtaaatatccggatgcccaagtgtcacccattgcgggcgccgatttatgggaagccc

SEQ ID NO: 1781 - DNA, 214 bp, Zea mays
  Peptide Sequence Number=SeqID_8203
  Probeset Number=SeqID_16184
ctaatcagatggtacagtatgttcatcaatgtccttcctgcttctcatatcaatcttactgatggtagtgctgtctttaatgtacatcaactcaaccaagttcccagtggcataaattacacatcccaaaaatcaattggattctaagccagccccatttatggcagcattttcatcaaaaggaccaaatactatggtgccagagatcctaaag

SEQ ID NO: 1782 - DNA, 354 bp, Zea mays
  Peptide Sequence Number=SeqID_8204
  Probeset Number=SeqID_16185
ctgcagcacccttacattgttgaattcaaggaggcttgggttgagaagggttgttatgtctgcattgtcacgggctattgtgaaggtggagacatggatgagctgatgaagaaatcaaatggtacctactttcctgaggaggtattgcttaaatggttcgctcaattggtgttggctgtagattacttgcactcgaactatgtcttgcaccgtgatctgaaatgctccaacatatttctcaccaaagaccaggacatacgccttggagactttggcctggcgaagactttgaaggaagatgatctaacttcatcggtatgatgttcctgcatgtttccttctttcctctttgat

SEQ ID NO: 1783 - DNA, 329 bp, Zea mays
  Peptide Sequence Number=SeqID_8205
  Probeset Number=SeqID_16186
ctgcaatgcctgttgcctaattcttgttgttatcatatgcagtcatatgatggaggctttggtatggttcctggttctgaatctcatggtggaggaactttttgtgctgttgctgctctccatctaatgggcttcatccaagttgatttggcatctgacttaagagattctacatcaatcgacacatgcatgctcctcgaatggtgtcttcagagacaagtcactgatggagggtttcaagggagaaggaacaagctcagtgatacatgctatgctttttgggttggaggcgtcttgaagatcttgggtgcattccacttgatcgacag

SEQ ID NO: 1784 - DNA, 871 bp, Zea mays
  misc_feature (865)..(865): n is a, c, g, or t
  Peptide Sequence Number=SeqID_8206
  Probeset Number=SeqID_16187
cctgtccatctccctgcgcttgctcgctcggatctcattcatggccactgaatcgagcttctctgctgcacgcggctcccgatctctgcttactgctcggatccgccgtcgctttccgcttcctggtggtcgagctcgccctggtcgtgtcgccgtggccgactccaaattttactgaccagtttcttccccagcgccccacggccaagtatttgcgcaccctctcggctccctcggccttaatccctacctcgtcgtcgacccatgttgtgcccacgacgtactcgtcgacttcgatgatttgatttccaatttcgtgctgtttatgttgaccatcggaactccttgtcgtactcgaccctgcaagcctccatctcgtcgtcattccgtgcgtcagcgagaaatctcaagagtcggtaagacggagccagcagcgtggtatccaccaagtacgcgacaaaaagctctgacatcctgcgcgactcaagttcgattcgtcaaaatgattcagtcgaggaaaagatcttcagcaattgattatcgaagaaaagaaggcccctgggtgacgtcaagtggaacccgtagtcgtgcttgcgactatcgcgtcgaattagtcagggtaagtaaatttgttactcgtgttagtggatggtttgactaggtttaatatttattagactacctgagtcgttttagtaatttggtcgatgtcataggatgaaaaagatctcaatatgtctcaatatgtctcagtgtttgcgggattgtttgtgttaaaaatgggaaattatattaatatatataagatacacagtttaaagagttaataacaagccaggaataaaaatagatattctagtgttgntatgtc

SEQ ID NO: 1785 - DNA, 308 bp, Zea mays
  Probeset Number=SeqID_16188
ctttggctttgcaaccccgttcactccgttaaccccgcctattttccggaagcgttcgaaaaagccttggaataagttgttccttcccttggcccaaaattccttcaagaacttgcccttggccccggccttgttggccaccccgaaaccagttgttccggccggccaaaccatcttgttccccaaccccggccccgccggccgcccgaagccagccaagaaccccttccaccaccttcataagcccgcccccctcgccgccgggctcggtcccgccctcgaaccgccaggggtaccaagctggaatt

SEQ ID NO: 1786 - DNA, 399 bp, Zea mays
  Peptide Sequence Number=SeqID_8207
  Probeset Number=SeqID_16189
ggtgcccttgaggctcagttcctcggcaaccaccagactcaaattttgtaccttgagactgctttccgccagcttgctcagggcggtctctctgtggatgagtactgtcatcagatgaagacgatggtgaacactctccacaccctcagagcccccatcaccgatgagaacctcgtgctcaacctcctacactgcttgaaccctcgcttcgatcacgtcacgcccatccttacccgcatgagcaagaacaatctacttctcgaggagcttcgcctctctaccactgcgaccaccgctcctgccacgatgctctacagcgtgcctcaggctgccccctctgactccggggggattcttcttcaccgcacttcgaccccaccaccctttggagctctttag

SEQ ID NO: 1787 - DNA, 371 bp, Zea mays
  Peptide Sequence Number=SeqID_8208
  Probeset Number=SeqID_16190
atgcagctgcctgtcgacgagcggcaggaccacggccgggcaccgcggcgacggaacggcgggcaccaaagcgagacagggggcgcgcgcgcccacacagcggggccgggcacccactcgaatctgctctctcaccaagcggccctctgccacgaggactgtgaccgggccctcggggcccgccgggcgagccgccagccacccgccacgccactccggaagtggcccaacggcggcgacaccgctcacgcgccgcctggcgcagcgccggtccagaggagcgacacgcacggcgcgccggggaacgggccggccaccacggggggggggtgggcttggctcgcgcggccgcggccgggggcgggcgggcc

SEQ ID NO: 1788 - DNA, 240 bp, Zea mays
  Probeset Number=SeqID_16191
cgcgcatcgctggcgaaatcgctatttcccaccgtcggtgcgcctggtattaccgcgctgcgtctgggactgggcacgctcatcctgtgcgcgattttcaaaccctggcgcctgcgcttcagtgcaaagcagcgcaaaccgctgctgatgtatggactggcgctgggctgcatgaattacctgttctatctctcgatccgcaccgtgccgctgggcgtagcggtggggctggtgtttttt

SEQ ID NO: 1789 - DNA, 353 bp, Zea mays
  Peptide Sequence Number=SeqID_8209
  Probeset Number=SeqID_16192
caacgggtctggcttttgcgctggcctcggcgtctccgctggcgatgctggaacgcgtgctggagatgttcaatctgcgtctctactttagcgccctcgcctcggctgaagcgctgccttacagcaaaccgcatccgcaggtgtatctggatgctgcggcaaagctgggggttgatccgctcaactgcgtggcgctggaagactcgttcaacggcatgatcgccagcaaagccgcgcgtatgcgttccatcgtggtgcctgccgccgaacatcgccacgatgcgcgctgggcactggccaatatgcaactggaaaacctgacgcaactgcgggcggaacatctgtttaactga

SEQ ID NO: 1790 - DNA, 459 bp, Zea mays
  Peptide Sequence Number=SeqID_8210
  Probeset Number=SeqID_16193
gggtaccggggccccccctcgagtttttttttttttttttttttttttttttttttttttttttttttttttttttattttttttttatcttccgtttcttttcttctgtctccaccatgagcaaccgttgctttttgattgggggcatatcgacgacgacagactatcaaaccaaacactggggttcttcaatggtgcgacaagcctggcgaaccaaaaacacaaggagtgggtgtgtttttttttcacgcttttttattgtgcccctatcgggcacggcaagcatccttatgcactaaacggttgtccagctctcctacacgaaaaaaggggctttgcgggtgtcctgccacccgttctcgttgaacattccagctgcttctgagcacgctgggaaccggcctttaaaggttctcggcccctactggccaaaagggaaaagaccacctgggggaacc

SEQ ID NO: 1791 - DNA, 272 bp, Zea mays
  Probeset Number=SeqID_16194
gttgaaacgaacaagccctaaacgtgggcttacaagtattcctacttgtgctggtcctgctgataccctgagtctagggtattgaatgaacaattttctgaatgttgtgttttttacaaaatttatactcactccattccaaactgcagttcactctagctttgttctaaggctaactttgatcaagtttttaaaaaaatatgacaacatctacaagttctgccctattaagacataattcatggtaattgttttttctaaatgctggcaag

SEQ ID NO: 1792 - DNA, 555 bp, Zea mays
  Peptide Sequence Number=SeqID_8211
  Probeset Number=SeqID_16195
tccattccttgctgatgacatcaagatgatagccgcattctggagccccatgctaaaccaatcatttccctcgctgcttgcatcattcgaggacatggcgtttctcccccccggtcttccgcggaaccgtgccttgctctgcctttttgcctcatcttctcatcaaccaccggcgaccattaccgacggccgccacggcgccacccatcgccaacgaaatggaaatgcatggctgatggctcctcagctcggtctacgggatccattggacatgccaacgcgccggccctcccggtccacggacatgggcgctcgcacggcacttggcaaccttctggcatctacgtcgttggatcagtgcagttggacgacaaaagtccataagtgcccgttgcggcatgtggctgtggctggccggcagcgatcgagcaggcaggacgtcatacggttgcaccacccgttcccgcccgacggccgttccaccgcgtcgactggagctagatggccggcaacgtcaaaccgaatggacggggccccggctctggcctgccccac

SEQ ID NO: 1793 - DNA, 298 bp, Zea mays
  Probeset Number=SeqID_16196
gctagactgcgtggcgagcatatcgtttgggatagtcgacgattgacaacccagcaggtcgtggtccacgttggtttgaatatcggcccccatattggtgctgatccatccgctaaaccttgcataaatgtctactcatgcaatttctatgtacagtcatcaatcatggatgcggtgacataatccagtatgtcattgggctgccgtcacagcagatcacctggggctttgagcaccaatgcttatcaagccgtagttcaggggcgacagagagcctgttcagcatcaggacaggcaa

SEQ ID NO: 1794 - DNA, 355 bp, Zea mays
  Peptide Sequence Number=SeqID_8212
  Probeset Number=SeqID_16197
ctgtcagtacaattaacttatcgcagacccagatgacagccacagcaccttagctccccctaccttcgcaaatccaggaccactattcgagaccgtgaaagatttgcaggcagccgggtcaacaatcaggaagctgctgtccatcgactggtacagggagcatataccatcaagtaccacaagtccacaacggacaccaggaggtaactgttgctactcccgactccgggaaggacgccggccgcttcacggcggcatgggagcagtgcaaagctaataaggctcaggaagacgtcgttgcagcatgcaacgagtcagggatcagcgagatggacaaaaagtaaaagttcttcag

SEQ ID NO: 1795 - DNA, 318 bp, Zea mays
  Peptide Sequence Number=SeqID_8213
  Probeset Number=SeqID_16198
atgacggccgaaggccatatcatttttgccatcgccagtgcgatatttgccaaacgcgccgaactgacgccggtgatggccagtgccgactggtggcatctggtgccggctgcgctgctgacctgcctgctgccggatatcgatcaccctaaatcggtgctgggccagcggctaaagtggctgtcgcagccgatagcccgcgcttttggccatcgcggctttacccatagcctgctggcggtgacggtcagcctgtggctgtttcagattaacgtgccggccgactggttcctgccagcggatgtcctgcagagtcga

SEQ ID NO: 1796 - DNA, 927 bp, Zea mays
  Peptide Sequence Number=SeqID_8214
  Probeset Number=SeqID_16199
tgcagaccggcgatgaaaccctcgactacaaggtcgccgcggtcttctaccgggcctgcgccttgcgcatcgaggccggcggcgaccacggcttccagggcttcgcccgctggctgccggcgctgctggccttcgccggggtgccggcgggcctggaccccatggcccagcagaacgcctataccgcagaagccatcgaagtcctctccggcctcgatccggtgcgcaagcgcccgggcatgtacaccgacaccacgcggcccaaccacctggcccaggaagtcatcgacaactccgtggacgaggccctggccggccacgccaggagcgtgcaggtgatcctccacgaggacaactcgctggaagtgatcgacgacggccgcggcatgccggtggacatccaccccgaagagggcgtgccgggggtcgagctgatcctcaccaagctgcacgccggcggcaagttctccaacaagaactaccagttctccggcggcctgcacggcgtgggcatctcggtggtgaacgcgctttccacccaggtggaagtgcgcgtcaagcgtgacgccaacgaataccgcatgaccttcgccgacggcttcaaggccagcgacctggaggtcatcggcagcgtcggccggcgcaacaccggcaccaccgtgcgcatctggcccgatccgaagtatttcgactcgccgaagttctccgtcagccgcctcaagcacgtgctcaaggccaaggccgtgctctgcccggggctgctggtcactttcgaggacaagagcagcggcgagcgcgtcgaatggcactgcgaggatggcttgcgttcccacctggccgactcggtgtccgagctgccgcgccaaaggaagagcccttgtgcggcaccctggctggcagcaaggagacggtggactgggccctgct

SEQ ID NO: 1797 - DNA, 334 bp, Zea mays
  Peptide Sequence Number=SeqID_8215
  Probeset Number=SeqID_16200
gcgcgagaatctggcgcgggccgcgatcgagggcatgctctgcgggctcggagcgggtctcgacgccgtacgcgccgtgggcgtacgcgagaagaggctgctgctcatcggaggtgccgcgcagaacgaggcggtgcagcgcgttgcggcgcaggtgttcgatgctcccgtcgcggttcccacgcccggggagtacgtcgccgacggcgcggccgtgcaggcggcgtgggtgctgaccggttcacgcccgcaatggcacgtcgcgatcgtcgcagagcccgccgccgatcaccgtccggtgatccgcgagcagtacgcgcggttcgccggctga

SEQ ID NO: 1798 - DNA, 614 bp, Zea mays
  Peptide Sequence Number=SeqID_8216
  Probeset Number=SeqID_16201
tgcagtggaacaagctggcgtggattgtcagcgccctgtcggtggggatcggtttcggcttacaggagatcgtgaagaactttatctccggtctgatcctgctgaccgagcgtccggtgaaggtcggcgatctggtgagcatcagtggcatcgaaggggatattcgccgtattaacgtgcgtgcgactgagattcagctgggcgataaatccacggtgatcgtgccgaactcgcagctgatttcgcagaacgtgcgtaacgccaccatgggcaacgcgcagggcgtggtgacgattcagctgaccttcccgctggatatcgatccggtgcaggtgcgtgaactgttactggatgtgtaccgcgagaacgagcgtattctcgaaacgccggagccgtcggtttcgtttaaagatttgacgccggccggcattgtgctgagcgtgaccggcaacgtcgccagccagcgccagatttccggtgcgaaaagcgatctgctgtttgatatcctgacgcgcctgcgcaaagagggcatcgtgctgtctacgccgcagaccatgattatcgaacgccgcgcgctgccggcgacgcagaatgaaggtgaagcgttgccataa

SEQ ID NO: 1799 - DNA, 537 bp, Zea mays
  Peptide Sequence Number=SeqID_8217
  Probeset Number=SeqID_16202
cggcagcgcgcgcggcttcggtattgacctgcttaacgccctgagccagagcaccggcctgcgtttcacgccgcgctgggttaataatccgcagcaggccgccagtctgttgcagcagcagcaggtgatgctcaacctattacagccgctgtacggggacgatgctaaccgcaccgcgctgccggtgtggcgcgccatctggggcatttacacgctgtccgacaggcagccgatggactggtccgcgctgcacgctcagcgcgtcggcgtgctgcgtggcgatctggcgcagcgtctgcttccggctgagatcgcgccccagctgttcgacgatcgcgcccagctgtggcaggccctcaacactggccagattgatgcagtggtggataacgtgctgtcggcgcgctggcgcatggccagccatgagggcaaccgcgtgcatctcgcgtttgtggccagcgatatcgcctggccgctggcgccgcaggtgagcgctcagcagccgcagctgagcgccctgctcgaccatgcgctgca

SEQ ID NO: 1800 - DNA, 598 bp, Zea mays
  Peptide Sequence Number=SeqID_8218
  Probeset Number=SeqID_16203
ctggatatgcggagctagaaacactccatttgtcaggcctcagacgcgagtgtcacttcttcctgccaagccacagccacagccacagcagcaggccagcagcagcgaccagcgaggggtcagtagctatcttgcaagcaatccagctagggaagaggcaatggcgtccaagcaagtgctgctgctcctggccgccgtcgcgtgcctcgcgtcgctggcctccgccacgccgtggacggtcggggacgcaggcggctggagggccaagttcaacgagaccggctgggccaacggcaagacgttcgtggtcggcgacaccctgctgttcgtgtaccccaaggagaaccacacggtggtgaaggtcggcaaggacgccttcgcggcgtgcgacctgagcgccaacctacatgtgggcaacttggtcagcgcaacagacatcgaacagctggggcatcccggcatggagtggttgatgtgccacgagcctgatcaaagcctggtcggcatggatttggccttctatgtggttgaagcctccacctcaagggaggcaatggccacgattcctgcaagtaaacagctgtgcccctatgacgca

SEQ ID NO: 1801 - DNA, 512 bp, Zea mays
  Peptide Sequence Number=SeqID_8219
  Probeset Number=SeqID_16204
caggccgccatcgcccgcggggacattccgcgccgacctgtattatcggctgaatgtgctgccgatcgaggtgccgccactgcggcaacggctggaggacctgccggcgctgtgcgaggccatcctgggggaactgggcagccagtatgaactggaggccgaagcgcagcagctattggcgaggcatgcatggccggggaacattcgcgagctgttcaatgtgctggagcgggcaacgctgctggcagatcagccgcggctgggggtggaggatctgcgggcggcattggggccgttgagcccggtggcgggtgaacctatgcggcagacttaccgtgaggcgtgtgaggcatttgagcgcgagctgattgccggggcattggccgaacatgcgggaaatgtgccgcaggccgcgcaggcattggggttggggcggtcgaccttgtacaagaagatggtagcgctggggatttcgtctccaacctgagacttatgtttctgatttgagatcg

SEQ ID NO: 1802 - DNA, 348 bp, Zea mays
  Peptide Sequence Number=SeqID_8220
  Probeset Number=SeqID_16205
atcctctttagtcgactctgcagttttctacaggaagaatctgaatcctccatccggcccggcccggcccggcccgttggaggggaccgctggttgccgacagagccatatggacgacttgttggttacgctgttccacaacttggcacagcatccagagactggcactggcacatgtcggccgcaggcttgcggtgacgcttacagcaggacactgaagagatggcacggctggttggtgcaatctcagcttgccatgaacatgaagcttgcaccggacaggacgaacaagttcatggagatcatcagcgtggttcaggcgcatcaacgctgatattgacgagtaaa

SEQ ID NO: 1803 - DNA, 567 bp, Zea mays
  Peptide Sequence Number=SeqID_8221
  Probeset Number=SeqID_16206
atgggagccgtcgatgcgtgcaccgcagatgttccggcccgccggggccttcgatccgcttgccggacatgccgcgtgcacgcgggcgcgccgcgcctcacgcgcccgcgcggacgggccgccggcatgcgcgggaggtgcagcatgacgcgcgcgacacacgcaccgccctcgcagccctccacgtcttcgacgccgtcgaaacgcgcgaagcccgcgacggccgccccggaacccgacgacgacgcgcccgcgacgctcgacgcatgccgccgctgctcgctgtgggagcacgcgacgcagccggtgcccggtgcggggccgacgaacgcgcggatcatgctggtcggcgaacagccgggcgaccaggaggaccgcacgggcatcccgttcgtcggcgcggcggggcgcatgctcgatcgcgcgctggacgaagccgggatcgaccgcaagcacgtgtacctgaccaacgcggtcaagcacttcaaatgggagccgcgcggcaagaaccggctgcacaagacgcccgcgcagcgcgaggtcgccgcgtgccgctactggctgcag

SEQ ID NO: 1804 - DNA, 207 bp, Zea mays
  Peptide Sequence Number=SeqID_8222
  Probeset Number=SeqID_16207
ctaccgtccagctccagaggacctgtgccggcacctgctccagtgattgatactcaggccgaggataccgcttttcaccagtttgagactcagggcgcagcagtccctgacgatgatgatgatgatgatgatgatgatgatgatgatgatgacgacgactttggggtcccgcctccgcctccgacttctatgcctccacgcactcat

SEQ ID NO: 1805 - DNA, 321 bp, Zea mays
  Probeset Number=SeqID_16208
ctgcagagcctaggctcgttcgaggcggtggcggacaggcaggcaggcagccctccgttcggcttggcttgggcggctgccgcgggcgtcgtcgcgctcgtagccactgaggccggcggcggtggcaacgtggcagtgcggtgccgagacaccgttccatcaaggaggctggggcaccgaacagcgaacaacgaagaagagcagctgaacagaactgtccagaagcgtgcagaggaggatccgctcctgcgcccagggccgcggaccgtccggccgagggctgtggaccatacgcgcctccgcagagagcatcgccagata

SEQ ID NO: 1806 - DNA, 453 bp, Zea mays
  Peptide Sequence Number=SeqID_8223
  Probeset Number=SeqID_16209
tgcagggaatacaaattgaaagcctattggatgataaagatgaggaagccagtagctcaccaactagtcagtgtgcagaagttgaagagtacaggtcgttcctggacaaggccgcggtggagatggcggacgacaagaagcggcggcggctggcgagcgcgtggcgcctgtgcacggtgaagcaggtggaggagcacaagtgcgtgctgcggctgcagccggtgtgggcgagagacatcgtcttcgcggcggcgtacacgcagatgaccaccaccttcgtcctgcagggagacacgctggacccgcacgtgggaggcggattccgcgtgccggccgccgcgctttccgtcttcgacaccctcagcgtcatgttgtgggtgccgctctacgaccgcctcgtgagaaaagatggcgcgccgtgccacgggccaccgcgcggcttcacgcaggggg

SEQ ID NO: 1807 - DNA, 263 bp, Zea mays
  Peptide Sequence Number=SeqID_8224
  Probeset Number=SeqID_16210
tgacattggtcacggtcgtttggcgaagcgtggtgttctggcattaatgcctagcattaatgaattcccgtataccgagcgtgtcgtatctgaaattactgaatccaatggttcttcttctatggcttccgtctgtggtgcttctctggcactgatggatgcaggcgtgccgattaaagccgcagtgctggtatcgctataggtctggtgaaagaaggtgaaaactttgtggttctgtctgatattccgggtgatgaaaatca

SEQ ID NO: 1808 - DNA, 219 bp, Zea mays
  Peptide Sequence Number=SeqID_8225
  Probeset Number=SeqID_16211
accggttcagcgcccggcacgacgctcggaggaagccaaggccatgacggctgcgatgcaccatccggcgagccaggagccctcacggccacaccaccaaccacgaagcccctcaccattcaacacaaggaccagcgatggagattcagcaccagaaaacggcccatgaaggagaaaagaacaaagaacatctcaaagctgaactcagagggagattga

SEQ ID NO: 1809 - DNA, 519 bp, Zea mays
  Probeset Number=SeqID_16212
ccccgttggggggccggacccccaagcggtcggcaagatccaaccctttatggttcaggcccacgtggaacggcgcgtaatgttcggcccccgcgcggcagtggccgtggaccaaccccccccccttccgtggcgggccgtgcttgggtcggcggggtttgttccgggtccggcccgcccgtttccccagttgccggcccaggcccttctccaacggatggcccttattgggtttcgcgtccaaaagggcggcggcgcgctttgcctttactggcagcccggcgaactggtttccgtgtcggcgtggcggttcttacccccgggagttcccccccccccccgccacccaaaacccaccgttgattttcccccaggccgggttaactagggctaatgtgtccttcttctgccaaccaaaaaaatattttcccccgtcgtcgtttggaacggtctcctcgggctggttttaaaaaaaaaaaaaaaaaaaaaaaaaaaaaccccaaaagggggcctggtacc

SEQ ID NO: 1810 - DNA, 433 bp, Zea mays
  misc_feature (16)..(16): n is a, c, g, or t
  misc_feature (130)..(130): n is a, c, g, or t
  Peptide Sequence Number=SeqID_8226
  Probeset Number=SeqID_16213
cgccagctacaccgcntatggcgaacgccaggacgacaacggcatgcactgcctgctggcgttcaacggcgagcttcgcgaggaggccacgggctgttacctgctgggcagcggttaccgcgcctacacnccggaacacggcttcaacagccccgactcgatgccaccggaagaggtcgggatcaacccctacctgtatgccctgggcaacccggtcaagtggggggaccctaccgggcataaggcgcagccgctcgctgacagtggcgtggctgagtacgaagcatccccctcgatggtcgtatctcccctagcctgggtcggtatgggtgtgcaagctatcggcctgggtgcacaggtcgcgggaaaggtacttgaaaagaaagaccccaagctctccgacatactcaccgttaccggtgtggtgctcggg

SEQ ID NO: 1811 - DNA, 330 bp, Zea mays
  Peptide Sequence Number=SeqID_8227
  Probeset Number=SeqID_16214
tgcatgcctgcagcgcattacagaagataaaagcgcgctgctgacgacgttgaattatctggacgaaatgcgccgcaaaaccgagctgtcgctgggtaccaaagcgccttatcgtggtcacagtgatatcgcacgccgctggcacagcattcagcaacatacccagcgtctgcgcgacgccaatcagcacaatggcatgctgttgcagcatcagatgacctttaccgaacaggcactttcggtgctgaaaccgcatcagacccagtccttttacggcccggacggccgcggtttaggccagagcacgctgagccgcaaaggctaaacgca

SEQ ID NO: 1812 - DNA, 321 bp, Zea mays
  Peptide Sequence Number=SeqID_8228
  Probeset Number=SeqID_16215
gtttccccgtcaccgctttccgcccatgtgtctcgtggctggccgcccgctcttcggcccagctgttttttcctggcgctccccggctcccggtgctgtggtgggtgtgtgtccgcgcttctctctcgctggtcggccttggtgtcctcttcttggccctgtcgcggctgctcggcctgtgtttgttgcccctcgccgcccgcggtctgtctggccttccgcccccgctgtgtgtccccgcccgcgtggctcctgctgggttgtgtccgcggggagcccctgttccgtcctctcccgcctggcgctttctttgtcgtcggc

SEQ ID NO: 1813 - DNA, 273 bp, Zea mays
  Probeset Number=SeqID_16216
cgacacacatcctccaccacgtgctgggagcctactgcgaggctcgtcggcacgcccccgcgcgcgacgagttcaactcaaccccaaacctccacctagcaagattcactgcgctgcaggccactctggcccacaccaaggggatggacgacctgaactcactctggacatgcatggcgcaatgcgacaccacatcctacaacgttgtcatcgtcgagagcactgaggggggcgcgctcgcactcacggtgaagctgatccgcaagataacct

SEQ ID NO: 1814 - DNA, 217 bp, Zea mays
  Peptide Sequence Number=SeqID_8229
  Probeset Number=SeqID_16217
tggtagagtaccacgacacgatgagggccatcggtgactgcccgatatatgttagcgacaagccggggaaccacaactttgagctgctcaggaagcctatactccccgacagctctgtgccatgcgcgtagctctccgaccgacccacacatgaatgtctcttctccaacccggcgcgcgatgacatgagtcttctctaaatacctagcaaattcag

SEQ ID NO: 1815 - DNA, 231 bp, Zea mays
  Peptide Sequence Number=SeqID_8230
  Probeset Number=SeqID_16218
atggcgctggtgatgagcgtgacgacggtcctgctggtgagctttggccacgtctcttggctggtggcgatcgacgtcgcgctgtgggggctggcgtttggttcaatgccgactggctggtcaacctggctgtcgcgcgcggtgacggacgacaccgaatcgggcggcggtactgctggtggccactattcagctggcgattactgccggtgcggcagccggtggctggat

SEQ ID NO: 1816 - DNA, 688 bp, Zea mays
  Peptide Sequence Number=SeqID_8231
  Probeset Number=SeqID_16219
gtaccggcccctttctcggtttttttttttttttttttttttttttttttttttttttttttttttttttttttttttttttttttttttttaggattaaacattcaatatcacattacaacaataataagggtttgctttttgggaatccccaaatgacaaattgtttaaaaggggggcaatcatgcgggttgcattacagacgggtttttttataatcaaagacttaccccccaagttttattggtcctcagcataaacataatcaaagatttacctgccaagccctaccgtttttgggcagagcgatacaaaatagggggccagctaaaccagttgaaacttgcatggggtagtcgatgcaaattcatccaaaaaccgtgcttccagccaaggtcagaaaacagccaagctgccaagggcagtttttagttgacatgaccccaggctttgcatcaacaatatcgcgacatccaggggggaaaaagttgtaataacaaaaaactgcaagttgcaacatgggaccagtccaaacatgtaaggacacaaaaaggggggggctttttattcccccaatcccgggaaagggagggcggggcccaagaaggcgtcttcctcatttgggacagggggcccattttggggaggaaaaacgccaaaaatgctaggctttgtgggttccaaaggc

SEQ ID NO: 1817 - DNA, 221 bp, Zea mays
  Probeset Number=SeqID_16220
cggctccgggcccggcccccttcttcaccaaaactttccacttcgtggaggaccaccgcaccgaccacgtcttgtcgtggggggaggaccgcgcccccttcttggtgtgtgcgtccgactgagttccgcctgcaccttctccccagctacttggcgcaatcatcttctttaacttctgaaggcacttgtgcgcctactagatcgcattatttgcttacgac

SEQ ID NO: 1818 - DNA, 623 bp, Zea mays
  Peptide Sequence Number=SeqID_8232
  Probeset Number=SeqID_16221
tgcaggtcggcacgctgctcgccggggccgtgctgaccgagacgctcttttcttggcccggcatcggcaaatggctcatcgatgcgatcagccggcgcgattatcccgtcgtgcaaggcggcatcttgatgatcgccacgctcgtgatcgtcgtgaatctgtgcgtcgatctgctctacggggtgctcaacccccatattcaaaacgcggctccccaaagcgtcacgccgccaagcgggcgcgcactcgcgctgcgcgagttctggagcaacttctcgcgcaatcgcggcgccgtcgcggccggcgttatcgtgctcgtgctcgcgatcgtcgcgctgtttgcgccgctgatcgccccgcacagcccgatcgagcagtaccgcgattacgtgaagattccgccggcctggctcgacggcggcaactggaagttcgtgctgggcaccgacgaagccggccgcgacatcctgtctcgtctcatgttcggcgcgcgcatgtcgttcttgatcggttgcgtctcggtcgtgctcgccctgcttccgggcatcgtgctcgggctgtgcgcagcgttcttcggatgggccgatacgcccatcatgcgcagcatggacgtgctgctcgcg

SEQ ID NO: 1819 - DNA, 298 bp, Zea mays
  Peptide Sequence Number=SeqID_8233
  Probeset Number=SeqID_16222
gttgagcaagctgctccagcgcgccaactccaagcccggctcccgcgggtcgggcgccaccgatgatgagggccgcgccagccagagccagctgccgctcgataggttcctcaactgtccgtccagcctcgaggtcgaccggaggatctccctggggcctgggccacgacatgacgcgccgggcgatggcatttggtctttgttagttaagggaaggatgctagatagtgatccacaagataagagacaaccgcatgctcaagattttggagaggattttgatccgtcggatcggagc

SEQ ID NO: 1820 - DNA, 243 bp, Zea mays
  Probeset Number=SeqID_16223
cggccaggtgacttaaaaattttaaggaatttcaatcggtgtcgtcctcctggagcttaatactggtaaaaaacccggtcacgcattgaaacccatgggttaccaaaaccctggttaattgggtaaggccatggctcacccaggggcttaagcccgggacccccgggaagttggtgaccgcccggcttaccaagaactccaacgaagtcaaaatgtcccgtatgatcgaaccccctccaggtc

SEQ ID NO: 1821 - DNA, 268 bp, Zea mays
  misc_feature (202)..(202): n is a, c, g, or t
  Peptide Sequence Number=SeqID_8234
  Probeset Number=SeqID_16224
atacaggactcactcacgcgctctgctctgttagtagctacggaagagaattaggggatcggatcgctgccctccagcagctcgtctcgccattcggcaagaccgataccgcgtctgtgctcatggaggccattggctacatcaaattcctccaagaccaagtcgaggtaattaattaattaatcaccttgctaggattctntttttctctatctctcctgacatcagttctcatcacccttcccccacccccggcctgggcccttgc

SEQ ID NO: 1822 - DNA, 244 bp, Zea mays
  Peptide Sequence Number=SeqID_8235
  Probeset Number=SeqID_16225
cagggtcacggggggggccaggggggcaggccattcaatccacggccaggcgcaggccccggacggcattgtggtgaaaacgcgctccttggcccggcgagatggagttccaccacttccgcggggaaggcaaagggcgtgcctcctacgccaacgtgggcggcggggttctgtggatcgagctcctgaagcggagcctgaagcttgggctggctccaaggtcctgaaccgactacctctacct

SEQ ID NO: 1823 - DNA, 227 bp, Zea mays
  Peptide Sequence Number=SeqID_8236
  Probeset Number=SeqID_16226
tcagcccctcccctcatatagaggggctgtgaattccgggtgttctaatgaggggtccgggtccccgtgctgcagcaagggtttctcttcttcggcgctgccgttccagtggacccctccgatctggctccaggcagcttccactgcggtaaatgttaaaccgcccctcccacattcctcagtggttcgattttcgcgatgccgggtgtcgagcgtcgcgcttacct

SEQ ID NO: 1824 - DNA, 405 bp, Zea mays
  Probeset Number=SeqID_16227
ccgagcgtgatcaccgcgcacgacgtgcgaactgacgcggtggagcgcgcgtttggcgcccagacctccactcaaacttgctgcgctcatttcctgcgagttatggcgcaagaagtggacatggtgggaggctcggacgtcctaacgatgcatagcgactacaataaaagaaaaacacaaaaaggagacaagtggtaccagagccggtggatggcgaccagcatgccggctggagggcgctacgaccgctcggtcactccgccgcgatgtcaacgtcggggaagatcacgtccgtcgcgctggggaacgcgcggtgaccggggaggcggtttcgagcgcgtcatcgagagggtgacgccgtcgtggaactacccgacgttgacgaagacgaactacttcgactag

SEQ ID NO: 1825 - DNA, 241 bp, Zea mays
  Peptide Sequence Number=SeqID_8237
  Probeset Number=SeqID_16228
tgcagatcctgtgtgcatccgctccaggtacagcaaaagttcattatggtacctcgctgtccaacgttgactggctacacggggcgctgaatcgctgccgactctcaccaacctgtttatcgttttggggctgaggggagccctgaggaagctagaggaagagggcacatacaagagcatttctgaagcttctcaagacagtgtagaaaaaagttctatctagatgggttcatcatcagta

SEQ ID NO: 1826 - DNA, 841 bp, Zea mays
  Peptide Sequence Number=SeqID_8238
  Probeset Number=SeqID_16229
cgacctgcagccgggtgaccgggtggtggtgccgttcacatcagcttgcggctcgggcttggatgtgcgaccgcgggttgttcagccagtgcgagacgacgcaaaaccgtgactccggcaccggcgccagcctcttcggctacagcaagctctacggccaggtgcccggcggccaggcggagctgctgcgcgtcccgttcgccgacaccctgccgatcaaggtgccccacggaccggtcgacgaccgcttcctcttcctctccgacgtcctgcccacggcgtggcaggcggtggagtacgccgacgtcgaggacggcggcacgctcgccgtgatcggcgccggaccgatcggcgacatggccgcccgcatcgccatgcaccgcgggctgaaggtgatcgtcgtcgactccgtgcgcgagcggctcgcccgcgtgcacggccggggtgccgagacggtcgaccacaccgaggtcgatggcgtcggcgaccgcatccgcgagctcaccgacggtcgcggcgcggacgccgtgatcgacgcggtcgggatggaggcgcacggctcgcccgtcgccgagaccgcccagaaggcgctcgccctgctccccaagaaggtgcaggagaagatgatgctcaacgccggctccgaccggctcgccgcgctgatgagcgccatcgactccgtgcgccggggcggcacgatcagcatctccggcgtgtacggagcgcccaccgacccgctgccgatgttccagctgttcgacaagcaggtccagatccgcatgggccaggccaacgtccgccgctggagcgacgacatcccagacctgctgcaggcatgcaa

SEQ ID NO: 1827 - DNA, 362 bp, Zea mays
  Peptide Sequence Number=SeqID_8239
  Probeset Number=SeqID_16230
gggggttgtttggggatttggggatttgggcatttggttgcctgctgctgcgcggtgaggctgggcggcgctacgattggcggcctctgtggggttgccgggtgcgctcgtcctggccgccgagggcaagttcttcagcaacggctacgacctcgcgtgggcgcgcgcggggccggccccggcgctggggcaccgcctttccgcgagcgttccgcggcctcgtcgccgacctgctcgtgctccccgtgccaacggtcacggccgtcacgggccacgccgcgggcgccggctgcgcgctcgcgctggcgcacgacactgtcgccatgcgcgcctcccgcgggttcctcttcgtcgccgcacgg

SEQ ID NO: 1828 - DNA, 518 bp, Zea mays
  misc_feature (238)..(238): n is a, c, g, or t
  Probeset Number=SeqID_16231
ccgccgtgcggccgacgcggaagcagcgggctgcggatggcggcccgacctcgccgccctggtgggcgaggcggacgtggtcctgacggtcctgccggacgccgcgacgacggagtccgcgatgaccgaccgggtcctcgcggctgcccgcccggggaccacctgggtcgacctcgcgtccggcgacccggacacgacacggcggtcgaggagccgggcggaccggcacggcatcgcnccggtggccgctcccatgggtggttcacccgaggacgccgagcacggcaccctccggctcttcgtcgccggaccgagggacgcgtccgaacgggtccggtcggtcctgacggcgatcgccgacgacggaggtgtccgggaggtgagcgaggaccccgcggacgcgcagacggtgaagctgctcgtgaacgcgctgtggtgcgcggctgcgctcgccaccagcgaggcgctcctcgtcgcgcagcacgccggcctcgcacaggagcgtctgcaggcatgca

SEQ ID NO: 1829 - DNA, 398 bp, Zea mays
  Peptide Sequence Number=SeqID_8240
  Probeset Number=SeqID_16232
gtctgtggaccttcggaaccctggactttcgtaacagtgaccggggcacagattatggcggcaagactcaccagcggcgaaatagctctggtgaagtggtccatcacgctgggcaggtcgccatggtcacgtccatgtgcgggtcggcgtcgaggatggccggagttggctggaccttgtgcgcaggcgggggagctcgtcggcggttaggattccagcctaatcacggcgggatagctcaatccagtgagctggggagcttcatggcagctcggtctacatgcggtggcggcaggccaaagtccagcgaggttacgctcgcttctccggcgaggcagggtctcggctcaagcttgggaaagcttgacagcttctcggggaagcagtccaagggctag

SEQ ID NO: 1830 - DNA, 291 bp, Zea mays
  Probeset Number=SeqID_16233
cgttgccatcaacgacatgtctagcagtacaccgccgccaccaccgcctccagcttctgccaccaccagtgtagctgctttcccctatggcgtgttgggctatggtggcatagccccccttcccaccaccatcgcacactgccaccaccatcgttcccttcccatctgccacaacaccccttccatcatcgatctccaccttggtgccaccagcgtcaagcatgcccacaatgacatgctcccagaaactctaccactagatggttgcacctcacctatcatccccatatc

SEQ ID NO: 1831 - DNA, 343 bp, Zea mays
  misc_feature (306)..(306): n is a, c, g, or t
  Peptide Sequence Number=SeqID_8241
  Probeset Number=SeqID_16234
atgggccggaaccacccgggcgggaccattttaagcaagcggaagaaagccaggaaggggcgggctaaccattgggtaaggaaggggctggcggggacaaccggccaggatttcttggcaataaggttttacaaggctggtttcttggtcaagtacttggcttccggcaggcgggtggagggttggccggcgggcgcaatgaaaagggaccggtcgttgggaagttttttggccttcaacggcaaggcaatcggccaggaaatggtgtggttcaagaacaagatcccttggccggtggtgaagccnggtaatgggtttaaggccggtggacctgaaggctttg

SEQ ID NO: 1832 - DNA, 221 bp, Zea mays
  Probeset Number=SeqID_16235
cccctgcaagaaggaaggccagactaggaagggcaggcaagggtgtttaggcgggtacgacgtggaggagaaggcggcgagagcctacgacctggcggcgctcaagtactggggcccttccacgcacatcaacttcccgctgagcttatatactgtgcttgtactactatataataatggttataaaaaaacatgtctgcatgtgtgcctgcgtgcagggg

SEQ ID NO: 1833 - DNA, 797 bp, Zea mays
  Peptide Sequence Number=SeqID_8242
  Probeset Number=SeqID_16236
atgagcgcggtgtacgtgtcgcacgatctggcggtggtcgcgcagatggccgaccggatcgtcgtgctgagcgacggtgtgatccgcgagaccggcgacaccgaacagatcctgcatgcgccggcgcatccgtacacgcagagcctgatcgcggcggtcacgccgaacggtgtgcaacgcgacgagaaaccggcgccggccgaaccggcgccgctactcgacgtgcgcggcgcggtcgccggctacggcggccggaccgcgaagggccggcccgcgaagctgatcctgcacgaagtcgacctgcgcatcgcgcgcggacagacggtcggcgtgatcggcgaatcgggctccggcaagacgacgctcgcgaaggtgatcgcgggcctcgtgccggcgacggccgggcagatcctgttcgacggcgaaccgctcgcgctcgatatcggcaagcgcacgaaggaacagcaccgccgcgtgcagatcgtgttccagaacgccgacacggcgctcaacccggtgcataccgtcgagcgcacgctcgcgcggccgctcgcgttctatcacgggatcaagggcgcgcgtgcgcggcagcgcgtcgcggagctgctcgaactcgtgcggctgccgcaggcggtcgccgcgcggcgcaccggcgaattgtccggcgggcagaagcagcgcgtgaacctcgcgcgcgcactcgcggccgagcccgacctgatcctgtgcgacgaggtcacgtcggcactcgacaccgtggtcggcgccgcgatcatggatctgctgcgcgacctgca

SEQ ID NO: 1834 - DNA, 390 bp, Zea mays
  Peptide Sequence Number=SeqID_8243
  Probeset Number=SeqID_16237
atgtccccgcatcacgcgacgcggccgtgcggcatgcggcgctgcgccgcggacaggagctatctctccgcctggctcgccgcatcgaatcgtccgccgctgctttttgggagaaagggctttgagaacgggcaaggctttgagctggccgctccccgcggggaagccggcgccagccagccagccagccagccagccatccagcctccacccccgccggcggggagcccaattatggtcaataaaccatacacgccccggccgaggtaggcaggcaggcaggcgggtatcggccaaatcctctcgcaggactccttcaagggggttaattccccgccgggcggggcggggcggggcggggcggggcggccgagatgcggcgcggagggg

SEQ ID NO: 1835 - DNA, 228 bp, Zea mays
  Probeset Number=SeqID_16238
ctggctatttacttgtagctaatagggacagatggcctgggctgatctttattaggcttgttattcatgttcttctattttcccaggattcatctgctttagctcaattgggatggccagatatgcggataccaatcttatacaccttatcatggccagatagaatctatcgccctagctcaatttgttaaatctgtctagatatttgcaagcatgacatcttcacaa

SEQ ID NO: 1836 - DNA, 411 bp, Zea mays
  Peptide Sequence Number=SeqID_8244
  Probeset Number=SeqID_16239
ttgatcctaattctgctactgttagcagggatggcttagcaaagcaaatatattctcagctatttgactggctcgtaaacagactaaatgcctccataggacacgatacatcctctgaccgattgattggagtacttgatatctatggtttcgaaagttttaagactaatagctttgaacaattatgcatcaatttcaccaatgaaaaacttcaacagcattttaatcagaatgtcttcaaaatggagcaggaagagtataacagggagcagattgactggagctacatagaatttgttgacaaccaagatgttctagacttgattgagaagaagcctggtggaattattgcacttcttgatgaagcttggtgagtttgaacttcttctgttgcatgaaatttaaaaggca

SEQ ID NO: 1837 - DNA, 587 bp, Zea mays
  Peptide Sequence Number=SeqID_8245
  Probeset Number=SeqID_16240
atgccgcacggtagacaatcgttaaacagcgttctggcagggttccgtccagcttccaatccataggagaagaacaatggatgtcctccttgggaaggcaggttgttggcatacatccgcgacggaaccgtcattagagatctccagtgctgctgccagtacaatacggctcctactaagtttggcgcagcataacagtgggcttggcaatcgaaccgccacctgtaaagccggtggtcatgcccagccggacgccgtccgggcaagtgacggtggactcctcggaccgcatcgaacacctcaggcgcgtgcgcggtaacgagacatccaagtccacagacccaaaatctccccgcttgaacattgaaaatccataggggaatggtctggtgggagaaaaactaggaaagagaacggaccacgaacccacctaggtcaggagatttgaagggaccggacgaacgttgttccggctcgtggaaatcccagatcaactgctgctggtggcaactttgtgccatcagttgttttcgtcttctcctctattgtatcatgttcgtgttacttcggtgtcaggccataggcag

SEQ ID NO: 1838 - DNA, 364 bp, Zea mays
  Peptide Sequence Number=SeqID_8246
  Probeset Number=SeqID_16241
tcaatctgtccagccagggtggtccgcggcgtagggcgcgtaggccttcgcgcggcgcggggcaggccgacacggcgccgggcaggcgggcacggggcacgtgagttcgcacccgcatgcttggttcgttttctcctcggccccgaccggggcctggaccagagcccccagcagacccatcgccgcgccggatctggtggcggccgcccggacggcacggcggacgtcgtccatttccgatgcatgatcctcgctggtgttcgtgagtactgctccttgatcgatcgagtgcgtgtcagctctgtctggtgtggcgtcgtccaatacgtgcacgcgtgctcttatcccctgtgtatcgcagggg

SEQ ID NO: 1839 - DNA, 702 bp, Zea mays
  Probeset Number=SeqID_16242
ctaaaagctgcgcgtgttcagcaaacacaccctgctctgcaccaggcgccggaacagcagctcgagcccgtcctccagctgccgggtcgtgtcgaccagtgctctgagatctcgctgcgcgctcagcgccgcctcgccgtcgtgcgaataatccttggacgacaaggaggcggcggtcatcacgtcaccggcggcggcggcgtcctcgcacgccacccgggcgctcttccggaacgccgtggcgacgcgcgcggaccaaatgctcgccgccgacgaccgacgcgccgcgccgccgaccgcgggcacacgccgagacatcgccaccacgacgcgctccagaacggcgacggtgagccgccgcgcctcctgcagcgcgtggccgccgtccagcttctcggacagccttgagccggcgcggcggcgctgcctcctggcgtccgcgcacgccctcttcgccaggcgcgcgtacgcgcgcgcggcgctggcggccgccgcgctgtccccgcgccgcgcggccgtctcggcggcgaccgcgcgcgcgcgcatgccgcccagcgcgtcccgcgccgcggcgcacgcgtccagcagcgccacggacgcctccagctcgtcctccacctggcccgcgcgggcggccgactgcgcgagagactccgcgtgctcgtcgtacacgcgcgccacgtactccaggtcgccggccat

SEQ ID NO: 1840 - DNA, 666 bp, Zea mays
  Peptide Sequence Number=SeqID_8247
  Probeset Number=SeqID_16243
caggcccggcgcgggagaggtcagcatgggttcgggaacggccagtaggagaagttatcgcggcctgtttaatgagaaacagtatctttcatatgggcggagactttcaacgtcgacgcacatttgccacactgcccattcgctcactctggcaaggtcgtaccccatggctgcccgtctgcaccgctacgcccgcctgttcctggtcctgctgctggcctgcggcccgggggcctgtgcgctgttccaggcacgcgacccggtcaatatcagcgtgatcggtatcgaaccgctgcccgggcaggagctggaactgcgcatggcggtgaagatgcgggtacaaaaccccaacgaggcgccgatcgactacaacggcatcgccctgaacctggaggtgaacggccagccgctggctgccggggtcagcgaccagcaggggcacatcggccgttatggcgaagcggtggtcgtggtgccggtgagcatcacggcgttttccttcctgcgccaggcctatgggctgggccgggtggactcgttgcagggcctgccctatgtgctgcgcggcaaacttgccggcgggctgctgggcaccgtgcgctttaccgacgagggcaagctggacctgcccaagggcgcctactggtaggcgcccggcggggtgtg

SEQ ID NO: 1841 - DNA, 806 bp, Zea mays
  Peptide Sequence Number=SeqID_8248
  Probeset Number=SeqID_16244
tgcatgcctgcagggcgtcgatcccgaccggccgccgtgcgcgtgcagaaccgcgtgagccaggcgctgtcgcgtctgcccgacgaggtgcgccagtacggcgtgaccacgcagaagcagtcgccgacgccgctgatgtacgtgagcctctattcgccggacaacagccgcgattcgctgtacctgcgcaactacctgacgctgaacgtgaaggacgagctgtcgcgtctgaccgggatcggcgacgtcggcgtgtacggctccggcgactatgcgatgcggctctggctcgacccgaaccggctcgcgtcgcgcgggctgaccgcgagcgacgtgatcgccgcggtgcgcgagcagaacgtgcaggtgtcggccggccagctgggcgcggagccgacaccgaagaagaacgatttcctcgtgtcgatcaacgtgcgcggccggctgcgcacggtgcaggaattcggcgacatcgtgctgcgcaacggcgacgacggccaggtcgtgaagctgtccgacgtcgcgcgtatcgagctcggcgcgggcgactacacgctgcgctcgtacttcaacgacaagcattcggccgtggtcggcatcttcctgtcgccgggtgcgaacgcgctcgacgtcgcgaaggccgtctacgcgaagctcgacgaactgtcgaagcgcttcccgcccggcgtcgcgtatcgcccggtgtgggacccgaccgtgttcgtgcgcgaatcgatccgcgcggtgcagcacacgctgatcgaggccgtcgtgctggtcgtgctcgtcgtgatcctgttcctgca

SEQ ID NO: 1842 - DNA, 615 bp, Zea mays
  Peptide Sequence Number=SeqID_8249
  Probeset Number=SeqID_16245
aggctgacggagaaattggcggctgcggaggccgaggagaatctcaggcgtcaattggcggcggagaggaaggacgcgaaccgagcctgtgctgaggcacaggctgcacaagccaaggctaaacttgcgcgtgtggaggccaatctcgcccgccaaagcgccgaggagaaggaaacaagcctctgcgacctactcaaccgcctggacaaagtggaggcgtcgacgcgcacggaggtcgagcggacgcatgcgcagctcgtggacgcgtaccgggagctgggtgcgcggaccgccgctttcgaagtgttcggccaagaggtgggcctccgcttcctcgagtggctacaggaggagttgggggtgctcccgaccatcgtgacgggcctcatgtcctttgcctccctcgttacctgcgagggggccgtgaatgctttgtcccgcgaggggtgcgggcatttcgaggtcgtcgaccagtcggacgaaggcttcgaacgcaaaatcttcaaggtcgaggaccctgtgttgaagcagtcagcgggggctctcttcgatagaatgtggggcccgtacggccgagaaacggtccgggagcagtccgaccgggaaatagattag

SEQ ID NO: 1843 - DNA, 241 bp, Zea mays
  misc_feature (179)..(179): n is a, c, g, or t
  Probeset Number=SeqID_16246
atgacactcgtcgccggggtcgattcatcgacgcagagctgcaagatcgtgatccgggacgccgacacgggcgagctcgtgcgcagtgggcgggcctcgcatccgctcggcacagaggtggatcccgatgcgtggtggcaggcactcctgaccgcgatcgccgacgccggcggtctggncgacgtcgcggcgatcgctgtcgccggccagcagcacggcatggtcgtgctcgattccgacg

SEQ ID NO: 1844 - DNA, 236 bp, Zea mays
  Peptide Sequence Number=SeqID_8250
  Probeset Number=SeqID_16247
atgggcaatctgccgaatccggtcgcgctgatcgcggtaattgccgcgctaggcatcgcgccgttcgcggcgctgatggtgacgagctatacgaagctcgtggtcgtgctcggcctgttgcgctccgcgctcgggatccagcaggtgccgccgaacctcgtgctgaacggcatcgcgctgatcctgtcgctgttcatcatggcgccggtcgggatgtcgatccgcgacgcgctgca

SEQ ID NO: 1845 - DNA, 1238 bp, Zea mays
  misc_feature (462)..(462): n is a, c, g, or t
  Peptide Sequence Number=SeqID_8251
  Probeset Number=SeqID_16248
ccccgcgtccgcccacgcgtccgctggtcgggggtggtcaagtgtgtagccgagagagcgccatggccagcctccaagtcactcctacttcggcgttcactcagtggaatgagctgaagttcgaaggcctgtacttgttccacaagtaccagggctcaggcgccaaccaaactcagggggggggcgacaaggcgccgattggcatcggtgccaccgtagttaacaactggacagtgtgtgacgggccagggccgaacgcaaagctcgttgcccgtgcacagggcttgcatatccaagccggcaactgggtcaactccttcagcctagtgttcgtggatcaaaggttcagtgggtccacgcttgaagtgaccgggatagtagttgaatccggggagtgggctattgttgggggcaccggtcagtttgccatggcaaacggtgtcatctccaagaagttacatngggaagaccagcgaaggggacatcatacaactcaccatccatgctttctcgccggtgctcggaccgacaaagcgctcggccacaaaagttggaccgtggggtgggagcggcgggtctccgatggacatcacggcagagccccagcgtctgaagagcatccccgttgctactgggatccccgtgacctcgattgccttttcttacgtggactccgccggccaaacccaaatttgttgtttttgggggggttccggtggaaaaattaaacccggtgatccagctgggggactccaaagtgctcccggaactgtccgggacgattggcaacgtttacggcccccccgtcataacctccatcaagtttgtcccaagcctcaaaaccttcggcccttttggagcatggggggacgggagtgaccctccgtttgcgatcccccggacaacaaaggagggccatcgttgggttttttgcccgaactggggttttcctccacgcccttggggtttacgggcgatccctgtgatgagactttccccaaaggggcagctaactgctttgctagctcccccggctttttttgggtccccccccgttttttttcctactgctacctgttgggttttgaaaaatttcgataaaaaaaggacccccccaaaaattggcccttgaatcgatcccttaagggggggggggggggggggggggggggggggggggggggggggggggggggggggggggcgcggggggggcgcccgggggccgcccgggtacc

SEQ ID NO: 1846 - DNA, 294 bp, Zea mays
  Peptide Sequence Number=SeqID_8252
  Probeset Number=SeqID_16249
tgcatgcctgcaggcttgcctgtctgttatactactttgctgttgaagctctttggtatgcaacatgataacggtggttgattttgattccaggtgacatatgatacagctgggttcctggagaagaacagagacccattgcactctgagtcaatccaactactctcatcatgtacatgtgaactttcaaaacattttgcctctgtcatggttgctgattctcagaataaatcaagtctgtcatggcattcagtaaaggatacacataaacaaagtgttgtcatggaatttaag

SEQ ID NO: 1847 - DNA, 724 bp, Zea mays
  Peptide Sequence Number=SeqID_8253
  Probeset Number=SeqID_16250
tgcaggcggaaaccccgctggccgatggccgcagctttgtgcgcgtcgatcacgtacaggtgtttgccggaacattttccaccactgatggcagtcacagtgaacagttcggcagctgtaacgatgccaacgccgggggctgccggcgcgatttcacccagcgggacgaaggcaccgcgctgggcgtcggctggcacaacgatcgctggtcagccgatatcggcaccacgccgctcggtttcaccgtcactaactgggtcggcggcgtaagctggaagaccgacatcgacgatctcggggtgacctttactgcttcacgtcgcccgatctccagttcgctgctggcttacgccggcgcgcgcgatccggccactaacggcggcaaaaactggggcggcgtcgtcgcgactggcggcggcatcggcctgagttacgatcggggcggcgcgcacgggatgtgggccgatctcagcgcccatcaaatcagcggtgaaaacgtggcggataacagccgcgaacggctgatggcaggctattactacaagctgatcaatagcgacaaccagcgcgccaccatcggcctgaacagtatgctgtggcactatcagaaagatttgagcgactacacctttggccagagcggctattacagcccgcagcgctacttctcgctggcggtgcccgctgacccggcgtcagcgcaccggaaaactggtccgtatga

SEQ ID NO: 1848 - DNA, 215 bp, Zea mays
  Peptide Sequence Number=SeqID_8254
  Probeset Number=SeqID_16251
ttctatcctttctccatcgatgggctgggtgtcagccgaggcccgttagcgtgctgctctggctctgtgactttgttcgcttcttccgccgcgtccttcgaggagttggatgttcgctcgctcgcggtaccggcgtccggtctcttacttctggcggtggctagttctaggcatctgggcggcctggtgtgtgtcacagcccagtcctgtttccg

SEQ ID NO: 1849 - DNA, 293 bp, Zea mays
  Probeset Number=SeqID_16252
tgcagcgcagtgtcacacgtgaactgctgtcgcatggcctggtgccgggtgtggtgcaggtgccgccgaacggccagccgattgtgctgatggccgatgcgcaaaccaccggcggctatccgcgtattgcctgcgtcatcgaagccgatctctatcagctggcgcagattcgtctgggagaaccgattcacttcatccgctgcacgctggaggaggcgctgctggccaaacagcagcagcaacgttcgcttgatcagatagcctgggggcttgctcatgaagatcgatcttaa

SEQ ID NO: 1850 - DNA, 818 bp, Zea mays
  Peptide Sequence Number=SeqID_8268
  Probeset Number=SeqID_16253
ttccgctacctgacgcagtttggtgccggcctgttagagctggactatctgccgtctgacaatcagtacaacaaagataaagccgcgcgaccgtcggtgcagaacgacagcaacgacgaccgctggctgttctactggcgtcactccggcgtctacgatcagcactggcgcttcaacgcggactacaccaaagtcagcgatccttattacttcaacgatcttgattcgaagtactacagctcgactgacggctacgccacgcagaaattcagcgtaggctacgctgataccaactgggatgcgacgctgtccagcaaagacttccaggtgtttggtaataccagcagccagaacgtgtaccgggcgatgccgcagctggatgtcaatctgtaccagaacgatatcgggccgtttgacggtcgcatctatgcgcaggcggtgaagttcactaacgtcagtaaccgaatgccggaagcgacgcgtttgcacatcgagccaacgctcaacctgccgctgtccaacggctgggccagcctggataccgaggcaaagctgctggcgacgcattaccagcaggataacgttaactactacaacgaaaatatcgataccacccgcaccaatcagctgaaagagtcggtcaaccgtaccctgccgcagttcaaggtagatggtcgcctggtatttgaccgcaatatggactgggccgaaggctacacccagacgctggaaccgcgcgtgcagaaaataataaataaccgtaccgcaaccagagcaacatctatccgtacgactccacgcgtggtgcgggtcgacta

SEQ ID NO: 1851 - DNA, 1065 bp, Zea mays
  misc_feature (1)..(45): n is a, c, g, or t
  misc_feature (582)..(582): n is a, c, g, or t
  misc_feature (666)..(1065): n is a, c, g, or t
  Peptide Sequence Number=SeqID_8269
  Probeset Number=SeqID_16254
nnnnnnnnnnnnnnnnnnnnnnnnnnnnnnnnnnnnnnnnnnnnncgtgagggggtcggcgatgttcttctcgggtgacccgtcggcgcggcggcgggtcgacctcggcggccggagcagcaaggagcgggaccgcaaggtgctgctcgagcagacgcgcgaggagcggcgtcggcgccagggcctccgactacagaacacctccgccacgaagatccagagggaagaaggctttggaattggcacgctcagaggttcggaagaatttttgctcaacttttggggagcattgcgagcggatagagtggaacaacttcggaactaattctgactttcttcgtcaattactgtttttctttaatgcaaatgaagacaatgacatagctatactttgtcaaatctgcaacttgctgctgcaatatgttaaacaaggcggagatgttgtaactctctttactggtgtgaatggctcctcactgcaacctctcgttgctcacagagtaaaaaaaattactctcatctgtgtgcaagcagtctatcaaaagaggcatgattggggcagccaacttttgacaaccctgnaacacatcagtgccttctgtctcatcccggggcactgtaggttgcgggttaatccaaaattactaggactgcaagtagtaggtnnnnnnnnnnnnnnnnnnnnnnnnnnnnnnnnnnnnnnnnnnnnnnnnnnnnnnnnnnnnnnnnnnnnnnnnnnnnnnnnnnnnnnnnnnnnnnnnnnnnnnnnnnnnnnnnnnnnnnnnnnnnnnnnnnnnnnnnnnnnnnnnnnnnnnnnnnnnnnnnnnnnnnnnnnnnnnnnnnnnnnnnnnnnnnnnnnnnnnnnnnnnnnnnnnnnnnnnnnnnnnnnnnnnnnnnnnnnnnnnnnnnnnnnnnnnnnnnnnnnnnnnnnnnnnnnnnnnnnnnnnnnnnnnnnnnnnnnnnnnnnnnnnnnnnnnnnnnnnnnnnnnnnnnnnnnnnnnnnnnnnnnnnnnnnnnnnnnnnnnnnnnnnnnnnnnnnnnnnnnnnnnnnnnnnnnnnnnnnnn

SEQ ID NO: 1852 - DNA, 420 bp, Zea mays
  Peptide Sequence Number=SeqID_8270
  Probeset Number=SeqID_16255
taaaatgatcagattcaatgcaggaattccatgtctatatcatcatatgtagctttgaatatgcctatcaggattgcaaaaaatataaattgggagatcccagatcatttcactatctcaaccagtccaactgtattgcgcttgatgggctggatgactccaaagaatacacggaaaccagaagagctatgggtattgtgggtatgagtactgacgaacaggatgcaatatttagagttgtggctgctattcttcatctgggtaacatagaatttgcagaaggaagcgaagacgattcttcagtacccaaagacgagaaatcccaatttcatcttaagacagcagctgagcttttcatgtgtgatgaaaaaggtctcgaagaatctatgtgcaagcgtgtaatggcaacacgtggggaga

SEQ ID NO: 1853 - DNA, 880 bp, Zea mays
  Peptide Sequence Number=SeqID_8271
  Probeset Number=SeqID_16256
ctgagtgggaggttgaagaatattcttgcaggtttgcgtgctgatggggaggatggaaggcaggtcgaggcgttaacacaactctgtgagatgctgtccattggcacagaagagtctcttggggcattctcggtggactcatttgtacctgtcctggtcggtctgctcaatcatgagagcaacccagacatcatgttgctcgcagcacgagccctaactcacctctgtgatgtgctgccgtcttcttgttctgcagttgtgcattatggtgctgtgccttgcttttgtgcccggcttctcaccattgaatacatggacttggcggagcagtcattgcaagctcttaaaaaaatatccctggagcatccaactgcgtgcttgcgagctggtgcactaatggcagtcctatcataccttgactttttctccacaggtgttcagagagttgcattatctacagctgctaatatgtgtaggaaacttccttctgatgcatcagattttgtaatggaagcggttccacttcttactaatctactgaactaccatgattcaaaagtactggagcatgcttctgtctgccttacccgtattgcggaatctttttcaccatttccagaaaaattggatgagttgtgcagtcatggattggttgcacaagctgctagcttagtgtctgttagcaactcagcaggacaggcatccttgagtacatcaacatatacgggtgtgattcgtcttctctcaatatgcgcaagtggatcacctctggcagctaaaacacttctccttcttggaattagtggcatacttaaagatatcctttcaggctctgggttggttgctggcacgactgtgtcccctgctttaacaagaccag

SEQ ID NO: 1854 - DNA, 204 bp, Zea mays
  Peptide Sequence Number=SeqID_8272
  Probeset Number=SeqID_16257
cgactgccgcccaggctgccgcagcagcgccggcctccgacgctgagctgcttcctttcttggaaatcggtcccaaatgcttctctcctggcgcacccttcccaacgctccacatgaaaagattcttccccggtacatcgccaataccggatggcacatccaccgccagatgctggccatcctgctacaacactgggctaccaa

SEQ ID NO: 1855 - DNA, 363 bp, Zea mays
  Probeset Number=SeqID_16258
cagtcgcctctggccgcagcagcacaaacgcgtagctcccgccccaccccactgcctctcgccatcggtctcgctgtcggcgcctgcttctaccaggtgtgcgcccttctcgaactcccaccaaccccctgtcctgctcgtcccaccaccatccataggttgttggactatcggcggccagaggtggagtcccttgttgagctcttcgtccgccgaggcgccagtgaatctatagagtggcgcatgccgcagaaccaccacgtagactcctcgtttcatcttgttcgctcatgtcgccaaccacaattctctggcgtcgtgcgtcgtaagcttgttggtgaaggggatctatgagctctgggg

SEQ ID NO: 1856 - DNA, 410 bp, Zea mays
  Peptide Sequence Number=SeqID_8273
  Probeset Number=SeqID_16259
tgcagcgccctcccctaaatggccctctagtcggcggccctcttctctctctccctcaatttagcgtttcactgttcactccctacaatctcatgactgtgatttggttgttgcagaaggtgaaggacccgcagctgcggagcatgctgctggacgaggcggcgctgacggagggcgacatcgaggcgatggcgtcgcggttcctggcgcaggtggcggacggcacctggcgcggccgcgggtggccagaggtgtggacggactacgccgtctccaagctggccctcaacgcctactcccgcctgctggcctccaggctagccggccgcggggtcagcgtcaactgcttctgccccggcttcacgcgcacccacatgacgcggggcctcggcaaccgcaccgccgacgag

SEQ ID NO: 1857 - DNA, 580 bp, Zea mays
  Peptide Sequence Number=SeqID_8274
  Probeset Number=SeqID_16260
atgaaaactcgtgtgccgcaccttgcgcaatggggcgcgtttaccgccgtcaccgaaaatcagcgcctgattgcctgcgaacctttcttcgccgatgccgatccttccccgatgatccacactctccctgaactggtgtactcggataaacgcatccgtcagccgatggtgcgccgttcgtggctgaagtcgcgtgaaaacagcgatcgcacgctgcgcggccgggaagattttgtcgccgtggactgggacaccgcgctcgatctggtggcggaagagaaccgccgggtgcgcgaccgctacggcgcttccgggattttcaacggttcgtacggctggtcatcagccggtcgcgttaaccacgcgcgcacgctgattcgtcgcttctatttccagggcggcggtggcgttgatcagcagggtaactacagctggggcgcggcacagttctttctgccgtacgtgattggcacttatatgccgctcaccggccgcgtcaccgactggccgcaggtggtggagcaaacagaaattttcgtcgcctttggcggcctggcgctgaaaaatgcgcaggtggcct

SEQ ID NO: 1858 - DNA, 474 bp, Zea mays
  Peptide Sequence Number=SeqID_8275
  Probeset Number=SeqID_16261
cttacgcgcgcattaatgtccggagaatctatgaacaagcctgccgctaccgcgctctttcatccgcgtaaccgccatcagggccgttatgattttgctgccctgactgccgcgcatccgccgctggcggacaaagtgcgccccaacggttacggtgagttgtcggttgatttcgccgatccgcacgcggtactgctgctgaatcaggcgttgctgaaactgttttataacctgaactggcagctgccggaaggctatctgacgccgccggtaccaggccgcgctgactatatccatgcgctggcggatctgctggccagcgataacggtggcgtgctgccgcgcgatctcgacgtgatggatattggctgcggcgccaactgcatctatccgctgatcggtcacgcggagtatggctggcgctttaccggcaccgacatcagcgcggacgccgttaacgccgccagtcagatt

SEQ ID NO: 1859 - DNA, 345 bp, Zea mays
  Peptide Sequence Number=SeqID_8276
  Probeset Number=SeqID_16262
cagcggaggcacgaggcagacgttatagtggaggaggcgttgtctaaccaacaatatataaactgagagatgagagcaattctgattgactggctaattgaggtacaaagggcatggaccgtacaaatagttctgatctgaaacagcacgttttaatattttttgttggtctcttttcctggttcactacaactggttggagtgacagccatgcttctggcttgcttgcaaatatgaggtctctgttccggtcggttgaggaccttgtactgatttttgactgtgcctacacaaaagggcaaattctagaaatgtggaagctattgtgaaataaaatggaacata

SEQ ID NO: 1860 - DNA, 254 bp, Zea mays
  Peptide Sequence Number=SeqID_8277
  Probeset Number=SeqID_16263
tgtcgggcgtgctgcccgagcacgaattgcgcgcgcggctcgcgcaggccgacgcggccgtcgtgatgaagctcgcccgcaacttcgacaaggtgcggcgcgtgctcgacgagctcgggctcgcgaagcgcgcgctgtacgtcgaacgcgcgacgatggcgacgcagcgcatcgtgccgctcgacgaagtcgatccgatggcgtcgccgtatttctcgctgctcgtcgtgccgggggaaaaatggcaaggatga

SEQ ID NO: 1861 - DNA, 1367 bp, Zea mays
  Peptide Sequence Number=SeqID_8278
  Probeset Number=SeqID_16264
tggcacggcgatcccctgaaggcgagccagggaattgatggggacttgtgcggccctcgggggatttatgtcttttttcgagctccgggagtcttcggcgcgaatgctgaagtgatggacaaggatcgtcaagatgcggtacggaagcgccgggcgttcactagggtcggggaccctagtcgcgaggtgaagagggcacggggaggcgcgaacaagtcttcagagggtgctagggctgtcgcttccggtgcgggcaagccgccctcggctgatcccacgaaggagcgaaggccactgtcgcctgtgcgcaccgatgaagcggcagcgggtggtgccgacttcgagatggacatcagcgtggatgattaccgcataggtggtgtcatgatgtttgatgcgcacacgggccggggactcgttgggtcggatgctgggcagttggttgttgtcccggctccggtggcggccacttcgtctacagcggcagttggagcgaagggtacttcgccggacccatggtccaaattttgcgccagcggtgagatttcatcgctcgccgccaccaaagacgtggcgggctctgcagccgccttcaccgaccatgttgcatcgggcgccctgactttggagttcgctgccgagaggcaacgacttgagggcaggatcgagcgcctccgagcgagtcgtaacctgctggagaagctgacggcggcggaggcagagaaagaggacctcagtcgttggcttgcggaggagagggagggcgtggataaagcatgcgccgaggccagccattccctcaagcgcgccaccgacgcggagtcggggctgaagagcttgcgtggctacgttgacaagacgaaggcctccacccgcgtcggggtcgaccgagcgcatgcgttgcttgttgacgtgtgccgtcagctcggcgtgcgaactgacccgtttgacaaattcggtgaagatgtgggtctccgcttcctcgggtggctgcaggaggagctggagacgctcccgtctgtcgcaaccggtctcatgtcctacgcctcgctcgtaaccgaggacttcaatcgtgggatcttccaggtcagagacgagatgctaaagcggtccgccggggcgctttacgataggatgtggggcccgcacggtcacgacactttccgggagaggatgatgaacgatgaagaggtcgagaacttcggtggccttggaagctcgctgacccagatagaggacgcggggacgggggctgaagagcaattggtgcctcaagccagccctgcgacggagactgccccggccagcgaagacccagcagcggcggctgctccggctggcgaagacccgcatcggcagagggatcc

SEQ ID NO: 1862 - DNA, 213 bp, Zea mays
  Probeset Number=SeqID_16265
gcgaggctgtcgggcgtcgtcaagtgggcggtctgcaccagcgttctcgagttcgagctgctcaacctgcagatcccgaccatcagcgtcgtcggatcgctcgtgaaatccggcatccgagtgctagtttcagccggcgaccaggactcggtgatcctctgcgaaaaaccggacgctggtgcagaacctggcgcgcgactgggcccgagacca

SEQ ID NO: 1863 - DNA, 580 bp, Zea mays
  Peptide Sequence Number=SeqID_8279
  Probeset Number=SeqID_16266
cccctggaaagaaaaaggccaaagccgccgcctttcaagctgaaaagaaaggcttccccgaaacttttaaccaatttttttaaaaaaagaaagaacccgatggattttaagaaatgaaaaaagcccgggggttttgattagccttacccgttgaccaaaaaagggctgcgaatgagaaatttaatatgccgttaaggagtaaagagctagaattgaggccgccagaagttttcccccctaagaagagggaagaagagagggtttttcccctagcccttagtgtcatgcccgctggtccgaagccatttttcctggggctccggtttaagatattgtttgaaaaagcctaatgttccctgggcccttagggggtgattagtctttagctaaaccggggggtttttatccctatagatttaggttttttttttttggggctatggaattggataataccacccccagctttgcttattttttagctaaaaagtttgctgtttttttccccgcgattttaggttttttttttttggccatatgtaattggatactgccccactagcttgtccttttttattcc

SEQ ID NO: 1864 - DNA, 538 bp, Zea mays
  Probeset Number=SeqID_16267
ccccgcgggggccggggcggggtttccggggggcgccaccacgcgcgctgttctgcgtgcgagcgacagctgggctcctggtggtcggcacatggacgtcgggctcaactcggctgacgtccaggtgtgggacaccagctccaaccgactgccgagaacactcagaggtgcgcatgaggcacgggtaggctcgctggcatggaacaacagcgtcctgaccaccggtggcatggacggcaagattgtgagcagtgaccgcgaggattagagaccacgtcgtgcagacgtacgaggggcacagccaggaggtctgcgggctcaagcggtccggatcagggcagcagctggccagcggaggcaacgacaaccttctgcacatttgggatgtgtcgatggcatcgtccctgccatctgcgggccgcaaccagtggctgcataggctcgaggaccacatggcccccgtgcaggcactcgcgtgccgcccgcgcccgggccatcaaattctggcacacacactggtgggtgcctgaactcagct

SEQ ID NO: 1865 - DNA, 281 bp, Zea mays
  Peptide Sequence Number=SeqID_8280
  Probeset Number=SeqID_16268
ttgctcttccactccggtctgtcgttgctcctgtcggggttcgcgtcggtggggtcctggctcggtgtgtccgccgccgccgtgttccgtgcgctggagcgctcgttccgggcctccgccggcgtgcggccggtgccggtcgcctcgctgcccccgctgccccggtcgtggtcgcgtccctcccgctcgcgtgggggtgctcctgccgcttgtgccggtcgttccgtgcggcttggggcggcgcccctgtcgtgcctggcggccccccgttcgcggcgtct

SEQ ID NO: 1866 - DNA, 331 bp, Zea mays
  Peptide Sequence Number=SeqID_8281
  Probeset Number=SeqID_16269
cgatacaggaggagacgtgacccctgcggttaatgagaacagcaccctgccgtcgctaagtggcggactttacgccttcttttttgatgttgacggcacgctggccgcgcttcagtcgcagcccgagtcggtttccatccccgcatcggtgcgccagcatctgcaacaaatttctaatttaagtcacggcgcgctggcgctggtttccggccgtccgatcagccagctggatgagctggtcgcgccgctgcaagccccggcagcgggcgtgcacggcgctgagcgccgcgatgccagcggacatctgcaccgtcagtcgctgcccgatgag

SEQ ID NO: 1867 - DNA, 445 bp, Zea mays
  Peptide Sequence Number=SeqID_8282
  Probeset Number=SeqID_16270
atggccgacgtgcttgagcccgcctccgacgcgccgcgcgtgcgccgcccgccgccgccacccccggacagtccggaggaccgctcgccgcggcttcccccgcctccgcccggcgggcctccggcgccgagccggaagcggagccgctccccgccgccaccgcctccgctcggctcgtcgcggcctcagaggtaccgggaccaccgtggcggcggcgggcgaggcgggagcagccccagcccgccgccgtaccggggcagccgccgtcactcgccgcccaggaggtccccgtcgccgccgttcaagcggtcgcggagggacgacgggtacgaccgccgcgggggccgagggagcccgccccgttacgggtacgatgataggaggcgaggttatgaccatgatcgaggtggcggcagaggtgggtacgatgatgacagaaaccatg

SEQ ID NO: 1868 - DNA, 392 bp, Zea mays
  Probeset Number=SeqID_16271
tgcagagtcatgaggtgtcattttcccggccgattcgtctgctccatccgcgttttccctgttatctggtgccgcgtcgcgacggccacttcatgctcggcgccaccatgatcgaaagcgacgatgccagcgctatcagcgcgcgcgccatgatggaactgctcagcgcggcctacaccctgcacccggcgctggcggaagcgcgcgtcatcgaaagcggcagcggtctgcgtccggcatggccggctaatctgccggaaatccactatcacaacggtattttttatcttaacggcatgtatcgtcacggttttctgctggcaccaatgatggcagaacagctgatgcagcgcctgtccggggaggttagccatgaatattcagcttaacgg

SEQ ID NO: 1869 - DNA, 539 bp, Zea mays
  Peptide Sequence Number=SeqID_8283
  Probeset Number=SeqID_16272
acgctcgatcccggcgagatctacgagctggtgccggaggaatacgtcgcgaacacgtacgaccggctcgtgcgcgtcgacctgcgcgatccgtcgaaattcaacggcgacgtcgcgcagtcgtggaccgtgagccccgacgggctcacctatacgttcaagctgcgctctggcctcaagttccactcgggcaacccgctgacggccgacgacgtcgcgtggtcgatccagcgcgcggtgctgctcgacaagggcccggcagcggtgctgaccggcatcgggctcacgaaggccaacgtcgccgcgaacgtgaagaagctcgacgaccagacggtgtcgatcacgaccgatcacaagtacgcaccgaccttcgtgctgaacgtgctcggctcgtggcccgcgtcggtggtcgacaagaagctgctgctgtcgcaccagcagggcaacgacttcggcaacgcgtggctgaagaccaacgaggccggctccggggcgtacaagctcgtcaagtggtcgcccagcgacagcatcgtgctgca

SEQ ID NO: 1870 - DNA, 286 bp, Zea mays
  Peptide Sequence Number=SeqID_8284
  Probeset Number=SeqID_16273
ccccgttatcctttgagtccacctgcacagccagcagaagggcaaccaggtgtggattgaggtggccaacaccggcacgccgattccggctgaagagcaggcgatgatctttgagcccttttatcaggggagccagcagcgcaaagggccggtgaaaggcagcgggctgggattaagcatcgccaaagattgcctgcgcaggatgcagggtgatttgcagttggtcacgcgcacggacgcggacgtctgttttcgtatcattttgactaccagcgccgggaatgcc

SEQ ID NO: 1871 - DNA, 532 bp, Zea mays
  Peptide Sequence Number=SeqID_8285
  Probeset Number=SeqID_16274
gctggaaggaaagtgctcgttgaacctggcctgctcagcaatggtgactttgagacggcaccagccggcggtttcgtaagatctgcgtctgttgctgagggtgcatcgtcaatccctggttggacaatcaatggcacagtcgagctcatttcagcaggccagcaccagggtggcatgatcctgattgttccacagggagaccatgctgtaagggtaaggaatgatgctagcgtttggcaggtggtggacgtttaaaaaggttcggagtatgctatcacaatcagtgctgcccggacatgtggccaactggaggcactgaaagtttccgggctagggggggtgtctcagacagtagacctgcaaacggtggaccacaaaaaagggtgggaagcggacgcggtggcttttcaggcgacggaaaagcaggcacattttccaatcatgaaccctggcatggaggaaggtcccacctgtggtccttacccaatccacggtgccgtccaaaagcttttcaccccaaaccaacccaaag

SEQ ID NO: 1872 - DNA, 624 bp, Zea mays
  Peptide Sequence Number=SeqID_8286
  Probeset Number=SeqID_16275
tcctcgagtttttttttttttttttttttttttttttttttttttttttttttttttttttttttttttttttttttaaaacccggccaaaaagagccccgttgaacaaggggggaagccaaaagtttgttaagccttacagttttcagttggcattttccccattcaaaaacaaagttggttcagcagaaagccttacagctttcagttggcataacccccattaaaaaacaaagttttttcagcagcttgttcgcacaaatatcgcccccttccgggggccaagaaatcgggcggcaatttttcaattcggggagcacatttagacatgtccctccaaaaaaaaacagcttttcctggaaaactagagcaaactcccttactggggaacaaccgtttcatcaaaaagattaccaaattggccgcctcttttagtaaaaggcagcacaaactttggaaccatgacagttttgattcagcacaaggccacattactttaggggttcacatacttggggacataccccattactaattgggccaccttccttgggggggattgcacataaggtttaatcttggcgggggtttttggaatatgacggttgggaactgaaccggaaa

SEQ ID NO: 1873 - DNA, 258 bp, Zea mays
  Peptide Sequence Number=SeqID_8287
  Probeset Number=SeqID_16276
gatcctctatatcgacctgcagagcttaattggtatagtgcatgtggagtatcagcagatcttactctagttccttcgttagctattgctgaagactttgaaaccgctaaagcttcttcagcaaacagaatacggctttggaataagggtgtagattctgaaagctttcatactaaatatcggaggcacgaaatgcgtcgttttggacgtgaaaaaaatttggattttctgaagagtttcatgggttacttgtctgca

SEQ ID NO: 1874 - DNA, 282 bp, Zea mays
  Peptide Sequence Number=SeqID_8288
  Probeset Number=SeqID_16277
ttgtttgagaattcacgaaggctccctcaactcccgcaaacgtttcgcgatgtacgtcttctggtcctcaaaaccagcgagcagccagcgatctatttctggagatgccagagccagcatgttccttgggacgtgaaaggtgcgtgtggttgaaggtgcaggttggaagtagaagcggccaaaacttgggagctcctcgattccgatggattgaggatgtagcgcgacgcgcttcggacgctatcgatctgatctgacagtcgtagtgatcatgaacataaa

SEQ ID NO: 1875 - DNA, 225 bp, Zea mays
  Probeset Number=SeqID_16278
tgcagcgtagtgcccgtttgcgccgctttggtgactctctggaagaagtaacgacgacatactacttcggcgcggcgatgctgacgctgttcctgatttcacgcttcatccacaacaatctgctgattggttgtctgggcgtggtaatgctggtgggcccggcgctggtgtcgctgctggccaaagagccaccgcagcgcgtgcagaaaaaacgcagctaagcgg

SEQ ID NO: 1876 - DNA, 493 bp, Zea mays
  Peptide Sequence Number=SeqID_8289
  Probeset Number=SeqID_16279
cgcgccgcccgtcgccgacttcgcgcacggcggcacctgcgtttacttcgacggctggtacaagggccgcgagatcgccaagggcggcgacgcgcccaacaagaactacttcgaccccaggtacctgctgtccatgtacggcaacccgtggggggacctcttcaagggcgccttcctgtgggccaaggagggcaaggacttccccgagggggccgtttcgctgctttaccgcgcccccggccccctccgcgcccggcatcgcgtcgcacagccccaggggttacgtcaaccccgtccgcctcggcagcgtcgcctcggggtagcttttggattgcatgttcgtttccatgcatgtgtatccttgcacgcaattattggatgaaataaacaccaattagcttcctccgtatttaaaaaaaaaaaaaaaaaaaaaaaaaccaaaaaaaaaagaataaaaaaaaaaaaaaaaaactcgagaagggggcccggtacc

SEQ ID NO: 1877 - DNA, 432 bp, Zea mays
  Peptide Sequence Number=SeqID_8290
  Probeset Number=SeqID_16280
aaaaccggcccacctttagggggggatcaggacccagcccacgggtttatactttaaggaacaaaatttcctttccaagcacgattggggggggttttattttaaagctaaaagttacaaggcgaaccctgtcctttcaaaaaagggggaacaaactccccccggcttccaggtttcgctttatttggcttaaagaaggaagggctggccaaactatacaaggggatggttttcgaccccgggggttcctacaaatggctaactaacaaaaaacgcgggaatttcctcacagaagcttataatcccatgggaacaaaaaaaaaagaccccccgaggcatataaggcccccatccttaatttgctttccaggttattctggggaggcaaattcgggggccccagacggggaaaacttttgaaccagggaattt

SEQ ID NO: 1878 - DNA, 315 bp, Zea mays
  Probeset Number=SeqID_16281
atggaaaagtttgccgtttttggtcatcccatcgcccacagcaaatctccgtttattcacgccgcttttgctgagcagaccggtattgaacatccttacggacgcatctgcgcaccgctggaagggttcccgcaggcgatagaggcgttttttgcggccggtggcaaaggcgccaatgttacgctgccgtttaaacagcaggcatgggaattcgcggatgagctcagcgaacgcgcggcattatccggcgcggtaaataccttaaagaaaagagccgatggttcgattctgggtgataacacggccggcatcggc

SEQ ID NO: 1879 - DNA, 421 bp, Zea mays
  Peptide Sequence Number=SeqID_8291
  Probeset Number=SeqID_16282
atggtacattgaatggccttatgctcttttatgtacaattggtgccgctatattatttggctcatttaatccactacttcttgtacacaatagcacttatagtgtgttagcatactaacaaatagaaatctgtgatatgccccacgaagtgaacatatatggtgtttactcatagtaggcatgggtgtcattatcattacacaacaacatttctattttggaataattggcgagaagatgacgtactgagcgcataaagaaggatgacgttctcagcgatgctacacaatgaaagttggatggtttgacaaagaggagaacaatgctgatacactgtccatgcgcctaggaaaggatgctacgtttgtccgtgctgcgttcagtaaccggctttccatatttatgcaggacagtgctgcag

SEQ ID NO: 1880 - DNA, 366 bp, Zea mays
  misc_feature (10)..(10): n is a, c, g, or t
  Peptide Sequence Number=SeqID_8292
  Probeset Number=SeqID_16283
tgcatatcgngatgttcaggagagaaaagttgagctgcatgatgcactgattaaaatggtaccaaggtgaagtgttgatggtttacttcaggttcgagctgatcgaatccaatatcaattagaagagatggaaaaagctcttagtgaacggtgcaaacactttgaacttaaattcttgccatttgcatcagttgaacttccttgaggcacctggctttccagtctccatagtattattagtatgaaaaaagaaaaagaaaaaaaggagaaggaaggggtaggaggcccagcccaccagtcagcccatataatccttcctctggcaaccctaggttgcctctctcccccaccattcagggtgcgagc

SEQ ID NO: 1881 - DNA, 531 bp, Zea mays
  Peptide Sequence Number=SeqID_8293
  Probeset Number=SeqID_16284
accgctcagtacgacctttaccatgaacgacgcccaggcgagaacgacccaccgctggtctaagatgcgggggagcgaccacgtcggtgcggtccggacatcctggttgccggggcatcctacactagtcacgaggctggtgcctctcccgatgttcagtgcagtgagcctccggatcccaggactgcgtggaaccatcgacgttgcgagggagcaacaccgtgtccgccgtgcacgtgcagttcgtgtcggcggtgtgcggtggaatggcgtccagacgccacgggttgacgcccacagaccgggtgcgacccacacgctgccgcgagaaggaaacgaggagaccatgtccgacgtgctcatcgaccgtcccgagctcgaagggctcgggcaatacgagttcggctggtccgactccgacaccgccggcgcctccgcgcgccgcggcatctcggaagaggtcgtcaccgacatctcgaacctcaagaacgagcccgagtggatgctcaagaaccggcacaggcctgcagc

SEQ ID NO: 1882 - DNA, 1054 bp, Zea mays
  misc_feature (1)..(86): n is a, c, g, or t
  misc_feature (847)..(1054): n is a, c, g, or t
  Peptide Sequence Number=SeqID_8294
  Probeset Number=SeqID_16285
nnnnnnnnnnnnnnnnnnnnnnnnnnnnnnnnnnnnnnnnnnnnnnnnnnnnnnnnnnnnnnnnnnnnnnnnnnnnnnnnnnnnnnggaggcgggagcttccttaacacccacgactaaccccccaggacggcggtccagcgccagacgcctaccgagcccctctttacaataaccgtcgtttggtggttgctccatagtagtttgggtgaccctacctggttggtccgttactaccggtggtactggtgcctctttgtaactatggcttatactatgtacttgctccattaccaccggtggtggtgtgacctccttactactttagacactactagctagttagtccgttgctgctggtggtagtagtgcccgcctacttctctggaccgtagtaactggttggtccgttcctcccggtagtttttgcttactactagctagtcagtccgttgctgcagctggtggtggtacccgcctactactctggaccgtactaactggttggtgatgtaatccggatcgagagggggggtttgggttgttttgcgaggacgacgatccgctcgctggcgcgcacgacgaacggtgctgttgcggcccacgaaagtgctgtcggaacccatatggcgcatactgggttgaatgaaccaacttgtcactgttggggtccggcggcaacgacgaccggggcagctaatgtcgggacggcggacgtcctggcgacgtccatggctcttcttaccggttggtgtccctataggtctccgggtgggtctggtggcgtcttggattcaatggtagcagtggctgtccctgtccttcaccgtctagcgactaccgcggannnnnnnnnnnnnnnnnnnnnnnnnnnnnnnnnnnnnnnnnnnnnnnnnnnnnnnnnnnnnnnnnnnnnnnnnnnnnnnnnnnnnnnnnnnnnnnnnnnnnnnnnnnnnnnnnnnnnnnnnnnnnnnnnnnnnnnnnnnnnnnnnnnnnnnnnnnnnnnnnnnnnnnnnnnnnnnnnnnnnnnnnnnnnnnnnnnnnnnnnnnnnnnn

SEQ ID NO: 1883 - DNA, 1427 bp, Zea mays
  misc_feature (1)..(636): n is a, c, g, or t
  misc_feature (1424)..(1427): n is a, c, g, or t
  Probeset Number=SeqID_16286
nnnnnnnnnnnnnnnnnnnnnnnnnnnnnnnnnnnnnnnnnnnnnnnnnnnnnnnnnnnnnnnnnnnnnnnnnnnnnnnnnnnnnnnnnnnnnnnnnnnnnnnnnnnnnnnnnnnnnnnnnnnnnnnnnnnnnnnnnnnnnnnnnnnnnnnnnnnnnnnnnnnnnnnnnnnnnnnnnnnnnnnnnnnnnnnnnnnnnnnnnnnnnnnnnnnnnnnnnnnnnnnnnnnnnnnnnnnnnnnnnnnnnnnnnnnnnnnnnnnnnnnnnnnnnnnnnnnnnnnnnnnnnnnnnnnnnnnnnnnnnnnnnnnnnnnnnnnnnnnnnnnnnnnnnnnnnnnnnnnnnnnnnnnnnnnnnnnnnnnnnnnnnnnnnnnnnnnnnnnnnnnnnnnnnnnnnnnnnnnnnnnnnnnnnnnnnnnnnnnnnnnnnnnnnnnnnnnnnnnnnnnnnnnnnnnnnnnnnnnnnnnnnnnnnnnnnnnnnnnnnnnnnnnnnnnnnnnnnnnnnnnnnnnnnnnnnnnnnnnnnnnnnnnnnnnnnnnnnnnnnnnnnnnnnnnnnnnnnnnnnnnnnnnnnnnnnnnnnnnnnnnnnnnnnnnnnnnnnnnnnnnnnnnnnnnnnnnnnnnnnnnnnnnnnnnnnnnnaggaggcccttgtgtctgctcaggaagagatcaaggattgccgggcagccttgttgcggtgcgaggaggagctggaacgcatccaggaacagaaaatgaacctgcagaaggaggttgataggctcaccgagctcgctgagaaggcccagttggatgcatccaaggccgaagaagatgtcaccaatataatggtgttggctgagcaggcggtggctcttgagatgaaagccacgcagcgtgtcaacgacgcggaggcggtgctgctgaaagcggagaaggtcatatcctcggttgacaccgtggtggagctaacatcacttgctgaagagcagaaaagcgctgaagaggatagcgtttctgaagggtatgagtatagcagcaatggcactgatgatgttcctgtgagggatgaggtgtcaagtatcgagcgtctaatggtaggtgacttgactgttgagggcattgagcagcttgaaccatcccgtgaaatatatgatgaagcaagcagcgataagatgtccgttgagcctcagaaagaagctgagcctgattcagacaagttgaagcaagggaagaagcaggaaatggaacgaaaggagttcaccaaggaaccactgagtgctcaaaaatcactgaagaagagatcatcccgcttcttcccggcatctttcttctcctccaaagctgatggagagtttacacctacatctgtctttcgggggttaatgaaatcagtgcaaaaacaggctcccaagcttgttgttgggatattgcttcttggtgcaggnnnn

SEQ ID NO: 1884 - DNA, 247 bp, Zea mays
  Peptide Sequence Number=SeqID_8295
  Probeset Number=SeqID_16287
gttagtcggatcttctccagcttgcgtcaggttgctctctctctgtgcttcaccggccgtctcgcggttcggggcccgcggcgtcttctggggcctcctccgcctgcccgtctccctcctgttcgcgcggttgtctctcctccatccgcccgcttgctgcagcctgtgctctgctgtgctgttcaattcgccggctttgtatgatgccgctttcgggccttccttcccgtcccggctccccctgcat

SEQ ID NO: 1885 - DNA, 1359 bp, Zea mays
  misc_feature (1)..(110): n is a, c, g, or t
  Probeset Number=SeqID_16288
nnnnnnnnnnnnnnnnnnnnnnnnnnnnnnnnnnnnnnnnnnnnnnnnnnnnnnnnnnnnnnnnnnnnnnnnnnnnnnnnnnnnnnnnnnnnnnnnnnnnnnnnnnnnnnggagaagcgggcgacgcttcgccttcgccgtaataaccgcgccaagaaaagaggttcgaaggccggccccccgaagggctccacggccgcctcaggctactcgggctccgcgcccattactgatcaggggttcgaaggctggcccccgaagggacatttccgagaccagcgggagcgatcttgtaacggaatcccatcggagggaggcatcgagccctcggaccccgtcgccagggggccgggtccggcagatcacccgcaggaggacgtcagcaaggactcgaccgctccgacagctgtccctccgtcaagctccattgctcctccgacagccacgacatcacgccagcagggtgccaagatctctccggctgccacattggcatgaaggaccagggccttctcagagaaggttggccgcgcgggaccgaggacgggacaggcgctctcttggggccgctcgcttccctcacccgcgtggacgcttgtaacccccctactgcaagcgcacccgacctgggcgcgggacgaacacgaaggccgcgggacttccacctctctcacgctcgactccggccacctcgcctctccccccttcgcgctcgcccacgcgctcgacccatctgggctctgaccagtagtgggcgcggagcccgagtgctctgaggcggctgttgaacccttccgaggggccagccttcgaacctctgatcagtaggggggctcggggcccgcttccttcacggagaaggatccctttcggagtatcccctttcccggtcccttttttgacgtggtcattatggcggaggtgaagcgtcgcctgcttcgcgagtggttcgcggggcagccgttgtgcgtgcgcgagccgttcgaggaacgggcgtctcgctttgagttttgaatctcgcggcgggttcgggcgaagtgttgaacgggtctcgcctgggcctttatatattcgggagagggaccggtgacggttctttactctgttgctcgcctcccacttaggtttttgcaacctgagggaatagccagagaaaggaaaccgcgcacctggtgctctccagcgccacctgttctgcttggtgatggccgaccgggtgaccgttgtttggccaggcgacccgtggcctttctccaccgtcacggcggatgatctggaggcccttgttattgtcccaggctcggtccgacttcgccgaaagtggagttgacgccgagggtgctgctgctccccctccat

SEQ ID NO: 1886 - DNA, 275 bp, Zea mays
  Peptide Sequence Number=SeqID_8296
  Probeset Number=SeqID_16289
attggtccagtatgcacaagagataacccaacattagttttcagcgaaccgaattcaccaccggggactacgtccaagctgaaccccgctcaagaggcatacctacgctccggaaggggcgcattggtgaggttgctagaactagaccgcattcacggcagggaacaaaactgcggacggtgaaactcacatcgaagaggacgacagggaagggggggcgactgtgtgaggttggagagccaaaaacggcgcaccaaggtgtgaaaccatttgtc

SEQ ID NO: 1887 - DNA, 549 bp, Zea mays
  Probeset Number=SeqID_16290
gcagtatctgtttgtacgctgtgacaatgaaccagcaccttggaccagtgatgatcatggtgaccgtccaaggccattgcccaacattcccgagttaaaagatgcaactgatataaatgagagagatgagcgtccttcatggcgacgacaggagaaggaaggccgctggaaatggatgtacgagccgccaacgagcaggaaacctgttcgcactgggcttcgtcctaagaccggcaagcaagcccggaaaagagcaaggagtgatgagatgcctaacgaccctgaaaaactcctgaatgagtttagctgttgtatctgcttccaagtgatggcagagccactcactgctccctgtggtgacagcttctgcaaggcttgtctgctgggggcatatgatagccagtcttctgtaagggaaagaagctgtggtggtcggactctaagggcacagaagattgtgaagacgtgcccttcctgcccaactgacatctgtgacttcttagagaatccccaggtgtgtaagaggaagctaaagcttgtggaaggaca

SEQ ID NO: 1888 - DNA, 723 bp, Zea mays
  Peptide Sequence Number=SeqID_8297
  Probeset Number=SeqID_16291
gtgcttacgtgcgactcagtgttgttggagttggaaaatgcatcgtggaaaccgggtggggggttttaggagttgtgtggttcaaacttatgcaggcgtttgtggggcaggggctttcaggcgaaattgccaggaaagatgaatagggtccttgttaccaaagactcgacgtgtatttgccggcagagatgggatgccccaggggtttccatacgtccgagtgttccggaggcggggccaccatatggacgcccagacgggaacgggcaggcgagagcggaggcataccgggcgggggagggtccagctgaggggtcctgcagcgcagcagaccagcgacagcgcggcgggggggagggggtgtgaagaggggaatcacatgaaactctttctaagcttcggtcctacgaggcggggcttcgtcgggaggggatacgagccgcgggagaacgtcgccttatatttatagaatccgtgcctgccgcgcgggcggcggcgtcctccgttcgcacgagcgcggcgcccccagacgagcctagggcgcacctcgggtacatccaactgcgccccctccagctctcgggacgacatcttctagaagaagctgtgagcgacgatgaggcgaggggtggaaggaggatggcgagcagacgcaaagcggggcggatggcaatagaaccttgtcatatcgtggctatatatttagagatggcaggcggtggt

SEQ ID NO: 1889 - DNA, 232 bp, Zea mays
  Probeset Number=SeqID_16292
tgcatgcctgcagcagtgcaagtgcaaaagcagccaaagcacagcatctgtaagacgctgagaaggctggcccagaacagggaggctgcaaggaaaagcaggctaaggaagaaggtgagcgagtctcgacttctcttttgctgcatgcaacaggcttacatccagcaactcgagtccagcaggatcagactagctcagctcgaacaagaactgcacactgcaagagctcagg

SEQ ID NO: 1890 - DNA, 612 bp, Zea mays
  Peptide Sequence Number=SeqID_8298
  Probeset Number=SeqID_16293
tggccaaaggaccgagctgggtcagtctcgatgtcgaagaaaatgacagcgtagaacgctacagccacaagatttttgattccgcgctggcgggactcagccgcgtgcgtcagcaactggatatgcaggtggtggctcaggcggtgcaggcattgtcacaggcgcataaagtggccttctttggtcttggcgcctcggcggtagtggcgcatgatgccaccaataaatttctgcgttttaatctgccggtcatctggtccgaggatattgtgatccagcgcatgagttgcataaatagtggaccaaatgacgtgtttgttctgatatcgcatactggccgcaccaaaaatatgatagaactggctcgcctggcgcgtgtaaacgcttccaccgtgttggctatcacctcgcccggatcgccgctggcagaggaagccacgctggcgctgacgctggatgtaccggaagataccgacatctatctgccgatggtttcccgcctggcgcagctcaccgtggttgacgtgctggcaaccggttttaccctggagcgcggtaccgctttccgtgagaatctgaagcgggtaaaagaggcgctgaaagcgtcgcgcc

SEQ ID NO: 1891 - DNA, 491 bp, Zea mays
  Peptide Sequence Number=SeqID_8299
  Probeset Number=SeqID_16294
ggcgaaacagggtggcggaacactttcaggtcgggcaccgcaagcagaagcgctgggagggtctgctcggtgaagactggtccgacaagcccatctctttcgaccaaggcgaccaccccaactgcgtatcgagcctaggaaggtacccgctcgtcgtcgaccctgtcgtcggcaacgctaggctcaccaaggtcttcatggacggaggcagcagcctcaacatcatctacgccgagaccctagggctcttgggggtcgatctgtccacgatccgggccggtgcagcaccttttcacgggatcatccccgtgctcgccgactttctccgcgcaaacgccgaaatttttgcgtggagtccctcggacatgcccggcataccgagggatgtcgccgagcactcactagacatccaagcaagtgcccgacccgtgaagcagcccctgcgccgctttgatgaagaaaagcgcagggccataggcgaggaggtcctc

SEQ ID NO: 1892 - DNA, 228 bp, Zea mays
  Peptide Sequence Number=SeqID_8300
  Probeset Number=SeqID_16295
cttgaatatctagccgggagtattcttgatgggcctccttccattgggtgaaacgcttttagggaattgaagagcaaagaggctgagttgcttctcaataacaaacttggtcaggagagcaaggagcagctatcacaggttagagtttgctcttttgttctgtggtatcagtacataaggggcatcagtggctggaacttcaatctaaaggaccttaaaaatgcaggg

SEQ ID NO: 1893 - DNA, 994 bp, Zea mays
  misc_feature (956)..(956): n is a, c, g, or t
  misc_feature (958)..(958): n is a, c, g, or t
  misc_feature (963)..(965): n is a, c, g, or t
  misc_feature (990)..(991): n is a, c, g, or t
  Peptide Sequence Number=SeqID_8301
  Probeset Number=SeqID_16296
atgatccgctttagagttgacgagaaggggcgatggacagttatacgctttgttcctgtacataatcaccagttggcgaaacctggagaaaggcacatgctgagatcagccaaatcacttgctgttggcaaatcaggtgttatagatccattagcatctacagaggcacatccaattaatggtttctctgatatgacaggtgatatagttgagaattcagggtatactataagggaatgttacaatcaagtgggcatgcagagtataacagtaattgaggcaggggatagccaaagtcttgtcagctatttcaagcataaaactaatgaggaaggcatgttctattgggacgtccaagttgatcaagaagggcgcatgacgaacttcttctacagggatggtaaaagtagaaatgattatggctgctttggagatgccattatatttgatacaacctaccgcacaaacaaatataacttgatatgcgccccatttgttggtgttgaccaccattggcaaaatgttgtttttggctgcgcgttcttgttagacgagtctgtaacttcctatgcctgggtatttaaatcattcttggagtcaatgggagggcgatcaccaaaatcaatattcactgatcaggatgaagctattatgcaggcagtcaaacaggttttccctaatacgcaacattgtttttcctactggcatattctgaagaatgctcaatctcatttaggctcactaaatacgtcccaagcatttcaaaggatgtttaccaagtgtatgcaaggatctgactccgaagaggattttaaggaatcctgggccccgctgggcccccgggacaagctacccgacagcgattcgctgtggggcctgggccccttccatccccccccccgctcggcgggggcccagggggcttttgatggtcgactttttccgggggggaaaancnttttnnncccccccggggggggcgggggtttnnaaa

SEQ ID NO: 1894 - DNA, 479 bp, Zea mays
  Peptide Sequence Number=SeqID_8302
  Probeset Number=SeqID_16297
acactggtacccacacctgagaccctcaccgtagtagagagaggtaggagcagagcttggggtggccgccgcacggtaatcggatccacccggtgttcgaggatccactgagggcttggggagttcctttgttgtgcttggagggtgctcgcggccaagggttgagggatctaccaccggggtgaccagaattcctcaccatgcttcggactccaccgcgctcagcgagcagaggacaaggacgtactaatcaagtacaatgtgtgaacaggtatcttcggacatgagttaaaaccacaacgtgaagaagcacagaaggggtacgaaggatggcgcgaagccgaagctgtcgtagaagagcttcggcatgatagcggaaagggaaaccgacttaaagatgaaaaggctatttagacctcgatgaatcgttatagagttattagcagatgtaaagggcataggtgtaattttacatgggt

SEQ ID NO: 1895 - DNA, 280 bp, Zea mays
  Probeset Number=SeqID_16298
acagcacggcaactgacgcacggtgtacatacaggatcttacagcactgcttgtgactactgacgaatcctggttcagtgtagttactcatacgagtcagcgatccagatgtggcagctatgtccaccgggtcctaccaacatacagtattgagaccatcgtgggcacctatatataaagatggaactgactcatggtaagatcatcagtgaggatggggagcgcgggagagttgcaagggtgggcaacagatagttaggaagcaaccgggttgggatca

SEQ ID NO: 1896 - DNA, 392 bp, Zea mays
  Peptide Sequence Number=SeqID_8303
  Probeset Number=SeqID_16299
atggcagcacaagccaccggcgggagggcaacccggcgcggcgcccagcctgcccgggcgcccaagagcctcaccgtccgtcagaaaaagatcctcgaaaccatccagcggtccgtgacggacaacggctatccgccgtcgatgcgcgagatcggggacacggtggggctggccagcctctccagcgtgacccaccagctctcccagcttgagaagctgggctacctgcgccgggaccccaagcgtccccgcgccatggaagtcctgatgccgctgaccctggacgaggggtccaccccgatttccggcgtcgaacagccccgcgggctgaaggccgtcggcggactcgcggtgtcggaactggccagcgccacggacacggcgatggtccc

SEQ ID NO: 1897 - DNA, 260 bp, Zea mays
  Peptide Sequence Number=SeqID_8304
  Probeset Number=SeqID_16300
atggaaataaaagatccaatggtcgaattactcagcagtcttgagcaaattgttttgacacgtgatgcacagactcccgtatcagaaattgcactcaataccgtttccgttcccgaaccgcagcgtttacgcgagatgaccggcatgcaggtggatgaattcgcccgcgtgatgggggtgagcgtctcgtcagtaaaaagctgggaagcgcaacgtacgcgcccatccgccacggctcgcaaactgatgaaactgctgca

SEQ ID NO: 1898 - DNA, 603 bp, Zea mays
  misc_feature (1)..(2): n is a, c, g, or t
  misc_feature (603)..(603): n is a, c, g, or t
  Peptide Sequence Number=SeqID_8305
  Probeset Number=SeqID_16301
nngctgacttgccttacagctataggtgtacatttgctacacttgctagaatggaatacatcaatagatatgagacattgcattttacaagctatagttcaacagatataccataatgaggtcgaggtcacggggcttctcatcgatgctttacccttaacagagcttccagaaaagaaatgcaagcgatgtggtttgtatgaggagggcacatttaagcctgatgctgtctttgatgaatgggagatgtgttcgagtgatttcaagggcggaaaatacacccgctttaaggaaggccagttcaatgcaacattcctatgcccaaactgcactgcctctactgtaattgacgtcaaagatgcttctttcgtgccaggacatggaaaccctagaccaagcgaagatttggaaactaagaagacatctattgctgtcatcataatagctagtgttctcgcttcagtccttgtcgtcactgccttgttcgggggcttcaagtattggcagaagaagaagagggagcgagaccaggtgcggttcctcaagctctttgaagagggagatgaccttgaagatgagctgggccttagtaatgaattctan

SEQ ID NO: 1899 - DNA, 536 bp, Zea mays
  Peptide Sequence Number=SeqID_8306
  Probeset Number=SeqID_16302
agcatgaatatgcactcgctggatttgaatctgctgcaaaccttagacgtgctgctggtagaacagaacgtgacgcgcgcggcgcagcgcctcaatctgtcgcagccgtcggtgagcgcccagctggcgcgcctgcgggtgctgtttgacgatccgttgctgttgcccggtccgcgtggcatgctgcccaccgcgcgcgccgaggccctgcgcgagccgctgcgtctggcgctggatgcgctggagcgcgcggtggcaccgccggcagcgttcgatccggcgcgcgcggagctcacctggcgcattgccgccaccgattacatgtcatcggcgctgatcctgccggcgctgaaactcattcgtgaagcggcaccgcgcagccgcatggcggtcttcgcgctcaatccgccgcaggtggcgcagcagctagagaagggcgagctggatgtggtgtttcacaccggcgacaacgcgccgccgacgctgcatcagcgccgcttgttcagcgagctctacgtgctggccggaaggcacga

SEQ ID NO: 1900 - DNA, 245 bp, Zea mays
  Peptide Sequence Number=SeqID_8307
  Probeset Number=SeqID_16303
aatagcatgtctgagaatgccgaactgttatggggcgcacgttttaaagcggctccggcagccagtttaaccgcgctgtcgcgtagcccggattattactttgcgctggcgccgtacgacctcgccggttgccgcgcccatgcgcgcgagctggcgcgggccgggctattgagcgctgacgagctggataccatgctggcggcgattgacgcgctggacgccgattatcgcgctggccagctgca

SEQ ID NO: 1901 - DNA, 1858 bp, Zea mays
  Peptide Sequence Number=SeqID_8308
  Probeset Number=SeqID_16304
cgtaacccaccaagttccacggcctcgccgggggccatgttatttttttttgaagatgtcaaccgtctcctcggcatggcccatcctggcttggccagatccaggccacaatcattccggcgtcaacgcgaggcatcggcgtcaacgcgaggcatcagcgtctgtgcaattaccctcagtgagggggcacagaatgacgacctatgggcagaactcaaccgtaggcgtgcgggcgaggatgctcgaatctctctggagagggcgcgtgagcgccagcaaaacttcgagggtcgcaacctcaatcaagacttcactgcaagggacgctcaaatccagacgggtgtcccattggtcggcgtaggctgcaccgcactagcggatcatctccgcgtggcgacttggccacccaagtttcagccgcacctgccggagaattacgacggtacgtcaaacccgtcggaattcttgtaggtctacgtcaccgccatcacggcagcaggttgaaacaccgcagtgatggcgacctattttcatgtcgccctgtctgggcctgcctggacttggctcatgaacctcgccccagggtcaatctacacctgggaagagctctgtgcacggtttgttgcaaacttcgccagcgcttaccagcagcatggtgtggaggcccacctacacgcagtgaggcaggagcccagagagaccctccggacatttatctcccgcttcaccaaggtacgaggtactattcctcgtatttccgatgcttccatcatcacagccttccgacagggggtacgtgataagaaaatgttggagaagctggccacacatgacgtggagactgtccccacgctctttgctctggctgacaagtgcgccagagccgtcgagggccgtgcatggcactcggccccacaaaccggagttacccagacaggtggctcgggtgccaccacccagggaggtggcaagaagaagaagaagaaccgcggtcacgataggccgcaatctgagtgcttcggtcgccgcagctgcgcactgggggccgggatgagcgcggcaagtgcccacgacaacaagggaacggagtgccgtgagatcatcaagctcgcgaagcgcgtcagcaaatggcgcgagcatacctccaaggatggctcaccgccttgtcgccggcctggcaaggagagggtcgacgaaggctacctggccacgggaaaacgggacctcgggtatcaggccctcgagcaagtcctcaaggatatcctcactggagactctgacttcggtgatgacaacgaccgtcgcaagaagatgtatgtaatgtatggcggaagctgggagctcacctcccataggagtgtcaactccctacgccgtgaggtactttcggcgaccccaggggtccccaaaaccgctccgcaccaacggtggaggggcactaccatctccttcggggcatccgactgccccaaaaacatggcaggggccggcgtgctgccactcatcaccgcccctgttgtcgccaacatgaagctacatcacgtactgatcgacggaggggccgacctcaatgttatcagccacgcagcattcaagcaactgcagatcccagggtctcgactgggaccctctcactcattctctggagtgggcccacaaccggtgtatcccctggggagcatcgcactcccggtaacatttgggaccgaggaaaacttccgcatagagaacgtccagttcgacgtcgcggaggttaacctccccttcaacgccatcattggcaggccggccctgtactggttcatggccattgcccattacaggtatttggtcctcaagatgcctactccagggggat

SEQ ID NO: 1902 - DNA, 512 bp, Zea mays
  Peptide Sequence Number=SeqID_8309
  Probeset Number=SeqID_16305
atggcgattgcgcagaacaaccttaattcgctggagaacccgctcagcgtgattgaggggctgcgtcatgaaatcgacaaccgtaatctgatgcgcgaacggctggcgcagtacagtgaaatcaatgaccgctataaccaccagctgatcgccagcgccgaaagcgattatcgtcagatggtcggcatggccatcgtgatgctgctgatttcggcgctgctgctgctgctggcgcgcatctgggtgaagcgcgtgctggtgacgcgcatggcggataccaccgtctccatccagcgcattgcgcagggcgatctgacgcagcgcatcgaggcgggcaatgagaacgagctgggcctgatgctgaaagagctggaggcgatgcgcgtgtcgctgatcaccacggtttcaggtattcgtgagggcgtcgggcgcatttatgctaatgcgcaggagatcgccaacggtaacaataatctctcgtcacgcaccgaagaacaggcttcagcgctgca

SEQ ID NO: 1903 - DNA, 431 bp, Zea mays
  Peptide Sequence Number=SeqID_8310
  Probeset Number=SeqID_16306
gaaagccagagcatcggcgattacgtgctggcacacgcctatctgcgtgacgaccacgtgctggacagcgtattaccgccggatatcccgatcccgagcattgcggaggtgcagcgtgccctgtacgacgccaccaaagcagtcagtggtatgcccggcgaagaggtgaagcagcgcctgcgcaccggtacggttgtcaccacagacgaccgcaactgggagctgcgctactccgcatctgcgttacgcttcaacctgagccgcgcggtggcggtggatatggagagcgccaccattgccgcacagggctatcgtttccgcgtaccgtacggcaccctgctgtgcgtctcggataaaccgctgcacggtgagatcaagctgcccggccaggccaaccgtttctatgagggcgcgatctcggaacatctgca

SEQ ID NO: 1904 - DNA, 265 bp, Zea mays
  Peptide Sequence Number=SeqID_8311
  Probeset Number=SeqID_16307
cgcgcctcagctacgctttgcacctcgtgctcgtgttcccgctcctccttttctcgctccgggtcaacgtcgacgagctcctcttcccgggccgccgtccgctcgcagcgtgcacgcgccggttcgtgtccctgacacccgtgctcatgccggtgctcttcgttctggccatcgcaatccccagcatctgtacgctctttgagtactccgggtccacgttcgcggtcaccatctcgttgatcttccctggcgccgtagttctcag

SEQ ID NO: 1905 - DNA, 860 bp, Zea mays
  Peptide Sequence Number=SeqID_8312
  Probeset Number=SeqID_16308
atgtcgctcagtgaagtggtgcgggattgcgaagcgctgttccgccaggtggcgctgaacaaggggctggcgctgaatatcgtgctggagctggagcaggaccaggtgctgtttgacccggtggcgctgaagcaaattctctccaatctggtgagcaacgccatcaagtttacttcgtacggcgaagtggaagtggcgctgtatcaggcagagagcacgcggccggagtatgtgctggaggtgagcgacagcggggttggcctgacggcagagcagcagcaggcgatcttcgagccgttcattcaggtcgatcagggcagcaaccgcgccagcggcactgggttaggcctgaatatctgccgccggctggcggtgatgctcggcaccgagctgcacgtcgagagtgaaccgggtgacggcagcgtgtttatgctgcgcttccgcgcggaagcggcgagcattgaacatgagcagcccgccctgccacagccggtggagccagcaaaacaggctgcactgcgcattctgattgtcgatgacaacgccaccaaccgcctgctgctggcccagcagctgcgctacgccgggcaccatgtactggtggcggatggcggtgcagcggcactggcgctgtggcgcgaaaatcagccggaccgcgtaattaccgactgcaacatgccggagatggacggcttcgaattcacccgccagctgcgcgccgaagagaagcgcctggtgcgacgcgcggtaccggtttacggcctgacggcgatggcggaggagcgcgtggctcagctggcgcaggacgccggcatgaacggttgtctgtttaaaccgctggagcgcgcgcagctgctgca

SEQ ID NO: 1906 - DNA, 287 bp, Zea mays
  Peptide Sequence Number=SeqID_8313
  Probeset Number=SeqID_16309
gcagcctccaagagagcttgacaaatcacctggttgtccgaactgctgcttggcttcatagtgaccaaactatattgagttcctgcactgacatgggtggagtaaggctataggatgtgagaattggaaaaattgtcaaaactcttgaaaccaaggcttctgtcactagtgcagaagtaagccaggatggcaggttcatcactactgttgatggctcaagtgtaaaatttatatctgtcaacagatacctctgaatgagaagctatatctgcaggtcgactatagag

SEQ ID NO: 1907 - DNA, 793 bp, Zea mays
  Peptide Sequence Number=SeqID_8314
  Probeset Number=SeqID_16310
atggcgtcctcactgcttaatgtgcagacgacgacagcgtcgacgacgacgagcaacgtcagcatcgaactcacatggctcggtgtgaagatcctcaagaagatcatggacaatccagacaactgtaaggaggtagcgaaggatgccgacgaccaggtgatatcaagcattgtggaccttacaaccgtgagtgacggcgacagcagctcatcaatctcatggtcccccgtagcagaagagatcatcgtggaggcagttcaagtcttgcaccggctggtgcgaaccaccggcgatgccggtaaggcgcttaggcgcaagatctcggagaatctccatgttgtcaggaacatgagaaagatcctggaacatccagggagccacacggagctactcaccgacgcaattggagttcttgcctgcttagctttggatgagaccggaaaggaagggatcgggagctcgcctcgggtcatcaggaagcttgttccataccttgttgtcgaaactccatcagcaccatcgaatagagtcgagctagccaagtctgctgttgaagcactgcttgttcttgctgtggacagccaaaggattgccttgaggatccttgaagaactcaaggttgaaggcatgcagcaacttgttgatatgctttcttctgactccacagagctcagaactatggctgcaagactcttggctgttttacgtgtcatcaattctgttgcagaacatgctcattataacaggacagttgacagcgcactacctctgggtaaatcatgggatacatgcc

SEQ ID NO: 1908 - DNA, 419 bp, Zea mays
  Peptide Sequence Number=SeqID_8315
  Probeset Number=SeqID_16311
agtacgacgtgctgattgaggtgggtccgtcacagcaggaaatcccttatccctatgtgattgatggctccgacctgtcgctggaccgctccatgagcgccagtattgcgcgccatttcccgacgaccgagctatcgcagattggcgatgaaaccgctgatggcctgttcaacgccgacgcgctgttcccgctgtcgcatttcgacgcgctgcgcaccgatttctccctggcgcgcctgcgtcactacaccggcaccgcagtagaacacttccagccgtttgtgctgttcaccaactacacgcgctacgtcgatgagttcgtgcgctgggcgattgagcaggtgcaggaccccagcacgccatacgacagtctcgcctgcgccggcgatgtggttgatcacggcggatacgcaggaccc

SEQ ID NO: 1909 - DNA, 241 bp, Zea mays
  Peptide Sequence Number=SeqID_8316
  Probeset Number=SeqID_16312
cgccgagcgcgagcgtgtgagttaaaaacggggaggcgcggaggcggacaggggcgggggaaaagcggccacagcgagggcaccaccccggaaggggacaacaacgccgccagcgacgaccgcgggaagccggcgagccgacccagcaacgagaacaaacgcaaggacggaacgcaggcgagcccacagggcaagaccaagcacaagcgccacaaggggaaacgcacagccccagcaacac

SEQ ID NO: 1910 - DNA, 236 bp, Zea mays
  Probeset Number=SeqID_16313
cccctccgtgggcctccttaggccctgactatggtagacaatcactttcaagtcttgctgaaattgttaatcaggggaaattagtttctgatgaaattatcatcaatcttttgtccaaaaggcttaagaaaggagaagaccagggagaatcaggatttattcttgatggttttccccgtacagtaaaacaagcgtatgtggttaccttttctttaagtataatgcttgtgattatt

SEQ ID NO: 1911 - DNA, 832 bp, Zea mays
  Peptide Sequence Number=SeqID_8317
  Probeset Number=SeqID_16314
atggcggcggcgtcgcggcaggatgcccgccggagcacgaggcaggccgtgccggcgtcgtcgagggtggcgatcatcggcggcggcatcagcggcctggccgcggcgaagcagctggcggcgcacgaccccgtggtgttcgaggcgacggcgtccgtcggcggggtgtggaagcactgcgtgtaccgctcgacccggctgcagacgccgcgccgggactacgagttctccgactactcgtggcgcaaccgcgacgaccccaccttccccacgcacgccgagatcgtggagtacctggagggctacgccgacgccttcggcctgtggcgctacatcgtgctcggcgccagggtggtcgacgtcaagttcctcggcggcggcgggctcacggagctgtggagcggcggggcaagcctctgtgggaggtcggcgtcgccaccgccggctccgacaccgttcaggtacgagtgcgattcgcttatttgttgctcgttcttcaccagttcccgccgcttcgggggcaagcctctgtgggatttagctttgttgattctgcgtgcccggacgacgacggactctgttacgtttacatactaccagttcgagttcgtggtgatgtgcgccggtaagtacggcgacgtgccgcggatgccggcgttcccgccgggcagggggccggaggtgttccggggacaggtgatgcactccttggactactgcaagctcggcgaggaggacaccgtggagctgatgagggggaagaaggtcgtggtcgtcgggtacaagaagagcgccatcgatctcgcacttgaatgcgcccaggccaaccaag

SEQ ID NO: 1912 - DNA, 1001 bp, Zea mays
  misc_feature (941)..(941): n is a, c, g, or t
  Peptide Sequence Number=SeqID_8318
  Probeset Number=SeqID_16315
gttgcctcacttccacagccgctacctctatctctcgtctgcgatcgtctctcccacacccctctgccccaactctcactcacctctaaaagcatggcggagcgcgacatggcgcaggacaaggctccagctgctgcgcgtgcgaccttcacccctgacgaggcgaccgagacctaggtcgaagactactaccgatgcgaacgctacgaataacctgcaccgccagcggaccttctggtaccacatctacaccaagcccaaccccgacgctgcgtggcgcacctccctcaaaactcgcgtacacctctcgacaccgcacgaggagctctgcggcttgtatgatcttgctgtccgccccatcaagcatactgtgactgctgatcttctgctattcgatgctgaaccaaagccagaatgcgaagacccagatcagtcgcaaatggtagcccaatggactgtcacatgcaacagaaacccatgctgtgagaccatgtggcttgaaacgttgatggctcttgttggggagcagtttgatgaaacagatgacatttgtggaattgttgctagtgtccgtccaagaggagataagcttgcattgtggactaggactgccagcaatgaagctgtccaggtacacattggcaagaaatggaaggatgtcatcgactacaatgacaagatcatctacactttccatgtcgtctcgagaagggattagccaagcacaggtggccggttcccccgtgtaagttgcagacgaagatggtcgttgttgtttggactggacagagggtgagagtggagttttgtgctgagttcggcgtgagctttcatttaattgagcctcagcttacttgaggcaattttcgcacctgttatgatgttgttttgctctcagataggtttatgtagcccaagaaagatatgttggagaggttganggttttgtgtgcaaataaatataaatatgttgacactcgcaccgattttttgagcaatat

SEQ ID NO: 1913 - DNA, 258 bp, Zea mays
  Peptide Sequence Number=SeqID_8319
  Probeset Number=SeqID_16316
gaccgttccatcctccctcaatccggcaagtggtgggcacctacgcgacggaggccagggcgctggcgctgaggctgctggaggccatatcggagagcctgggcctggagcggagccacatggtggcggccatggggaggcacgcgcagcacatggcggtgaactactacccgccgtgcccgcagccggagatcaccttcgggctgccgggccacgaggtctcccgtggtaatggtgctgcaggctgcagtgctagag

SEQ ID NO: 1914 - DNA, 586 bp, Zea mays
  Peptide Sequence Number=SeqID_8320
  Probeset Number=SeqID_16317
accaggacctgcccaaggtcagtttcaccaaggtttctacgaactgaagtattcgttcgacaccctcgacaatgtgtacttcccgcaccgcggcgaggatatcggcctgaccttgcgcaaatatgaccagtcgctggattccgaccaggattaccggcagtggatgttcaacctggacaaggctatcagcagcgggccgaacaccttcgtgctgggcgggcgctacgggcgcacgctggatgataccgaagtggtgacgtcgagcttcgtgctgggtggcgcgcgggagctgtcaggcttccgtcaggactcggtgtcggggcagaacgtgagcctgatgcgcatggtgtactaccgccgcctgacgccacgggcctacgtgccactggacttcccgctgtacatcggcgggtcgctggagcgagggcgtgcgtggaacaacgacaacgagttcgacagcgggtacatcaacgcggcgagcatcttcctggggctggagacaccgctggggccgttgaacttcacttatggtgccaacagtgcacatgagcaggcggtatacctgaacctggggcataccttctag

SEQ ID NO: 1915 - DNA, 268 bp, Zea mays
  Peptide Sequence Number=SeqID_8321
  Probeset Number=SeqID_16318
tgcaggcgtgggtggagaagcatgcggactccacctagcaagccgaatgctaattactggctgggtcagttgtttgacaacagaggcatcaaggacgatgcagcgtactattgagccactggagcttagaaactacccgaaatcgccaaaagcggcgaaggcacgtgttaagcttggggtgatcatgcaggcaaggaccgatacaacgaaggcgacagcggtctaccagcaggtggtcagacaggtccctactctgatctgctaagca

SEQ ID NO: 1916 - DNA, 576 bp, Zea mays
  Peptide Sequence Number=SeqID_8322
  Probeset Number=SeqID_16319
atggcggccagactggggaaaatgggcagcagcacgagtgaaaaaggagcaagaggaggaagggagggagggccaaacgccacctcgtgctgccccgagctcccggcctccgcagtcaggaacatccttctttctcccgagctcctactcctccacgtacgctcggagcttgccataggacgccagtcgtcagccatgaagcggctcctgaggcggctctcccgcacggtatcggtatcggtggcgggggaggacggaggcccggcggcgcggcccagcagcaaacacaagcaccggaggaggaggaaggggaagaaggcgggggcggtgccggagggccacgtgcccgtgtgcgtgggcgaggagggcggccccgcggagcgcttcgccgtgcgcgccgagctgctcggcgagccgcccttggccgcgctgctccgccgcgccgcgcaggagtacggctacgcgcaccctggcgcgctccgcatcccctgccccgtcgacgacttccgccgcctcctgctccgcctctcccacggcccctcgtcgcccgcgccggatgctatgcctagggcctag

SEQ ID NO: 1917 - DNA, 633 bp, Zea mays
  Peptide Sequence Number=SeqID_8323
  Probeset Number=SeqID_16320
agctcggtaccctggctgcagtgtcgccgtcgccgccgggggcgtaggaacaaaccactctactaggcatctgacagagttgaatctgatgatcggcgacgatggggcaggcccgctgaccaccacgaggcacgagcgacaacggaggcggagctcgaggagggccaagttcgccatctacaacgtggtggccacctcgtcctcgatcggagccgtgctgttcgtgctcttcctcttgttccgcggaagcctcgcctacatattcaccgacagtgacagcgacagcgacgacgaacaatctcgagatgattcaggaacaagatatcgtgaaggttctcattctgcgagttcttctgggcttggagaagatactgccattcacagatttgtcggatcaacggtgcaaaatgcatgccaccatgggttagtcgatccaactgtcaacctaaaggaggctatggatgatataaacgagatcaacgatatgtatagacgacctggcatgggtccgaagaagcatggcccatcagccaacgggccggcccggcacagccctctggatcacttttcgtgccgggccagctcgctaggcacgctcaaaaaaacgggccgtgccagcaccagcccgctaat

SEQ ID NO: 1918 - DNA, 264 bp, Zea mays
  Peptide Sequence Number=SeqID_8324
  Probeset Number=SeqID_16321
aagcagtgggaacaacgcagaggccttttttttttttttttttttttttttttttgggtttttttttttttttttttttttttttttctttttttttattagaaatattagaaatgaaccggggtcaaaatatcaaggatcagatacctatattcaaaaggggctctactaataagggcaagcaacaatgaaccctggaatagctggctagggacttccactaaatcacttgccccccgcggcccctgcgttgttaccactgct

SEQ ID NO: 1919 - DNA, 239 bp, Zea mays
  Probeset Number=SeqID_16322
gagaacccggatgcggtggcgtacgaggggagaagcacgcacttcggtcgcctccgagcgatcttctccggcagcggcggcggcgcagggacgcgcgggcgcggcgggcccatacgccgtgagtcgcgggccaagagatgcctgagcaagctgctgcgcagctttgggctccggtgcaagctgaactccacgagcgcaaagacgacgcgagctcgtgatccaagaggagctccaacagg

SEQ ID NO: 1920 - DNA, 559 bp, Zea mays
  Peptide Sequence Number=SeqID_8325
  Probeset Number=SeqID_16323
ctggacgatgtcgcagccccgcgcacgcagttgcccgcgcctgcaaggagtcccgagtccgatgtcgcacgacctcgagacgttcgcaaccccgcgcacgcaactcgccgcgcacgcaaggatcgacgagtccgatgtcgcacgacctcgacgacgtcgcaactccgcgcatgcaactgcccgcgcacgcaactccccgcccggacgcgcacccgcacccgccaggtggcgccccgcgcccgacgctcccgccaaccggcccgggggcgcacggcggccccgccccgcgcctccaggcccgcaacggggcacggcgaccgccgccacgaggcctgacggtggcagcggcagcgcagcgccgccgaacccgccgctgcggcagcagcgggtcgatcccgacggcgatgaagagcagcgtcaggtacgtgatcgagctgtggaagacccgcatcggctgcacgtgctcgacgtgctggatcgcccgcgagtacagccggtgcgactccacgacgaaccagatgcccccggccagtgcgaccaccgtgtagagcggccccat

SEQ ID NO: 1921 - DNA, 317 bp, Zea mays
  Peptide Sequence Number=SeqID_8326
  Probeset Number=SeqID_16324
agagttgtcgacgacgggagaagtggaccgccgacgagcacggccgcttcctccacgcgctgctgctgttcggccgcgactggaagagggtccatgcgttcgtcgccaccaagacgggcacgcagatacgcagccacgcctagaagcacttcctcaagaagctggactctcgcagctccgagtgtgccggccatcggctgcacggctactgcacggctgactgggcctagtgcgctgacgatggtggctcgatcccgggcgtcgatgtcgagacggttcagttccccctgtctccggacgacctgcgcttcgctcag

SEQ ID NO: 1922 - DNA, 283 bp, Zea mays
  Peptide Sequence Number=SeqID_8327
  Probeset Number=SeqID_16325
ctgcaggccgccaccgacgggttcaacgccaaaaacattctgggcaagggccggttccggaacctgtaccggggcccccttgcccaccggaccacggtggccctgaagccgcttaaggaccccaaccccttgggccaagcccaatttcccaccgaagtggaaattatcaaccttgccctgcacccgcaacttgttggccttgtccggtttttcgcccgcttgggccaaccccttcttgttttacccttacttcccaaacgaaaccttccgttccggcttgcaa

SEQ ID NO: 1923 - DNA, 228 bp, Zea mays
  Peptide Sequence Number=SeqID_8328
  Probeset Number=SeqID_16326
atgagccaaaaccttgccctgctgtcgcaggaagagaaagacaaagtaaacgtcgatctcgccgccgctggcgtggcgtttaaagagcgctacaacatgccggtgatcgccgagatggtggagcgcgagcagccggaagcgctgcgcgactggttccgtcagcgcctgatggcctatcgccaggcatcgctcagtctctcccgcctgccctacgaacctaagcagaaa

SEQ ID NO: 1924 - DNA, 245 bp, Zea mays
  Peptide Sequence Number=SeqID_8329
  Probeset Number=SeqID_16327
tgcagttttcagcataccttcgactgccttcagatgttagtcctcataaaagagatatgtttgtagaagaagttatgggactagtagagctaagagacttgaggtgtgctatagtgggcgctcctggggtaacaggcttatcatctgagcagcgaaaaagacttactatagcggtggaactagttgctagcccttctatcattttcatggatgagccaacaactggtttggatgctcgtgctgca

SEQ ID NO: 1925 - DNA, 463 bp, Zea mays
  misc_feature (425)..(425): n is a, c, g, or t
  Peptide Sequence Number=SeqID_8330
  Probeset Number=SeqID_16328
ggagccagacacaatggcaattgctgcaaatgatgcgcttaggccatcacagttttttgttttttcattcctcatttggtgtaagcacgctaaagtatcccttgcacacgctccttgcattcgactcaaggcagcacgctcttccagttgcatgggtcataacccgctcagttactaagaaggacacattgaaaacctggcttaaaaatgtaatcaagaaatgcagcaatgttgaggtgcagcgggaaatttttatcctacttggcaaaaccatatgcaatatatggagtgagaaaaaccctatggatgccctagggctattgtttcaaggctttgttggtccaacagcgttcatccaatatttcgcgtcattttgggttcccatcttggtgatgtggctcggctccatccaacgtctaccattngcaagtctggagtcgtgcggtgccattgtaggtttcct

SEQ ID NO: 1926 - DNA, 203 bp, Zea mays
  Peptide Sequence Number=SeqID_8331
  Probeset Number=SeqID_16329
ctgctgagtttctagcatcttacccagacatatgtacttatggtgttgatgacggtaacgcagatcaaattcatgttatcgtggcatctttgtatcaaagagatgcagaagaggttattctcgcaatgatgcattccccatgtcttcgtctccctgtgacatccttgggcggtccaagtctcaacgatggacggacaggggta

SEQ ID NO: 1927 - DNA, 292 bp, Zea mays
  Peptide Sequence Number=SeqID_8332
  Probeset Number=SeqID_16330
tgcatgcctgcagtcggtcacgctgggcggtaccggtaaaaccagcggcgatcgccatccgaagatccgtgaaggggtgatgattggcgcgggggccaaaatccttggcaatattgaagtcgggcgcggtgccaaaatcggcgccggttcggtggtcttgcagccggtgccgccccataccacggcagccggcgtgccggcgcgtattgtcggcaaaccagccagtgacaaaccgtcgatggatatggatcagcacttcaccggcgccgggtttgagtacggcgacggcatc

SEQ ID NO: 1928 - DNA, 541 bp, Zea mays
  Peptide Sequence Number=SeqID_8333
  Probeset Number=SeqID_16331
ccgcttcggcttcgccggctccgagtggggcgagctcatgggcgtcgcgaaccgcacggacttcgacctcaacaaccacatcgagtcgtcggggcaggacctccgctacttcgaccaggccgcgaacgagaagtacgtgccgtacgtcatcgagccgtccttcggcctgacccgtgcgctcatggcgttcctgctcgactcctaccacgaggacgaagccccgaacgcgaagggcggtgtcgacaagcgcaccgtcctgcggctcgacccgcgcctggcgcccgtgaaggccgcggtgctcccgctgtcccgcaacgagcagctgtcgcccgtggcccgcggcctcgcggacgacctgcgcaagcactggaacgtcgacttcgacgacgccggtgcgatcggtcgccggtaccgtcgccacgacgagatcggcacgccgttctgcatcacggtcgacttcgacaccctcgaggacaaggccgtcacggtgcgcgagcgcgacaccatgtcgcaggagcgcgtggcgctcgaccagctgcag

SEQ ID NO: 1929 - DNA, 450 bp, Zea mays
  Peptide Sequence Number=SeqID_8334
  Probeset Number=SeqID_16332
gagtgtttgctggtgaccgatgcccgcgcgctcggcaacgacaaaccgcatcatctgtatgtggcgcgcaaaggggatcaaccggtggccgccgcacttgagaccaccgcccctgacggctattctggcgcgatacagatgctggtcggcgccgattttcacggcaaagtgctgggcgtacgcgtaattgaacatcatgagacgccgggtctgggcgataaaatcgagctgcgaatttccgactggatcaacagttttaacggcaaagtggtgcacggtgccgacgataaagcctttgccgtgaaaaaagacggtggcgaatttgaccagtttaccggcgcgaccatcacgccgcgcgcggtggtcaacgccaccaaacgcacggcgctgctgattgaaacgctgccagcgaagctcgcttcgctgcctgaatgtggagatgcaccatga

SEQ ID NO: 1930 - DNA, 458 bp, Zea mays
  misc_feature (420)..(420): n is a, c, g, or t
  Peptide Sequence Number=SeqID_8335
  Probeset Number=SeqID_16333
tgcagcagcatacacgcgtgctggtggtgtatatcggcggcggtacccccgtctgctccacgctgctgatgggaccgcagtggcgtaatcagtccgatcgccgtgccagcctggttggccttagcggtttccgtgtcggcggtaccgacctcgatatcatgctggcattcaatacgctgatgcctctggtgggtctgggcggttatacgcttaagggcactgccctgcccgcgctgccgtggtggaacgcggtgtcgattcacgatgtgccggctctaagccccttttactcggctgccatcggtaagctgttgcgcgctctggtgcgtgatgccgaccagggcgatgaagtcgctcgtctgctgaaagtttggcccctgcagctgagcacccggctggtgcgcgtgtcggtcgcgggcntgattgataatagtaaggggcgcgagaccgcggcctag

SEQ ID NO: 1931 - DNA, 469 bp, Zea mays
  Peptide Sequence Number=SeqID_8336
  Probeset Number=SeqID_16334
tttggcatttcgccaggctgcaactcccccgactcaactgcgtcaccaagttcaactgcggcaccagtgcacgggggggaaatatttggcagtgaggtgcagaggattgatggaacaacacaactggactgggattcaattatagtttctgatgagttggatgaagaaggaagagaacaagttccatgcgaaaatgaggtatattgtaatcttggactcaattcagatgatgaggctgcaaaaaatagaaagtatgctagattttatagcagtggtacaacttctcattcgcaagaaagagtggatattgacaacgaagaccaccatggtgatgaggcatgtgaagactacattccagatgagaagagggtggtgtacaataggattaatccttctatgcagccaggttgtttgtttcctaacatgaaagaatttaggattgctatgcgtcagtatgcaggcatgcaaa

SEQ ID NO: 1932 - DNA, 270 bp, Zea mays
  Peptide Sequence Number=SeqID_8337
  Probeset Number=SeqID_16335
atgaccaggcgggggtcacctttctatgcccgtgtcgccgccgccgtgttcctgctgctgctatcccccgccgagacctcccagatcggactgggccccgccattgccgcctggattaacggatcgccggcggctagccctgacgccgacgccgccgtcgacgccgtcgccttgggcccgtggagccaggagtacgcggagctgcaggcgctgaaagtggccgtcaccgacgaccccaagggagcgctcgacgtctggcagggcgccaat

SEQ ID NO: 1933 - DNA, 430 bp, Zea mays
  Probeset Number=SeqID_16336
atgaggcggtcaagcgcccgcgttttactcatccacgcgcggcgtgagatgcggttaaggtgtggccacgacccgagatccgcgcgaggtggctgtggatccgcctggcgcggcgctttccgcgcgacgacggagaccgggaggtggaagagggtgattctgactgcgcggggcccgccacacagcgactttgagcgcgaggaaacagaacgaaggctacgcctggtgactgatcagtgggaccgagcattcagtgaggcgcgagaggagagggagcggccgacaagtggggcctgcgtgtcatcggtagcgctaaggaatggggagtctaacggggtggccatcctgtcagccgcgagcgcgcaggtgaggtggttgggccgcgcagcacacaggggaaagcctggctgggctgaaatgagtgctgcag

SEQ ID NO: 1934 - DNA, 381 bp, Zea mays
  Peptide Sequence Number=SeqID_8338
  Probeset Number=SeqID_16337
atgaactacctgagcctgatggacagcagcgacggccagggcgccgccgcgctgcgccagctgctgagcctgtacgctaatctcgccgaagcggcggtggcgcgccagattgacggtattcgccactgccagcttagcgcggtcaatcgccgggtgccggaaccgggcccggtggtgtttgcgcgcggcgtcagcatcacgctggaggtcgacgagcaggcgttttccggtgccagcccgtggctgctcggcagcgtgctggaacgggtgtgcagccggctggtggcgctgaatagctttaccgaattcaccctcaacagccagcagcgcggcgaggtaggctactggccgccgcgcatgggcaggaaggcgctgctatga

SEQ ID NO: 1935 - DNA, 1335 bp, Zea mays
  misc_feature (1)..(100): n is a, c, g, or t
  misc_feature (1310)..(1335): n is a, c, g, or t
  Peptide Sequence Number=SeqID_8339
  Probeset Number=SeqID_16338
nnnnnnnnnnnnnnnnnnnnnnnnnnnnnnnnnnnnnnnnnnnnnnnnnnnnnnnnnnnnnnnnnnnnnnnnnnnnnnnnnnnnnnnnnnnnnnnnnnnngccgggcaactttgcactcccacccctccatttccttcagccgccacagcattttcctcccttcttcttcctgcgcgcacgccagggcagggagcccttcttcccacggcttcagcgaggagctcggctcctcttccatggacgtcgcctcctctcccatggcgcggcgccctcccggctcctcctgcgagcggctgcagcagggagctccctctcctcccatggcgtcctccccttcttcctcactattcacagcagcagcacgctagcgcagggacagggacctccacggttgaacgccctccctgcgagctacctcctcccaggcttctcttgcgcagcgggacaagctcccatgggcgcccccccttcaggcttggcagcagggacatcgcccatccctccccctgctgttcttctcctatggcgtgctccccttcctcccctcggtcagcaatggcacggcgcccccttgctcctactctctcgcgcggcagcaactccctgggccggcctcggcgaggtccatgaccatggcgcccagcagcaacatctccttcccccaaactgctcttgccatggctggcgccctgcgcagcgcctctgctcagctacctctcccgcagccccacaacgttggcgcttcgcgggtgttcgatgaaatgctcgggtgaagcggtatgtcgtggacagcatgccatgaggcccgctggatgcttattgtgctgcgcagccccgtccacggcgtcgtcgaccctcgctagacgtcgatgttgcgcttcgtgccttgcccgttcgacgaaataccgagccgtgtggacagtcatgcgtgtagtcacgacccgttgaggtcgaatgacttacaggttataatacgtatgctttgactgatcgcgggcagtgcatgcctatatgagcagatggcttctagtcatttcgcgtttactcttattgatttatagtttataatacatatgctttggttgatgtcagacaatgcatgtatatatgtggatgtgtgtaatatgttttggcaatacatgttagagggatcgcgtttgcgattaaataacaagcggttgttgatgtgtgcgatttgtagttcgtctaattacgttttggtcgatgtggtgcatagtggtgtttaattagatgtgggcataaaatgtttggattatatgtcgtggcaaggtcgcattcgcgttttggnnnnnnnnnnnnnnnnnnnnnnnnnn

SEQ ID NO: 1936 - DNA, 778 bp, Zea mays
  Probeset Number=SeqID_16339
attgttgttgttgtatctagacctgtacaaggagaaataatcaaataaggaaaaaaacacaatgtgggaaagaaagctgtaatgtcgtttgatctagtttaagttgttgattgtaccaaaaaaaaaaaaaaaaaaaaaaaaaaaaaaaaaaaaaaaaaaaaaaaaaaaaaaaaaaaaaaaaaaaaaaaaaaaaaaaaaaaaaaaaaaaaaaaaaaaaaaaaaaaaaaaaaaaaaaaaaaaaaaaaaaaataaaaataaaaaatataaactgggccccccactgcattaccatgtcccccgcccccggatcatttttcttgcgccgccctcctttggcaagtgaaagaacgctcctttattggatcgacctaaaacctcatggtgtcaaaaagagctactccgctttcctgggctcaaaatttcccagtcggttggattacaaaatgtctccgcgggcgttctctaagtttttgatgtatctcctctctcttggcatcgcctcaccaacatgtttttacagggcataagcctcattgtgtttattgcgaaaaaacatgtgctcacactgtgcacatattaccgcctcactcccgggatgctggtggttcttctttcgcgcccggtggtgcgatttcttttgctccccttgtcagataccccccgtgtaggctctcccaggggggcctctcgtgtttgtaacaaatacatttcaggtgtttccccgtctgggaaaataggtggttccaacggctgtttcccggcctataacaaaaaacga

SEQ ID NO: 1937 - DNA, 303 bp, Zea mays
  Peptide Sequence Number=SeqID_8340
  Probeset Number=SeqID_16340
gcatgggggctccagcgcgggaaagtcggatctctgttgcggtcactcgctcgacgttgtgggccgtccgggtttgcaccaatccggcctcatgtcgctatgctttgctggttgtcttctccccaggcttagtatatatgggtggtccgacctgggacgtgaaggtcgggcggcgggactccacgacggcgagcttcagcggcgccaacaacaacatcccgccgccgacgtcgggcctcgccaacctcacgtcgctcttcgccgcccaaggcctctcccaaaaggacatggtcgcgctctccg

SEQ ID NO: 1938 - DNA, 500 bp, Zea mays
  Peptide Sequence Number=SeqID_8341
  Probeset Number=SeqID_16341
ggcgggaacaaaaggcgagagagggcggtgtcagcccagcaagcgggctgcctcccaccgctgcacagggcgcgcgggacaacgggccgagagagcaagcgccggaaatgtacgcggcacagaggcaaccctacacccgaaaacgatgggacgacgacaacaagaaggccaggacgcagggtgacacccgcatgcatgcccaaggcgatagcgaaggatcatccacaagacccccgcaatggccagggggagcgccgagcccagcagccggagcacgcggagcgcccgagcagccgaacaggcaccagcgcagatgacaagggcaccactccagcgaacggcacagggcagggagaagcggaggccagcgccaaagagagcgcatcaggcacacggcgcgcacgtagccgccgagggggacagaaagaccacggccgggcggctgcaaggaggcaagcctggcacaggcccgcgaccacaacggggggaccgggaaaacc

SEQ ID NO: 1939 - DNA, 239 bp, Zea mays
  Probeset Number=SeqID_16342
ttgtttgtctccgctcgcccgcgccgggttttggggtgcttctcatgtccggcgcgcggctggggctcttcggggtttcgttcctctgtctctcgccgcggtccgtgttgcttcctttggttcttttgtcctgcggctgctgctcggttggcgggtcctttttgggctgctccctgttttcgggggggtgcttctgtgtcgctcctcgcttggtccggttcgctggcttctgcctggcc

SEQ ID NO: 1940 - DNA, 560 bp, Zea mays
  Peptide Sequence Number=SeqID_8342
  Probeset Number=SeqID_16343
cgggcgcgccgagcagcatctggtacgccagattttgtccggcctgacgcgctttaacgcggatgatgtcgagggcgatctggcacatcactggcaacacgatgcgcagggccgcgaatggtatttctggctgcggccactgctcagctggcacaacgacgaaccggtgcaggcggcacagctggtccagcagttgcaacgtatcatgcagacgccgcatggcggccgtctgctggcggcggaggaacacatcgatgcgccacatccgctggcgctgcgtatccggctgcgcaccagcgattactggctgccgcagcggctggcgcatcagttttgcctgctgccgcatccggaacatgccgataccggcagcggaccgtggcgcctgacgcactttacccgcgagctggtgcggctggagagccatgcgcgctggcaccatcagcgtccgctgattcatgtggtggaatactggattacgccgcacctgttcgatcgcgggctgggcaccagctgtcgccatccggtgcagatcgccattggcgatcccgacgagctgg

SEQ ID NO: 1941 - DNA, 513 bp, Zea mays
  Peptide Sequence Number=SeqID_8343
  Probeset Number=SeqID_16344
atgacagtgatcgcgcaggggcaacggaacgggcacggccacacgggcgttggagattggagaaaaagcgcagcgcaggcgaaaagggggccgaaaaggcgagagggagagggggaatccaccgcggtgctgcctggcggtatttgtattgcacttgcacttgcaccgagccagagtccgtgcggcgacgttgaatggcgcctggagaggaggctcgggtcaacaccgggtgctgggttggtggcggtgctcgcgcacgacgcgaacttgccgggcacctactgccgtctcggcgagacacaaaagacaacacgacggcggcgtacggacggacggatcgacagctacgtatgtgctgctactagaagtagaacagacgcagagacggacgggaccggagccagacggccggcagaaatgatccgggccgggacctcccgagccatttctgctggattggaggcttggagcgctcagagctgtatttcggcatgtgatcggtttccgaacgat

SEQ ID NO: 1942 - DNA, 285 bp, Zea mays
  Probeset Number=SeqID_16345
ttagaacgtgacgtcgacaccgccgcgcagcaccttctcatcgccgcgatcggccacgtggcggtcggcacgcaggaacagccgcgcgcgtgccgactgcacccgatcaacccgcgcaccaaaccactgcgagcggcgatcgagctgcatacccgggatggtgaagctctgctgaccgctgccgaagccgctccagcgcgcgctgacgtccatcgacggattgctgaacgcgtactggtattcgccatacaggctcagcatggtccaccagcccgccgaccagtc

SEQ ID NO: 1943 - DNA, 630 bp, Zea mays
  Peptide Sequence Number=SeqID_8344
  Probeset Number=SeqID_16346
atcatcacgctgggcgccacctcgtggcgcatccagcaaattaggcatgatcaggtggtagtggtgccggcacccgttcgctcagcgcgcctgcccttttggcacggcgacagtctcgggcgttcggcgacactcggcgaagccattggccgctatttgcgacatgccgccagcggggtgttgcccggcagcgacaaccttgacgccaatgcccgacacaacattcgtgcgctcatcgacgaacagattgccgccacaggcttggtgcctgacgatcgcaatttgctgattgagcgctgtcgcgatgaaaccggcgactggcgcgtgattttgcattccccttatggtcagcgtgtgcatgcgccatgggcgctggccatcgctgagcggattggccgccagatgggcctcgatccggccttggtcgctagcgatgatgggattgtcgcgcgcttccctgacagcgaaggccgggtgccaggcgctgaactgtttttgtttgcgccggacgaactccagcgacaggtgacggctgcggtgggacattctgcgctgtttgccgcccgcttccgcgaatgcgccgcgcgcgccctgctgctgccgcgccgcaatcccggtaaaaaatctcca

SEQ ID NO: 1944 - DNA, 513 bp, Zea mays
  Peptide Sequence Number=SeqID_8345
  Probeset Number=SeqID_16347
gccgcgcggaaagggaagcggggccgggggcgcagcgggaggagaccaacgcccaccagagcggcggaagcgggaacaagcaccggaacccgcggggcgaggggcggcaccaaaacaacacaaggcgaggaaacggcacgggcaggccgggcggcgcgcacgccaacccagcaagaacgacgcggcggacgcagaacagcgccccagagcggacaacgcgagagagccagagcgcaaaacaagcgtatgaaggcgaacagggaaacgaggccaagaccgaggaaacgggagccgcggcagccagacgcggcggcgcgcagcaggagcacgagacaccacagaggggacaagggacaaagaagaagaggcacaaacggccgacccacgccaacccaagcgaacgggcagccggaggaaagcaacagaacgcaggcaaggccggcacaggccgcggcgagacaacgaaaacaccgggaaaacccagccgaaacgcaacgcaaaacaccgcagcac

SEQ ID NO: 1945 - DNA, 314 bp, Zea mays
  misc_feature (80)..(80): n is a, c, g, or t
  Probeset Number=SeqID_16348
cctttatcatcgctctacttaattttgggcaacggccaagacggatctcatgtatcaaccagtcgcgttattcatcggtntgcgctacatgcgtggacgtgcttcagaccgtttcggtcgtttcgtctcctggctctcgactattggtatcacgctcggcgtgctggcactggtgacggtgctgtcggtgatgaacggctttgagcgcgagctggaaggcaacattctcggcctgatgccgcaggcgctggtgaccagcgacaccggcagcatcaatccgcagcagatgcgcgcacaggaatcaaacgcaggca

SEQ ID NO: 1946 - DNA, 518 bp, Zea mays
  Peptide Sequence Number=SeqID_8346
  Probeset Number=SeqID_16349
atggcgaagcggttcgaggcctcgctgttccgcgccgacgaccgcgccaactaccagcgcttccagacggcttacaaccgctaccgtccgcagctcgtcgccattgcgaaccaggtcggcacgtcgcgcagcgcggcgcaggctgcgttcgtgcagatgacgccggtctggcaggacgtgctcgataccgccaatgcgctcgtcgcggagaatcgccagcaggccgatgtgtccgcgcaggcgatccgcgattcggtgagcggcgcggaaatcacgctggcgacggcgctcgccgtgatgctgctcgccgcgctcgcgacgggctacagcctctatcgcgccattaccgtgccgatgtcgcggctcgtggagatccacgacacgatgagcacgggcaacctcacgcagcgtctccggcttggccggcgcgacgaattcggcgtgctggagggcggcttcaaccggatgagcgacgaactcgcgagtctcgtcgcgcaggcgcagaaatcgtcgctgca

SEQ ID NO: 1947 - DNA, 383 bp, Zea mays
  Peptide Sequence Number=SeqID_8347
  Probeset Number=SeqID_16350
cgaaatgattatcctcaaagtgttatggcggaagctgtccgtatagctcccggtaatgaccagtacgatagcacattatattaaacggcatcgccgtgaaaacccaacgttaacgaagaagctgtatatggcacaacaagttcaactcaccgcaacggtgtccgaagcacagcttggacaacgcttagatcagactttggcggaattgttccctgattattcacgttcccgcataaaagagtggatccttgagcgtcgggtcagcgtcaacggcaccatcatcgataaaccgaaagagaaagtactcggcggtgagcgggtggcgattgatgcccagatcgaagaggagcatcgctgggaagcgcaaaatattccgctggata

SEQ ID NO: 1948 - DNA, 210 bp, Zea mays
  Peptide Sequence Number=SeqID_8348
  Probeset Number=SeqID_16351
ctgtcctcgaacctatccagacaggtcttaaaatcagtgaatagaatggttccaataggctctggtcaacgaaatcttataattggggacagaccaagtggaaacccagcaatagctatcgatgttatattatgccaaaagcaaatgagctcgaggggcagaaatgacactccccccctccatctctcacacatatttctaggctggcag

SEQ ID NO: 1949 - DNA, 273 bp, Zea mays
  Peptide Sequence Number=SeqID_8349
  Probeset Number=SeqID_16352
gccgtgcacgcgggcttcgggttcctctccgaaattgcgcgtttcgtccgcatcctttcgttgcacaagttccccttcatcggcccctcctcgctccatatcgaggtcatggggttcaagatcgccgcctagtaggcggcggtggccctgggcattcccgtcgttcccggttcggaaggcgcagtgcgcctcgaggtcgaagcgcggtccctcgccgccgagttcggctttcccgctctgaaaaagacgtcggccggcggcggcgggcgcggc

SEQ ID NO: 1950 - DNA, 203 bp, Zea mays
  Peptide Sequence Number=SeqID_8350
  Probeset Number=SeqID_16353
catatggtggcctgatatatgagctccaatgtttagcaaaaagaatcgtcagcctttgttgtgttgcatctggatgcaagcgtaattggagtgaattttctcatgtccataaaaaaatgagaaaccggttagagcaccaaatgttaaataagttggtatatgaggatgaagaagaatctattcatactgcggatggatgtgca

SEQ ID NO: 1951 - DNA, 366 bp, Zea mays
  Peptide Sequence Number=SeqID_8351
  Probeset Number=SeqID_16354
agtgctcttcatgtgattaatctcatatcactgttatagatcatggaggcgtgtctcgtgtatgtcggagtataggaacgcgctcttgtaggaaatgttctttatatgtgaatgtaggaatctggagtgattaaagtgaaaaatattgtgaggactcaaggtaggtctagtgtatggcccaaagaattaccgccgggagattgtataagagatgggtttactgccctatactatagccgagatatatcccagatgtgtaatatacgcaaacgtggtttattctatcgaaaatattttgtttgttcacagccggttatagtgcctccgagtcgcttatagagtacccccgggcccaaggctggaatt

SEQ ID NO: 1952 - DNA, 319 bp, Zea mays
  Probeset Number=SeqID_16355
atggcatggtgcaccgacccgtccggcaaccgccacgaactgtactggggcgcacgctgcgacttccgccgcttcgtgtcgccgctgggcgtcgcgcgtttcgtcaccggcgacatggggctcggccacgcggtgctgcccgcgccgcagttcgatgcgaccgacgcattcgtgcgcggcgtgctcggcttcgagctgtccgacatctaccgcgtgaagttcacgcccgatccggccgaacccgagaagcgcatccacttcatgcactgccgcaacgcgcgccatcacagcctcgcgctgttcgagatggccgcgccgt

SEQ ID NO: 1953 - DNA, 479 bp, Zea mays
  Peptide Sequence Number=SeqID_8352
  Probeset Number=SeqID_16356
cccctgagtttatacaaactactgattcaagactgcggagtagattcccacaaaaacagtacttattctggttccgggagccatatgcgactgttgttcttgttacttgtgaggaccttgatgaattcaagaccattcttaagcctcgcctcaaattaattgtgcaaaatgatgaacgagaatggttcattgtgtttgtgtcgaaggcccatcctaacaatgatcaagcaactaagatggcaaagaaagtatatgctaggctggaggctgatttcaacaccaaaaagagagaaagatgctgcaagtttgatctccatggacctgacacggaattctgggatgattttgactctaaaatggtggactgcatcagaaacactttggataggcgggttcagttttatgaagaggaaatacggaggttaagtgagcaacggttcactccaatatggaacttctgcaacttcttcattctgaag

SEQ ID NO: 1954 - DNA, 489 bp, Zea mays
  Peptide Sequence Number=SeqID_8353
  Probeset Number=SeqID_16357
atgccgatgccatcgaggccaagcttggatgacgcggagggcccatgtggtgggtgggtgggggagagcggcgatggcacgctgagatgcgcacgctatacaccgatgggggagggggactcgacaggggaggtcacgagtcgtcggaagctgcagcttggtgaccgtgggaagggacaagatttgtcgtcgcaagcatgggggagcgtcggtggcaacataccttccgatgtagtccctaccggcggcgaaaatctagatctcgagcgagcggggaaggaggtgctgagcacgagggtgagatccgggtctagggcgcatgggggtgggggcgacatcgacggtggagcttgcgtgattgataggagcgggggcacgatgtcgtgggtggaggcgcgagcgcgagcatccttgggaggtggtgtcgcgggcacaacgacgaaaatggaggaggcacgacgcgagattcctgggaggcggaggcgcgcg

SEQ ID NO: 1955 - DNA, 356 bp, Zea mays
  Probeset Number=SeqID_16358
ccgagaacggggggggccgggccgaaaaaatggcgggcccgcccaaggcggcgagaggagacccaggcccgagaacccagcgggggagaccgacagagggagacccgagcgcccacactggaaggcaagccgaacaaaaaggcggggccacagcacccaaaccgcgcgcgcaaaggacccagcgggcacaagaagggacaacccacaccggaaggaccgccaccgacgcgggaaaccgtggaaaaaccccaaaacaaagacgcaccgggcaacccacaccggacaagcaccccccaagaaaaaggggcacaaaaaaaaagcgcccccaaacaaagggcgcacgcaaagcagccggc

SEQ ID NO: 1956 - DNA, 850 bp, Zea mays
  misc_feature (1)..(28): n is a, c, g, or t
  misc_feature (629)..(850): n is a, c, g, or t
  Peptide Sequence Number=SeqID_8354
  Probeset Number=SeqID_16359
nnnnnnnnnnnnnnnnnnnnnnnnnnnngttccatttgttccgtccgcgctcccggagcgacgtgctcctctccttcctctctcttctccagcgccttccccctgctccctcttatcgtctccgcgctctaaaatggcctcacactccgccacacagtaaacaaaacgacgggcccactccccgacggctgacgccctcccacggccccttccatgaggcagctgcacctctcgccgcagctctccccctccccggtcctctcctctcacttctcgccgccgccggcggaggcctcgtcctggcggcggcggctgcaccgaggacgggccttccagccgccgctctcctcgctgcgggatcccaacaasgccacgctccgcaaggcctcgtccaacgtccccttccgcctcggcggtggcgggagcggcagccccaaggaccgccgccccgccgacgacgacaaggaggaggaggaggccgagggcgagggcggcgcaagagcactcacggagacgctggtcgcaggagcgctactggtcggtttcgtaggggggattggggcggccggatacatgtacaaggaccagatcaacactttcctgacgctgctttcacggtacattgacgnnnnnnnnnnnnnnnnnnnnnnnnnnnnnnnnnnnnnnnnnnnnnnnnnnnnnnnnnnnnnnnnnnnnnnnnnnnnnnnnnnnnnnnnnnnnnnnnnnnnnnnnnnnnnnnnnnnnnnnnnnnnnnnnnnnnnnnnnnnnnnnnnnnnnnnnnnnnnnnnnnnnnnnnnnnnnnnnnnnnnnnnnnnnnnnnnnnnnnnnnnnnnnnnnnnnnnnnnnnnnn

SEQ ID NO: 1957 - DNA, 258 bp, Zea mays
  Probeset Number=SeqID_16360
ggggaggggaaaaagaaaaagatctcctccgaaattcgatcgcgcagcgtcgtgcagcatgcacgtcagcatcgactccactacggaaaaggtctctcggcgtcggcggccaccgtcaccggtgcggtttttccgatcgtctctgcgtgtgccaggagcggccgccgccagctcgtccctgtgccgccgcctagtagcgcgcggagcaggagggacagggacaatgcaagggattgggataggagcgtccagcagtag

SEQ ID NO: 1958 - DNA, 255 bp, Zea mays
  Peptide Sequence Number=SeqID_8355
  Probeset Number=SeqID_16361
gtgtgggatgtccttagcaaccaggaggccgttgacatcgtgtcgtcatcccccagccgatcaaaggccgcgagataaaaggttgaggccgccgctcgtgaatggaaagccaagtacccgacatcgaagaccgacgaatgcgcggtggtctgcctatacctggacggcaagatggaccaggaacgcgactcgacgggggccatggaccacatcagcctggacttccaagggccagccgaggacccgaacgaagcg

SEQ ID NO: 1959 - DNA, 326 bp, Zea mays
  Peptide Sequence Number=SeqID_8356
  Probeset Number=SeqID_16362
atgagccaagccgaattcgaaccgatcgtctacctcagcgtgtcgtcgcaggaggagctggtgccgctgtcgcaagcccgtgtcccggtgctcgaccgcgggttcatcttcggcgatggcgtgtatgaagtcgtccccgtttatgcgcacgacggcgcgcacgtgccgttccggatcgaacagcatctcgaccggctcgcgcgcagcctgaagaagatcggcatcgacaacccgcacgacgcggccggctggcgtgcgctgatcgagcgcgtggtcgccgcgaacgcggaaggtctcgtcgatgccaacgcgctcgtctacctgca

SEQ ID NO: 1960 - DNA, 250 bp, Zea mays
  Peptide Sequence Number=SeqID_8357
  Probeset Number=SeqID_16363
atcctctaggtcgacctgcagatctgcctcgtcctcgtcgtcacccgtggcctcgcctacctcctccgcccgctccgccagccccgcgtcatcgccgagatcatcgtaagcgccgctgccgaagttacccttgatagattgctcgtccttcttcgttctatggatggcctacacgtcatatagcgtcactttattttgactcgaacgaacgagtacacaacgcgtagtttttcgtacgagatgacctgca

SEQ ID NO: 1961 - DNA, 388 bp, Zea mays
  misc_feature (25)..(25): n is a, c, g, or t
  Probeset Number=SeqID_16364
atgaagatcgtcgccaagcgcatcnccgcctacgttgtctgtggagctctgtacggtctgcactacgacattcacgctgcgcaatctggcactgctggaacccccgaaggcgcacgcatggagcgtacgtacgctcacgctacgaagtattcagacgaagttgaacattcgtactctttcgttcaggttctcactgcctgcactgcctctttcgctcacggagccaacgatatcggcaactctgttggcccctgggccgttatctactccgcctggtcgactggcaacgccgcagcagccaaggcccccgtgcccgtctggcagctcgcagttctcgctctcgtcatctcactgggccttgtcacctacggctacaacatcatgaagg

SEQ ID NO: 1962 - DNA, 534 bp, Zea mays
  Peptide Sequence Number=SeqID_8358
  Probeset Number=SeqID_16365
atggtgatctcacgggcggtcaactacatgctcaactacgtcccgacctacgcaactaaaaacctgcatctgccgggctcggtggcctttaccgccacgttgctggccggagtgattctgacggtggtgacgccgctgatgggatggtgggcggagcgcattggccgcctgccgctaatgtggggatcgctcatactgctgatggtcaccatctatccggcctttcggctggtggtcaatcacaccacgccggccacgctgattgtgctggtatgctggatggcgctgctgaaatcgatctatttttctaccgtaccctcggtgatggcggatctgttcccgattggtacgcgcgccagcggcatggccatcagctataacattgcggtcacggtgtttggcggttttgcgccgctgatttgcacgctgctgatcagcgctaccggcaccagtctggcgccgggctactacctgatggcgatgtcgctcttaagcggggtagcgctgctgcgcagtcagaaacggatacgctaa

SEQ ID NO: 1963 - DNA, 626 bp, Zea mays
  misc_feature (601)..(626): n is a, c, g, or t
  Peptide Sequence Number=SeqID_8359
  Probeset Number=SeqID_16366
gacgaagccggacaagaacaagcgggcggggcgcagcggtagcggcgggcgccggcggcgccgtttcgacgcggagcgcgcgttccgcgcggagctgcggctgctgtcgacagccgcacgtgaaccaccgcaacctggtgcagctgctgagcttctgcaagcagcctgggtaccttcccggactggatggtgacgtcacaggacaacggcagctcgctggtgctgaaccctcctccagctctaacctgaccgagttcttgcagttcagcctggggcaagtgagcctgatgcagtggtcagaggactctgcagcggcgaacacgaacagcagtggctgggtggctcgctggaccttcccctcggattgcaaatccaatggcttcttctgcggtagctttggtgcttgcaggagcaatggagaatgcagctgtgtcggcaaggaggtgcacttcttctacgacggcgacggtgaagaggagacgcacccgcaggccggcgacatccgccgcgtcctgagggacgtggagacgaggatgccggagcagcttgggtacaatgtcagcgacctttccgacccagccactcaacgctacacctttgnnnnnnnnnnnnnnnnnnnnnnnnnn

SEQ ID NO: 1964 - DNA, 235 bp, Zea mays
  Peptide Sequence Number=SeqID_8360
  Probeset Number=SeqID_16367
tcaacctcaccgaccacatcatctcctacaccaacggcatcatctcacgcatggtgttcggagggatcggctactacaacggtcccgacggcggcggcgagaagctcgcgaagttgttcgccgactttgaggggctcctggggacgtcaaccggtggcgggaaggttcgctgcctctggtctggctctgggtatcacagcgcatcatggggtctggacgccaaggccgcacgcac

SEQ ID NO: 1965 - DNA, 225 bp, Zea mays
  Probeset Number=SeqID_16368
gccagggggacccgggacaggcagccagcaagcaagcacgctcggcaaaagccggcaccctacaacggcgagacagggaaaacccaggggacacccaacggaagagagttgcaacacagcccccgcccgccagcaggcgacagagggaagaggacggcaccgagcgcccgaccgaaaaggggcccagactgaaaaggcaaaggggcccgaggcggcaagacccac

SEQ ID NO: 1966 - DNA, 353 bp, Zea mays
  Peptide Sequence Number=SeqID_8361
  Probeset Number=SeqID_16369
atgctcgtgcgcatcgtcaacggcacgctgcgtccgaaggacaagatcaagatgatggcgaccggcgcgcagtatccggtcgagcatatcggcgtgttcacgccgaagtcgcgcaatctcgaatcgctgtcggccgggcaggtgggcttcatcatcgccggcatcaaggaactgacggccgcgaaggtcggcgacaccgtcacgcatgcggcgaaggccgcgaccgagccgctgccgggcttcaaggaagtgaagccgcaggtgttcgccggcctctatccggtcgaggcgaaccagtacgacgcgctgcgcgaatcgctcgagaagctgaagctcaacgacgcgtcgctgca

SEQ ID NO: 1967 - DNA, 429 bp, Zea mays
  Peptide Sequence Number=SeqID_8362
  Probeset Number=SeqID_16370
atggagctcgcgaacggcgtgctgctcgaggcgcacggctgggaggaagagctgcgcgggttcaagtggcacgacctgcggccggaccgcgcatatctcgacgacatcgagaacaaggagcgggtcaaggacaaggcccaggtcgacgcatcgatgaaaaagctctacctcgagctgatgccggccatggataaggtcaagggcaagatccgcatcacgggcacgccgctggccgagaattgcatgatcacgcgcctgcgcgagaacgcggactggaccagccgacgctacccgatctgcaacggcgatattgacgacccggacacgaaggcaacctggccggagcgctacccgatggagtggattcgccgccaacgcaacgaggcccagggccccagccagctgatcggctttgggccggcaactgca

SEQ ID NO: 1968 - DNA, 216 bp, Zea mays
  Peptide Sequence Number=SeqID_8363
  Probeset Number=SeqID_16371
atgcagggcgcacttccccacggcgctgctttcggtctacgatgcgcgcgcggtctcccgttcgacgagatgcccaacccgggcctcgtctcccgcgccgccataacgtgcgcagcccaggtgctcgccgtgttcggggacatgctcgcggacggcgtcctcctcgacaacgaggccgttgttctagcttcttcgtacgcgtccattgacacttga

SEQ ID NO: 1969 - DNA, 377 bp, Zea mays
  Probeset Number=SeqID_16372
acccagcccgggccaggggacccagaggaacagagctggaacggagccaagccaccacacccaagaggagagggatgccgaaccaacaagcgaacaaggcagggaggggaacgtagtgggaaacaaagcccaacgcgcccaacggagggaggaccaacgaagcccgcccgcccaaaaaaaaaccaaggaaggaccgacggacggcaaccaagaaggaagggataagacgaacacggacggacagccgagagagggaggcacaaacaaaccaagagagggagcagccgcaaaaaacgacgggcgagcgaggaatgagtgcccacgcggcggacatgaaccaaccaaagagaaagaaaacgcaaacaaacaaccatgca

SEQ ID NO: 1970 - DNA, 283 bp, Zea mays
  Peptide Sequence Number=SeqID_8364
  Probeset Number=SeqID_16373
cacccagcgcgaaccccccaaacgcgtccggcagagcgccagaacacgacctctgcccccccccagaagaggtaccatttatctcagtatttgcattcgcttgattttgcagaattacacaattttgtgctgtagttgttttgaacagtatattccttttgaaactatgcaagggaatttagccgccagcaagagttagtaaaaaaaagatgtttgtagggcggggggggtcgctgttttttttacggagccagcgttaggctcaggtggctgttagagcggt

SEQ ID NO: 1971 - DNA, 390 bp, Zea mays
  Probeset Number=SeqID_16374
gctctccatggttctccagcagttgggattgtttttaattcttttctgatgccctatgttcctttcagatttggtcaacttggagtgcttgaacttggactcatgtaagattggtgatgagggtctatttcacctaaaaggcctcatacagctaaaaaacctggagctttcagacactgaagttggaagcaatggacttcgtcatctttctggttgatttaaaacgccttctggttgatttaaaacgcctgcagaaatgctagtattattggcaattgtttttttcttgttaatccattctggtagaccaattcaaatcgtctagtagttttttaatttattgtgtgttcggtttgaggaatgggctggtccatcattttctcctttact

SEQ ID NO: 1972 - DNA, 491 bp, Zea mays
  Peptide Sequence Number=SeqID_8365
  Probeset Number=SeqID_16375
aaggtttaattaaaaggtgtgggcccctatggaatttaataaattagtctaatgattttaaacaaaaacattggagtgtattagtgtccgtggggcttctcaggccgaagaatctagctttatttaaacgaaaggaggcgctcaggctactatctagccttttgtttatacacgaggagctttcaacgatttatcgatatagttagttgaaatctgtattgttaagaaatatacacgcgtcaaccttcgatctatattgtatgaggatagttgaggtttatttacactatgaaagctctctgcccgtctttagggacctcaggggagtgtagtacggccatggaccgtcgccgtgacacgtgacatggcttagtgaggtcatggctccactcggcctagacgtcgcagtcggcgctcattttgtggcagaccattattagctagagcttcaaccatcagtccttgagtgtattcgcacagagcacatagcc

SEQ ID NO: 1973 - DNA, 520 bp, Zea mays
  Peptide Sequence Number=SeqID_8366
  Probeset Number=SeqID_16376
ctacacggcaaaaataaccacgtggccgcacgtgacgatactgtcgacgcccgggatggggcacctgataccgctgtcgtagctgacccagcggctggcatcgcgacacggcgccacgtccacgataatcacgttcgcgtccacggcgttgcccacgcagcgcgcgttcctgacctcgctaccgacctgagtgtcctcgctgtccctgccgccggtcgacctgtatgacctgccccgagccgccgccataaatacgcgcatgtcgcaggagtgcgcgcgctcggtaccggcgcagacggccgtcctcgcacacctcagacggagcacggccgggcgcctggcggcgttcgtgaccgacctcttcggcgccgactcgctgaacgcggcccgcgccgcgggggtccgccgcaggtgcatcttcttcccatccaacctgcacgtgctcacgctcatcctccacctgccggacctggaagccgccgtgcccggcgagttccgggacatgccggagccgctgcgc

SEQ ID NO: 1974 - DNA, 419 bp, Zea mays
  Peptide Sequence Number=SeqID_8367
  Probeset Number=SeqID_16377
tgcagcgcgctgaacgcatcggcagcgtgctggatttcgatccttccgataacgctgaagtggcgcaggtggttgagcgcgtgacgcagacgctgatcgatctggagagcgagctgaatgcgctggacgccaaagtcggcgatggcgataccggctcgacctttgccgccggcgcgaagaaaatccagcgcggcctgcgtgaacagcagctaccgctggatgagctgcctacgctgctggcgctggtaggcgaacagctggcgacggtgatgggcggatcgagcggcgtgctgatgtcgattctgtttacttcggccggacagcagctggaggagggcagcacgctgccgcaggcgctgatgcacgggctggaacgaatgaagcactacggcggcgcgcagccgggacatcgcaccctg

SEQ ID NO: 1975 - DNA, 268 bp, Zea mays
  Peptide Sequence Number=SeqID_8368
  Probeset Number=SeqID_16378
tgggatgttggttttgtgagaatcgtgtcgccgggacagcgggtggtgagactagcctcagcgacgcacggcggcgacggcgacattgccggcctcatctactccaactacgtgccaaccgacgccaacaaggagaatgacacaggagcgcgggctcatgctacagccgcgccacgccgagacgacacccagagcaacgacggctgcgttccgcgccacggccagtcgctcacatggattcatggagtggaggccaacggtggcagaa

SEQ ID NO: 1976 - DNA, 483 bp, Zea mays
  misc_feature (440)..(440): n is a, c, g, or t
  Probeset Number=SeqID_16379
gctctgatctctagcgacctctagtctgatcaaaagcctaaaggcgagcacggaacatcaaaaagcggagggctgagatcagaaattaggccttagcgtgctcccgttcaaggtaccatttatctcagtatttgcattcgcttgattttgcagaattacacaattttgtgctgtagttgttttgaacagtatattccttttgaaactatgcaagggaatttcgccgcccttaaaacatattacagaaaaaaagctcctttgcggagagggggacaaaattttttttctttacaccttccaccacgtagtgctagcaaagcactggtgcctacatctacccttgcccctccaacatccgttcagccctcttactgcagttacactctggtgcattatgttgacaaacaacatctacgctcaacaacagactaccagcttgncgtatccgaaacctatgcttttctacttctcagcaaactagca

SEQ ID NO: 1977 - DNA, 297 bp, Zea mays
  Peptide Sequence Number=SeqID_8369
  Probeset Number=SeqID_16380
tcttgtggggtttcaggttggttccgtctttggccgtttgtttgatcggttgggcgctcgtttttgagttgtgtttcactgcccttgctatggcgggtttcttccgccatgttcttgagcctgtcgtgcttttttttatggctgctctctttcgttttgttcgtgcaggttctgtggtttccgcctttttaggcggtgtgccctccgctgtgggttctccccctccccttcgttcagctatgggttctttgcttggcaaaactacttctcccctttggggttctatttcttcgctcc

SEQ ID NO: 1978 - DNA, 1137 bp, Zea mays
  Peptide Sequence Number=SeqID_8370
  Probeset Number=SeqID_16381
cacatcggcgcatcgtacaagaagagcaagctggcgagaccacgatagggccctagaacgttgggaggaggccgacgtggtacgcagttggttatccgccatcgtggagcgtaattgcgccctgcgacgccgaagaggctccacatccttctgcctcccccgcggtggcttggtcggcaccgctggctccaccaaagagcgtcgcggccgtcgcgaagaagccaacgtgttctgtgcgcttggagtcggagcaaaaatggaggaaccagcggttgatccgggcatcacgttcttctgcctcgccacaaggccaagcaaaagaggtatgtcatgaagaagatcaaccgcttaccaagaggtaacacatgtgctcataacacaggaagacaagaagactcttctagagcgggacacaatgatccaatacccttccttccaccgtggctgaggagcaactctccctcgctgtcctcttcctatcattggtggaatagggaatgatgatacactatggcggatttctccaagatgtttttaaagccagaatttaaggtgggcatgaaatgtggggaatgcataacatatgtgaaacaagaagctacagattcttgaagttactatgttgaaatttggccgcgcaagttctgatctgcttgcatatggtgcggcagatggtagcttgacggtctgctaggtttctgagccaccatctgttcttcaaaacatattgggcattctaaaaatagcatagctccaacgccctcgccctcgccctcctgcaactgtcacctccacctcgagctcgcacgccccatgcctgcggcctccgtgtggttcgacagcgccgcgcgcgtggcgcccagtggcctcctggtgctcaccaacgtcacagtggccatgacggaccatgcgctgcacctgattccgctcccattctccacgagctagccttcttcatcttgcgcacccggagcctctccaccacgatgtcgatccagtacctaggcctcctcaacatcaccgatggcgccgaggcgaccagcaaccacatcttggtggtggggttcgacacagtgctcaactatgagttcggcgacatcaaccacaatcacgtcagcatcgacattgacagcctct

SEQ ID NO: 1979 - DNA, 203 bp, Zea mays
  Peptide Sequence Number=SeqID_8371
  Probeset Number=SeqID_16382
gtatggagcgtcagtccctgtcgacctgcccagctcacgaggagagcggccgcaggcaagagaagagagcagatgcagagaaagaagaaagacggtccctcgttaggcctttcctcttcttggagtcggcgtcccttggcgacagtccccgcagcagcgcctcagctcaacccgtcgtggccgtcggcgagtcggctcgccct

SEQ ID NO: 1980 - DNA, 734 bp, Zea mays
  misc_feature (601)..(734): n is a, c, g, or t
  Probeset Number=SeqID_16383
agcatgaacggtttcagcggttttatccacggatcacctcatgtattctgtccagacaaacaaccatcaacatctcgtcgcgtcagaatcagatggcattttttcccctcctcccctcgtcgacgaatcgagtttggatccgtggcgtaaccaatcccaataaaaatcgccgcctccaattcttcaacctcggtgacaccagaagcagaggggtcgcgaattgatcgaggctttctgcagcccacttgtccactccaacacaagagccggagcggcggatcggccatggcgccgccacggcaagggggggagcaggcggaggcgggtgttcgcgattcggcgccggcgctgcgggcccccgcacacgtgatggcgcgggtgttctcgcagctcgactgcgtcgacctccttagctgctccctcgtctgcaagtgagtttccccgccctcgcctctttccttctccccacgcgcgcgcgttgatcgatgaaatgcccccgtgctgtgcctccctttgtctcgggtgtctcggtgcggctgtaacggttcatcctgtgtgttaacctgtgtggtaacctgactgatcacctgaccaaatccannnnnnnnnnnnnnnnnnnnnnnnnnnnnnnnnnnnnnnnnnnnnnnnnnnnnnnnnnnnnnnnnnnnnnnnnnnnnnnnnnnnnnnnnnnnnnnnnnnnnnnnnnnnnnnnnnnnnnnnnnnnnnnnnnnnnn

SEQ ID NO: 1981 - DNA, 347 bp, Zea mays
  Peptide Sequence Number=SeqID_8372
  Probeset Number=SeqID_16384
acgtacgttggggtatgagccgtgggcggaggctcgcgtgcggtagctcgttgtgagcctcgagccctttccgtcggaatccggggcctgaggctcgccggcgaccgtcgtctgccgcggcatatacacgctgttgctcggcctcgggcaaacacctcccggcggggctatgttctcaccgcgtggtctctttcgatctatcagagcgacgactaggctaccgccgccctacgccagatgccctggtcttaggcgggcccttccccggcaacgagcacctaacagcaggtttgctcgctctttctcttcccttcctgctgtgcagaaaccgagcagcacccaaagcc

SEQ ID NO: 1982 - DNA, 1118 bp, Zea mays
  misc_feature (1)..(42): n is a, c, g, or t
  misc_feature (1111)..(1118): n is a, c, g, or t
  Probeset Number=SeqID_16385
nnnnnnnnnnnnnnnnnnnnnnnnnnnnnnnnnnnnnnnnnncgttcgagtcggagtccgctcctcctcccatcgtctacgactgctacgacgagccgaaccacgacgagattgccgaggtgctcgcgctactagagtacaacgaggggacttcgtcggccacagtcctcgtcgactataccaccaccagcaagtcgcctaccaagtgttcgacgatggatttctccgacgccgacagcgccaggacttgcgatgtcgccgacgtccctgccgtgcactccgcactcaaggtgttcgtcaaaatgctcaacggcgggagtgagcatccgcaggaggtgacgcaaacctccatcgcgcggtgcgccaggatctccgcctgtgacatccaccagccgaccacctccatgtcgtggctacacacacgcgtccatcgctccatgcagacgccgtgcccagagactttcccggaggtgccatttgagagaccaactccacccaaatttttcttcgacgaggaacatatcttcgaggaagagtcgtcttcttcgaccactgcgacacccagaagtccgtccgatccggagcaagcgggtggtgacctcgattccatcgctactgcgcagttcctgatcattcacgccttcaagctgctccaccatgcggcgtcggccgtcatggtggtgtgggcgtacgacgccgcgtgcgaccgcgtcggcgtggaggaggtgaagcacgcgtgcgaggtcggatgcagcggtggcgagatgtgccttttcacggacctcctcggcgacttgctctgccgcattcaccgctcgccggactccctcatgttggtcgtggagacaacaatcggcaccaacagcacggagatcgccggaatcgttcgcggctgcgccaagaccgccatctctgttggcaccacccagcaggccaatgacgaccccatctacaccaaggttggctccatccttggcctccgcgtctcgcccagccactggaggaagggcatggggaagaagctagcggatcgggaggaggacgaggttgtccaagcctcatacacgtacaacatctacaacaactgggtgtcagcaccatcacagaagannnnnnnn

SEQ ID NO: 1983 - DNA, 718 bp, Zea mays
  misc_feature (677)..(718): n is a, c, g, or t
  Peptide Sequence Number=SeqID_8373
  Probeset Number=SeqID_16386
actgcggcccgatccagaagcggctctccaacttcaccggcaacatggacggccaggacccgtcgctggacccggcctacgccgccgagctcaggaagctctgcccgcctcctcccagacccggcgacgatgataggaaggtcaaggtgcctttggaccccggcagcaactacaccttcgacctgagctactaccgccacgtgctcgccacgggcgggctgttccagtccgacggcagcctcctgcacgaccccgtcaccagaggctacgtcgagaaggtggtcaaggcgtcgtcgcccgacgacgtactacgcggacttcgccacggcgatggtcaagatgggccgcaccgacgtgcttgtcggcgatcatggggagatcaggccaacgtgtggcatttttgttgactaggttcaggagtgggttgaaaatgcgaagataatctgtacgggtttctgtcaacatgtactgtgcgtgctgagcacgagcgctgttaactgtgtaatccgggaatgctgttctgttcacacggtcgtcacttatcgactgaattgtcagccatgatgtaattatttatctaaaaaaaaaaaaaaaaaaaaaatatatactagtccagagcgcgcgccctgcgcgcgtttataaacaattaggtataaatgcataaacatcttttaatnnnnnnnnnnnnnnnnnnnnnnnnnnnnnnnnnnnnnnnnnn

SEQ ID NO: 1984 - DNA, 270 bp, Zea mays
  Peptide Sequence Number=SeqID_8374
  Probeset Number=SeqID_16387
tttaggaagggaacatttggggatgcctttctgggttaaataaaaaaggaccggaatatccctttatgggaaaaaattttggttctggaggttttttttttgccgggatttggtgggttccctggggctcttttccaatggaaaaattcatgtccggtccaagttcactaaaggaaaggtgggccataaatttgaagagtttgcttttccacggggacgagggccccttggaccaataccaggaaagggaaatcaaggaaagggcagaaa

SEQ ID NO: 1985 - DNA, 384 bp, Zea mays
  Probeset Number=SeqID_16388
atgtcccccaacctggacagcgccatcaagagccaggtgccggcactgctcctgaggcatctcttcggcgcgtcccggcgggacgaggccaatcagctccagcggaccccggcacaggtgggaaggcgccgggtgtttgtacaaaaggagaccgactgcgtgctcggcatggacctggaccgcggggacaacgcgcacaccgtcaagcgccggctgcagctcgcgctcaacatgcccaccggcgggacctcgctcaccttcggcgatcgcctcctggagaacgacctcatcaaccggaactgctccaccccaagcctcagccccgtctccaaggacttcgagcacaaggactgcatcggactggttgagatgctcgagctgtaa

SEQ ID NO: 1986 - DNA, 435 bp, Zea mays
  Peptide Sequence Number=SeqID_8375
  Probeset Number=SeqID_16389
tgcaggacaaactgtggatcctcgcgcacctgctgctgccacgccgggcgcaggttgcgcagcagccagaagacgcggcaatggtgctgtttacctccggctcggaaggcaatcccaaaggcgtggtgcactcgcacaaaagcctgctggcgaacgtggagcagattcgcaccgtggcggatttcaccccgcgcgaccgctttatgtcggcgctgccgctgttccacgccttcggtctcaccgtcgggctgttcacgccgctgctgaccggcgcgcaggtgttcctctatcccagcccgctgcactatcgcatcgtgccggagctggtatacgaccgtaactgcaccgtgctgtttggcacctccaccttcctcggcaactatgcgcgctttgccagcccgtacgatttcgcccggctgcgctacgtcgtcgccg

SEQ ID NO: 1987 - DNA, 811 bp, Zea mays
  misc_feature (475)..(475): n is a, c, g, or t
  Peptide Sequence Number=SeqID_8376
  Probeset Number=SeqID_16390
gggcggcggcctgtttatgatggaagaaaaagcttgttcacggcaggtccactgccattccaatccaaagagttcgttctcatgctaacaaaccatgagagaggaagacaaggcgagaaagagtataaggtggcaatcaaggatgctgcaagaattgatatgtacagccttaaaatgttcttggctggcaggaatcgggatctgccacaaaacactatccaggctctggatatcgctttgagagaattcccaacttctgagtatacaccgatctcaaaatcgtttttctcacgaaaggaatttggagatggtcagtctctaggaaatggtgtggaatgctggaggggttactaccagagcctacgccctacacagatgggcttgtcacttaatatagatgtttcggcaacgtcattttacaaggctcaacctgttattgacttcgtagtggaatatctgaaccttcgtgatactntaaaacgtatttctgatcaggatcgcataaaactgaagaaagcacttaagatggtctgggttgcaaccaaccatatgcaagataaatgcattcactacaggattacagggctaacctcaactccattaaaggatttgacgtttgatcaagaaggcacaagggtgtcagttgtgcattactttaaacaacgatataactactacttacaatacactcactggccatgccttcaagctggccgtgttgacaagcagatctatttacctatagaggtttgcagcatagttcagggacaacgctactccagtaagctgaatgagaatcaagtcaggaaca

SEQ ID NO: 1988 - DNA, 451 bp, Zea mays
  Peptide Sequence Number=SeqID_8377
  Probeset Number=SeqID_16391
atgggcgtggtgtttatttatatacgcaactcctggggtccgatacgcggtgatgccgacgtatatatcggggctgatctgttgtggagtcccacctgtccaaacaaatcccatctggaatgcgaggcggtcgccgctctcgagaacgtcacctccgttttcgaatcgtggcgtctccgaatcgaatccacggtggagagcgtcaaggactccatcccatcgacgccgttcgtgcagagctatccaaggtctccaagttactggagcgaggcgcgctcgaggaccgttggcaccagatcagcatcctctcggctgttgcatggaacgccgacggcccaatggggcaccaccttccacctcatccacgcccccagcaccacctcctggcctgaatttggcttcatgcgtatagagcatcgtcgttttgtcattgcttccacctaccgtaatg

SEQ ID NO: 1989 - DNA, 318 bp, Zea mays
  Probeset Number=SeqID_16392
atggcgctgaacggcggcaagacgttggtgcaggacgaggagaagcagcagcttctcctagagaagcacaccgagaagcacttcaccgccggcgaggtggtccgggacatcatcatcggcgtctccgacggcctcaccgtgcccttcgcgctcgccgcggggctgtccggcgccaacgcctcctccgcgctcgtgctcaccgcggggctcgccgaggtcgccgccggcgccatctccatggggctcggaggttcactggtgccgcggtgcggtcagcaacccgacatgcgtattagcataactgatggctggtgctga

SEQ ID NO: 1990 - DNA, 524 bp, Zea mays
  Peptide Sequence Number=SeqID_8378
  Probeset Number=SeqID_16393
atgacaatgaaaaccggcgcacgcgttctggccctttccgcccttacggccgtactgttttcggcttcggccgtggccaaaattgaagaaggtaaactggtcatctggatcaacggtgataagggctataacggcctcgccgaggtaggcaaaaaattcgagcaggacaccggtatcagcgtgacggtcgaacacccggacaaaatggaagagaaatatccgcaggtctcctcgtcagaggatcgtccggacatcatattctgggcgcacgatcgctatcacggttatgcccagtcaatatttttgtcctaagtcacaccgagatcaaaacttccatacaacaactgtttcggtttacctgggatgcagtgagcttcaacggcgagctgattggctatccggtttctgtgtactcgcctccactaatttacaacaaagatctcctgcccaccccacagaaaaaaatggaacagatggcggctctcataatcaatccgcccaaagacaagagcgtcatgatgttt

SEQ ID NO: 1991 - DNA, 302 bp, Zea mays
  Peptide Sequence Number=SeqID_8379
  Probeset Number=SeqID_16394
cgccaccttgcgtcatgttaaggctatcttcagaggtgcataagtgggcatataatacacgcaaaagtgggcttgtttggccaattccgcatgcacaatgataagagccacgggttcatctctcaggtggattgaattagccaaaagtcgtccgttcatgcgatcctgttcaagtctcagtgcactcacgcgcatatacacgccaggttttttagcccatagatcagagagaaccaatcaagatgttcggatatccgcacacaagccccgactgatggtctatgcatgtctgaagccgggta

SEQ ID NO: 1992 - DNA, 462 bp, Zea mays
  Probeset Number=SeqID_16395
aacaatcccatggtgttgggttatgtgcggcaattcgcgcagctaaagaagattcatgcacgacaacctcctgtagccaaacaagggtggttggaaggattcctctatttttggtgtgagatcaatggtagctcggacatcataggacatgatttgcgacgttcacaacttccttggcttgtgacggtggtgtagtgtgatattcgatatagttgatgggataatgtaaaaagttagttctctatattcggcgttcatgtgcttggatgatatgagcgaaactattgatttctatgcaatctctattgggtttcaatatttggttaactgagtgtctatgcatgttatgagttgggaatatcacactagtatgtagtgttttgtatgtttcatttcgttaaaaggaagtatgtgtaaagtttttatacattgttgctctattaaataaacatatccttgtgc

SEQ ID NO: 1993 - DNA, 284 bp, Zea mays
  Peptide Sequence Number=SeqID_8380
  Probeset Number=SeqID_16396
atgatgaccagccgacacccggatacgtcgcgcgccgactactacgcacgaatcgccgaacagcgtctcgcgccgttgtgggaatcgctgcacaacctcgtgccgaaaacgccgcagccggccgcgcaacccgcgatctggaagtacgcgcaggtgcgcgacctggtgatgcaggccggcaacgtgatcagcgcggaagaagccgtgcggcgcgtgctggtgctggagaaccccgggctgcccggcaagtcgagcatgacgccgagcctgtacgcggggctgca

SEQ ID NO: 1994 - DNA, 634 bp, Zea mays
  misc_feature (17)..(17): n is a, c, g, or t
  misc_feature (68)..(68): n is a, c, g, or t
  Peptide Sequence Number=SeqID_8381
  Probeset Number=SeqID_16397
gctgtgcccagcgccgnggctctctgacttggtcgatctcctgcatctcggtggagggcgacgactcngcgatgccattgcaactgcacttctccttgatgacgtccatgtcgtcagtgaccgtaaactaggtggggaggcaaaaagggcgatcgccagcgtgagagagctgaagggaggaagggagcggctggtgctgcacagcaaccgcgcgcagtgccggctcgcccggcgcgaggctgacgcggcggtgagcgacgcgacacgcgcgctggcgctggcgcggccggcgaacgcgcatgccaggagcctgtggcgccgcgcgcaggcgtacgacatgaagggcatggccagggagagcctcctggactgtctggccttcgccggagcatggctcgacggccggaggcaccctcggcgggcggcgcgcggtgcgaaccccaagctgccgtactgcgtcgctcggatgatcaacaagcagatgagcgtgacgggtctgttcgccggcgtgaagatgaaggacaacaaggttgggagtgatgattgcatgccatggtgcagcgaaaacgacagggacaatgaggacggcgaagatgatccggatgatgacgatgaaagcgacgaggaaattgct

SEQ ID NO: 1995 - DNA, 302 bp, Zea mays
  Peptide Sequence Number=SeqID_8382
  Probeset Number=SeqID_16398
accatcatctagctcacaggctctgcttctcccagcggcaaataatgttacagaagctatgctgcctgcagatgctgacaaaaagccacgggatgggaaaactccgccaaagttggtctctctttattttcataccaaagtctagttaatcagtaattctaattttaaatgcatagttgttcgtaacatagataaaaattcttattaaaaataccttgattcaagggtgattgcatggccacacccacactatgcttatacttttgagtgaaatgaaagatgtctctattcatcccattcga

SEQ ID NO: 1996 - DNA, 318 bp, Zea mays
  Probeset Number=SeqID_16399
cgcagaatgttcttatttatgctaaccaaatcagggtcacacttgctgatcagtcagtgtatgaagcacaagttgttggatttgaccaggacaaggatgttgctgttttgcgtatcgaagcaccaaaggataaactaagacctatacctgttggtgtgtcagcagacctactggttggtcagaaagtatatgccattggaaacccagtgagtgcttacaacacctttctttttattgttgtatttgggaaagatatatcaagagcgggcgcacttacaggagtcttcatccaacccgtagaggtatatagtgctgcag

SEQ ID NO: 1997 - DNA, 239 bp, Zea mays
  Peptide Sequence Number=SeqID_8383
  Probeset Number=SeqID_16400
attccaccaactcttcttcaccggtttttttctttttttttctgacaagagaaacatgttgtgatgcttggtctggatgcagctggtataacaacaatactgtacaggcttcacatgggagaggttctttcaacagtccctacagtcggtaggtctggattgactctgctgcaatcctcatttctctatccaatagctacctctggtaacataatttccatccgtcctgcaggcatgca

SEQ ID NO: 1998 - DNA, 285 bp, Zea mays
  Peptide Sequence Number=SeqID_8384
  Probeset Number=SeqID_16401
aagcgccgaccgcacaccgcagcacgggactacgggagcagccgaggcccgaccgcccgagaaattcaagataaaagattttgaagcattttcaagtcttaagaactcggaagataaatttaccttgacatcatcttctcatgaacgagaagcatgcagtcgtgtaagtcctgcgatccgagcgggtgggcgccgtgggccatgttgctgctgctgacgaggcggcgcgacccatagtaaaggcgtacaacagctcacctccctcgtccagctccagccgccgtc

SEQ ID NO: 1999 - DNA, 423 bp, Zea mays
  Probeset Number=SeqID_16402
atggcgcgcgtccgccgtgcgtgcaatgcatgcaggtggtcggcgatcgcgacgcacctcccgaaacgcaccgacaacgagatcaagaactactggaacacgcacctcaagaagcggctggccaagatgggcatcgacccggtcacgcacaagccgcgctccgacgcgctggggacgggcggcgggggaggcgccgcgggcgcgcagcacgccaaggccgcggcgcacctcagccacacggcgcagtgggagagcgccaggctcgaggccgaggcgcgcctggcgcgcgaggccaggctgcgcgcgctcgcggcctccgcctcggcgccgccgcagatgcccgccgccgccgcgcaccggctcgactcgcccacgtccacgttgagcttctccgagagcgccgcgctcgcctcggtcctgcag

SEQ ID NO: 2000 - DNA, 381 bp, Zea mays
  Peptide Sequence Number=SeqID_8385
  Probeset Number=SeqID_16403
atgcgtatcgtgtacccgaactacgacgacactcgctccgacggggtcatcccgctatactacgctctggcccggccgctggcagccatcaaggacgccatggtcgctagctccatgctgtactacaccgtcgcgttcatcgccgcggcggtcgcagtctactgcgccatgccgtacctgctcgcaaccaacgaaatagacatcaccggcacgctccacaaccatagtcctggctcctgcacccctacgatgtacgagctgtactgcgccgtcacccactcgggctcgagggaaaggaagaactgggggctattcaacttgatcgccgtgcctgactacaacctggacctgacagcctcaggcatgctgatgaccaactag

SEQ ID NO: 2001 - DNA, 327 bp, Zea mays
  Probeset Number=SeqID_16404
gcggtaattatgctgcggtgtacgggcggcgagctcgacacggcctgacgggcaattttcaagtcgcggctgaggacgggcgctgtcacgtgagggacacgctgatgggaaaggtggcctctgataaatgtcacaaatgggtcttcaaggaaccttctgaatgcgagcccaacatctccaactactggcagagctctttcgacgcacttcctccggaatggactgatcagttcgcatcaggcatccaggcaagggagttgtttgattcaccagccgaattttcatttgtctttataatcaatatagttttggtgacatttgtatttg

SEQ ID NO: 2002 - DNA, 551 bp, Zea mays
  Peptide Sequence Number=SeqID_8386
  Probeset Number=SeqID_16405
ggtccggaccgtcctccggcacgggcctctccgacgcggcgctcgccacgccgggcttccgcctgttcgtgagccggctggccaatacggcgcggcgctcgctcgcggaccggagcccatggacggagctgctggaccgatcggcgttctcccgccccgactccctctccgaggccacctcccgcctgcgccgcaacctcgcttacttccgcgtcaactacgccggcgtggtcgccttcgcgctgggggcctcgctcctggcgcaccccttctcgctcctcatcctcctgggcctcctcaccgcttggtgcttcctctacctcttctgtccctccgaccagcctgtcgtcctcttcggccgaaccttctccgaccgcgaggcgctgctggggctcggggatgaggtgcagggaggagcggagcgcgcggcggcggctccccacggcggcagctccccacggcggcggctccccacggcggcgctccccacggcgtcgtatcaggggggaaaggggatgaggcgctggttctggaagcgtcgcggaggctag

SEQ ID NO: 2003 - DNA, 598 bp, Zea mays
  Peptide Sequence Number=SeqID_8387
  Probeset Number=SeqID_16406
cgtaattcgagcttcgtgttccccctgtgaagaattcaaggtggaaaattcgtgtatgatgagtataaccatgagcgttacccgcctggagaccccagctaagggtgcattagcatacttttgtgctgagtggtgggaggttcatttacgcatgtttgctgcgacttcttgtcctaacatttgtcttgagcatgtcagcaagtaagtatgttttcgcgcttgcctctcttgaggatcacttctcaagcattgagtctggaccctcggttactgtgaagtggcttggcaaaccggtcttcataaggcgcaggctagatgatgatatcgagttggccgacagtgttgaagtggcatccttccgccttcgagagcaggatacatagtgtgtcaagaacctcgaatgtctggtcgtcattggggtctgcactcacctgggctgcatcccgctcccaaatgcaggagtctttggtatttggatgtggtgagtattaacttgtataactactacatttctggtaggatcagcaagggcccggcacccttcaacctggaagtgcctacacacagtttcttggaagagatcgagtttctcgtcgac

SEQ ID NO: 2004 - DNA, 357 bp, Zea mays
  Peptide Sequence Number=SeqID_8388
  Probeset Number=SeqID_16407
gcaccgcgcgcgcagccacacccgaccaccgtagaaggcgccggcccgcgtcacacggcgtcccacccgaacggcgcccatggctacgcggccaacgaaccggacagtaccgccgacgtctgggcactgaacaatgttaacggccaggtcgagcgcgtgcagagcctcgataccacgccgccgggcctcagcgacacgcgccgggcagcggatatccataccaccccggacggccgctacctgcaagcctgcgaccgcaccagcagcacgctgaccgcgttcagcaccagggaggacggcccggtgccgaccaccgacggtcaccagcccaccgaaacccagccccgcggcccgaac

SEQ ID NO: 2005 - DNA, 244 bp, Zea mays
  Peptide Sequence Number=SeqID_8389
  Probeset Number=SeqID_16408
atggggttcgccggaggggtggggatgcccggcggcgcgccggtggcgggagagactagcgctgtgggcccgggaaaacccggtggcgcgccggccgtgggcgccagagcggcgcgggaggagagaggaagaggaggaaaggcctcaccgacgttggggaagagggtagggggcggcggccggcccgctatggaggatggggttatatatgctgtagctcaacagccaccttatgatggcctag

SEQ ID NO: 2006 - DNA, 251 bp, Zea mays
  Probeset Number=SeqID_16409
tgcagcagctgctccacatcttcaagttgctttggcaccccaaacgaacaggtgtggccaggcgtccgctagctgcccaactggcacgagtacccccagtggaagccgactaagctgtctgctcttgtgcccggcctcgacgctgatggctacgatcttcttgaggtcagcacgcactcactcagcagtgaatctcacagcggtggtggctgagaacaggtggcgttatatctgcgaggaagggattgcat

SEQ ID NO: 2007 - DNA, 653 bp, Zea mays
  misc_feature (545)..(545): n is a, c, g, or t
  Peptide Sequence Number=SeqID_8390
  Probeset Number=SeqID_16410
cgcgggccggggaccgacctgtcctgggaagagctggaggttctggtgaaggggattactgatgagtccttcgtccttgagtccctaatcctcccccagggcatccctgcgctctgcgacgatccagggctgaggacggcgatcttggccacgctgctgaccctcgacaagagcggagtggcggtttgccagaccggcggccgggacccccaccgcaggatccgaatctccgatgcgccagctggaggcccccagactaccagcgcggctcccagcgcccctgccatggctcctagcgcccctgtcgcggccccccgccccttggacaagggcaagggggctgcaggcagtttctccgcctcaggtggcaccggagggtcggaggaagagaggcggtgccaacttcgctgtgccgatgggtcgttcgtctcggaccccctagaagcgtcagaggactgctggtggggccgaggaggccggctcccaagcccagggcgcgtagaggcgcgtcagtcctccgccaccaccaccatcgggtccgtcgncaccacaaccacaaccaccaccaccgtcgggtccgccgtcgccaccaccacacggtggcgatctcccccaggggcaccaacaacagcagcaacaacagcagcagcagc

SEQ ID NO: 2008 - DNA, 853 bp, Zea mays
  Probeset Number=SeqID_16411
tgcaggactatcagctgatttatgccggacgccagccgcaggaagccgatttgatcgcgctgtgtgagcgccataatcctcaggcgatcattgtgcgctacggcaaaatcaacgggcgcatcatggacgccgcgccggcgctgcgcgtgatctccaagcacggcagcggtattgacgttatcgatcagcaggcagcggcggaacgccagattgcggtccgcgcggcagtgggtgccaatgccgctgccgtgtcggagcatgcctgggcgctgatcctcgcctgtgctaaatccgtgccgcagctggaccgccggatgcgcgacggacactgggataaagcgcagcataaatcgctggagctggaaggacgcacgctcggcctggtcggtctgggtgccatcggcagccgcgtggcgcgcattggccaggccttcggtatgcaggtgctggcctacgatccctatgcgcaaaccttgccggctggctgtgaagcggttgaatcactggatgaactgtacagccgtgccgatgtggtgtcgctgcactgtccgctgacggacagcaatcaccagatgatcaacgcggccgccctcgcccgttttaagcctggcgcgattctggtcaacaccgcgcgcggcggactgattgacgatcaggcggtggcgaccgcgctgcaaaacggcacactgcgtgccgccggactggacagcttcaccagcgagccgctgaatgcaccgcatttgtggcagtcgcttaacaacgtgattattacgccgcacattggcggcgtgagcgacaatgcttacgtgcgcatgggcaccggtgccgcgcgcaacgcgttacaggttctgca

SEQ ID NO: 2009 - DNA, 243 bp, Zea mays
  Peptide Sequence Number=SeqID_8391
  Probeset Number=SeqID_16412
tcgagttcgactgcaagtagttcatcattgaagcctgaaaaactggaagctactagacatgtgctcatcgagtatggtgacatgtcaagtgcatgcgtgctattcatcttggactcaaactgacgaagaaatcaatagaatatggacttggcacaatccggtgaaggccttgactggggtgtgctctgtggtttcagccctgaactcaccgttgagactgttgtgctccgcagtgtcactgtc

SEQ ID NO: 2010 - DNA, 249 bp, Zea mays
  Peptide Sequence Number=SeqID_8403
  Probeset Number=SeqID_16413
gcgcgcgcgccgtgctcaacttcccggccctcgcgcgccacctcccgcgcccggcctccctggcgccgcgcgacgtccaggccgccgccgcgcgcgccgccgtcatgcacgacccagagcctcaacgacctgatgagcccggacggcagcccgtggaggaggaggtggcggccgctgcgcagctgctaatgaattcgatgcggctcgcgctttcgcgagccttgtcctggctcgccaccgaagctgcag

SEQ ID NO: 2011 - DNA, 429 bp, Zea mays
  Probeset Number=SeqID_16414
cgggctgatctggcactcggtgctgaacctgatctcgaaggccgtcacgtcgccgttcacgctgctcgcgtacgcgttcggcggcagcgacggcgaggacctcggctacgtcgagttcgcgcccggctcgtaccagctgaccgacgcgcagcagaagaagctcgataccgtcgtgaagatgctgaccgagaagccgtcgatccggctcgacctgatcggccgcgtcgacccggcaaaggacacgccggggctgcgcgacgcgtacgtcgaccggctggttcgccagcagaagctgaagtacgtcgtcggccagggcgagagcgtcgatccgatgtcggtgaaggtcgagccggccgagtacggcaagtacctgacgcgtgcgtacaaggcgtccgacttcaagaagccgcgcaacctgatcgggctgca

SEQ ID NO: 2012 - DNA, 739 bp, Zea mays
  Peptide Sequence Number=SeqID_8404
  Probeset Number=SeqID_16415
tgcagcgcctctcctgctgggcggacgggcccaacatggtgtcgcagtgccccatccgccccgccgccggcacctacacctaccgcttcaacgttaccggccaggagggaacgctgtggtggcacgcccacgtctccttcctccgcgccactgtctacggcgcgctcatcctccaccccgcggccccgtcgtcctacccgttcccgacaccccacggcgaggccaccatcctactcggcgagtggtggaacgtcagcgtcgtcgacgtcgagaggcaggcactcctcatgggagcaggacccaacaactcagtcgcgctaactatcaacggcctcattggtgccggcggtggtgctggctgcgagaacagctcctcctcctcccagtatgaactcgtcgtgcagcgcggcaggacgtacctgctccgcatcatcaatgccgctctcaactacgagctcttcttcaaggtcgccaaccactccttcaccgtcgtcgccgccgacgcctgctacaccgacccctaccacacggacgtcatcgtcatcgcgccgggacagacggtggatgctctcatgcgcgccgacgccgacccgggccgccgctactacatggccgcacaggtgtaccagagcctcgcaaacgccacctacagcgccgccaccacggcactcctcacctacctgccggacgcctcggggtcggacgacgagcagccgacactgatgcctaccatgccagc

SEQ ID NO: 2013 - DNA, 778 bp, Zea mays
  Peptide Sequence Number=SeqID_8405
  Probeset Number=SeqID_16416
ataaaaaaaaatatgatgagcatgtccgcctgcttcttcttcgttcttctcatcgtctgcttgttgggatcgcacgcaaattcgtcgcaggaggctaggctaagagaatttatcctgtccagaaggagcagtggcagcgcgttcagcgcacacgacaagtctggctccacggacactagccgtctcagatcagagtactacggtacggaccaaagcgctcagaaggctgtcgacaagatcacctcgctgccggggcagccggacggcgtcgacttcgaccagtacgccgggtacgtgaccgtcgacgagacgaatggccgggcgctcttctactacttcgtggaggcgccacaggacgcctcgacaaagccgctcctcctgtggcttaacggaagccctgaatgactcgtcggtaggctatagagcaatgatagaaatcggcccgttccgcataaccagcgacaacaaagccttgagcagaaacgagaacgcctggaacagcgaggccaacgtgctgttcctggagtcaccagccggtgttggattctcatactccaacacgtcttcagactatggcaagagcggtgaccaaaggacagcggacgatgcattcgttttcctcatcaattggctcgagaggttccctgagtacaaagcacgcgccttttacatctccggggagagctatgccggacactacgttccgcagctcgcaacagccatccttagtcacagtataaagagtgaaagcggcatcataaaccttcgggctatattg

SEQ ID NO: 2014 - DNA, 357 bp, Zea mays
  Peptide Sequence Number=SeqID_8406
  Probeset Number=SeqID_16417
tcagtctccagcaccctcttctccttccatctctctcacagtcgcgcccgctgcttgctccccatggtcgagcatccccgccctctcggctccctgttccttctctcttgtgccgccgtccctgcctcccttcccatggacaccggcagtagaagatgcttctccccagtgctcaccatggttgtcgcctccaagcttctccctgctgcgcgcgtggccgtgaccctatgctcgccacggcgcgtcgagctccctcgccgagtcctttttctgctcgccccctactatctacgcatcccagccatggtcgccgagctcggcctctactcctccctatgcgcgccttgctccgactag

SEQ ID NO: 2015 - DNA, 682 bp, Zea mays
  misc_feature (62)..(62): n is a, c, g, or t
  Probeset Number=SeqID_16418
gcaccgccgggcacgtcaacccgctgctcgccgtcgcggaccgcctgacgaagcgcaccccngacgccgaggtcctcgtgctcggcacggcggagggcctggagtcccggctcgtcccgatgcgggggtacgagctcctcacgatcccgcgcctgccgttcccgcgtcggctgaacggcgccgccctgcgcttcccgcagcggttcgccgccgccgtgaagcgcaccgaacagatcatccgcgagcacgaggtcgaggtggtcctcggtgtcggtgggtacgccgccgccccggcctacatcgccgcccggcgcacggggacccccatcgtcgtgcacgagcagaacgcgaagcccgggctggcgaaccgcctggccgcgttcctcaccgaccacgtcggcgtcacgttctcgaacacccggctgcggcacggccgcgtggtcggcatgccgctccggcgcgagatcgagtcgctcgaccgccgtgcgagccgtgccgagggcctcgccgagttcggcctcgacccgacgcgccccgtgctgctcgtgaccggcgggtcctccggcgcgcggagcatcaaccgcaccgtgaaccggtcggcggccgcgatcgtcggcgcgggctggcaggtcctgcacgtcgtcggcggcaagtcggacatcggtccgagcgacctcgacgg

SEQ ID NO: 2016 - DNA, 420 bp, Zea mays
  Peptide Sequence Number=SeqID_8407
  Probeset Number=SeqID_16419
ccgaactacacggcgaacctggtcgcgatcaaggggacggtcggcgcgttcggcacggactcgacgacgtccgcgccggtcgacgtcgccgcgaacctcgcgggcaacgggccgatctcgatcaagggcacggtgaacccgctgatcgacaagccggcgctggacctgacggcgaccgcgcacgacatcgagctgaccaacctgacgccttattcggcgaaatacgcgggctacccgatcacgaagggcaagctcaacgtcgatctgcactaccagctcgcgaacgaccagctgtcggcgaacaaccacatcttcatcgaccagctcacgttcggcgatcacgtcgagaacgacacggcgacgaagctgccggtgaagctcgcgatttcgctgctgaagaacacgcgcggccagatcgac

SEQ ID NO: 2017 - DNA, 229 bp, Zea mays
  Peptide Sequence Number=SeqID_8408
  Probeset Number=SeqID_16420
ccgcgccttccacgaggcgggactgtggaaccacttccaggcgaccgcgtttgacttcagcaacacgctctctacccattcgatctttggcacgctgctggaaggcattctgggttatcagaaagcgccgagcgtcagcgaagtcgcggtatggctgatttatctgatcccggcgctgctgctgtttttcttcccggcgcgtccggcacccagcgccgcacggtcggtg

SEQ ID NO: 2018 - DNA, 1055 bp, Zea mays
  misc_feature (1)..(223): n is a, c, g, or t
  misc_feature (824)..(1055): n is a, c, g, or t
  Peptide Sequence Number=SeqID_8409
  Probeset Number=SeqID_16421
nnnnnnnnnnnnnnnnnnnnnnnnnnnnnnnnnnnnnnnnnnnnnnnnnnnnnnnnnnnnnnnnnnnnnnnnnnnnnnnnnnnnnnnnnnnnnnnnnnnnnnnnnnnnnnnnnnnnnnnnnnnnnnnnnnnnnnnnnnnnnnnnnnnnnnnnnnnnnnnnnnnnnnnnnnnnnnnnnnnnnnnnnnnnnnnnnnnnnnnnnnnnnnnnnnnnnnnnnnnnnnncggagaggggcaggagcgggggctggagctggagtcggaggtgctcgggtcccgggtggacgggaggaagctcaaactcgcgacctttaccgcgagcggcggcggtgatgggaaagggggaggaggggatgggaatcggaggagagaggaggtcgtggtggagatggagaccgaggatgccgcgctgcgctggggggacatcatcagggattgcctcgcttcgctcggtaatcagtatcaaggctccagcgctcctccaacggccacgacatcacgcgaactgggtgcctataacctctccggctgccacgatggcatggccctattacagagggttggccgcgcggggaaggacgggacggcgctcgcgcaaggccgctcgctccctcccgcgtggacgcttgtaaccccctactgcaagcgcacccgacctgggcacggggctaacacgaaggccgcgggttccacctcccacgcatgtctccctccggctgcttctccccccttcgcattccgcctcgcgccgacccatctgggctggggcacgcggcgacaattcactcgtcggtccagggaccccctgtgtttcgaaacaccgacnnnnnnnnnnnnnnnnnnnnnnnnnnnnnnnnnnnnnnnnnnnnnnnnnnnnnnnnnnnnnnnnnnnnnnnnnnnnnnnnnnnnnnnnnnnnnnnnnnnnnnnnnnnnnnnnnnnnnnnnnnnnnnnnnnnnnnnnnnnnnnnnnnnnnnnnnnnnnnnnnnnnnnnnnnnnnnnnnnnnnnnnnnnnnnnnnnnnnnnnnnnnnnnnnnnnnnnnnnnnnnnnnnnnnnnn

SEQ ID NO: 2019 - DNA, 644 bp, Zea mays
  Probeset Number=SeqID_16422
ctgcagctcctgttccaactcctgacgacgatgaagcggtcttcgatgcatggcttattttcgacgaggagcccaacgaccacatcatcgacgacgtcgacgtcttctcgccctggtacgaggtgtcgtgctgcggcaacggatccgtgcagagactacagctggagcggctctgcctggcggggagcgcatccgacctagatgtcctcgctgggcccccggacctacgcgcactcaacctctccaacaacgcgttctctggcacgttctccaacatgtccgcgcttcccgtgctcaaccatgggctccgacctagccatcgtcacggccggggcgcgccaaattctgagcgagcccaggttggatctgctccagcggaacaaggagcagtttcacaagcgcgtgtcgccgctgtcggagcaattccccgacgcgctgctgctcaccgtgttgaaccccgtcgacggactcacccacgtcgcctagaagcggtcgggcttcctcgccacacaattcttcagctctggcaccgacctcgactcatcgggaaccggctaaccgtcatcatctccgaaggccccgctaccagacttctcccagccggagctcacagacgaggaaaaagtgcatctatggttgtctag

SEQ ID NO: 2020 - DNA, 524 bp, Zea mays
  Peptide Sequence Number=SeqID_8410
  Probeset Number=SeqID_16423
tgcagcgcgacggccgtgcggtcacgctgatcgatccggccgcgcccggcgacagcaccgcgaaatggagctgcgggcagatggcggtcagcgaggtcatcccgctgtcgaagcccggcattctgatgaaggtgccgcgctggctgatggatcagaaaggcccgctcgcgctgcggcccggcgccctgcccggcatcctgccgtggtttttccggttcgtcgcgtcggcccgccacgcgaagatcgtgtcgatcgcgcaggcgatggccacgctcacgcacgacgtctattccgactacgcgccgctgctcgatgcgtgcggcgaccgcgcgctgctgggccagcggcccgtgctggaagtgttcgacgatccggccggcatcgcgcacgaggagccgcatctcgcgctgcggcagtcgctcggcttcgcgtcgcagcggctgagcgccgctgacatcggcgatctcgaaccggcgctcgccggccggttcaagcatgggctgctgtttcccgactggcgcgcg

SEQ ID NO: 2021 - DNA, 585 bp, Zea mays
  Peptide Sequence Number=SeqID_8411
  Probeset Number=SeqID_16424
cttgcatgcctgcagctgctcgggtcgttgctggcgggggactggctggtggtcgacgccgccgacgaacgcacccgctcccgggcctccggcgtggtcgcggcgtacgcccagtggcactctggaacgatcactccggtccctgccgcacgtcgaccggtcggagcacccgctgccggtgccgctgacccacgacggacccgaggcaacggcacgcgccgtcgcctccaccccggcaccgaccgtgcccgaccccgatcccgctgccgaaggaacccgcaccgcatgagcccccgccgccacgacgacgccgagccgttccgcccgatcgactggaccggcgagacgcccccggcgatcccggcccggttcgtgccgcagcacgtggcgatcgtcatggacggcaacggccggtgggcgaacggccgcggactcacccgcatcgaggggcacaaggcgggcgaggcatcgctgctcgacgtcgtcgcaggcgggatccagatcggcgtccagcacatctcggcgtacgcgttctcgacggagaactggaagcgctccccagaggaggtgcggttcctgatgggc

SEQ ID NO: 2022 - DNA, 656 bp, Zea mays
  Peptide Sequence Number=SeqID_8412
  Probeset Number=SeqID_16425
ccctgtgtgaagcctggagaagcaattcaaagggttcacactgcagcatatagaatgaagcaagaatgaacaggccaacatgctagcaaaagcaccagcgaaaggcgacctcataccctcagatgtgttcttccacacaattggcacactagccatgagatcccaaaggtctacaaatcacagatgatcccgaaggccaaagaattgaaaacctaataatgaccaaagactggagagcacccataaccttgtaccttcagggccactatcactccaccgaccaggctgaggccaagaggttgaagcaccgaagttgtgacttcatagtaatagaaggtcagctatagaaaaaggaatgagtcaacctatgctcaagtacatcacagtggtcgaaggcatcaaactcctccgagaagtccatagtggcatatgtggttcacactcgggacctagagccctagccgccaaggtcatgcgccaggtattgtactggccagtcatcgcatgtgcagcaaactgtgtagtccgctcgtgcgaagcatgctagaaattttcacctcaagcgggggcaccttcatagttcacaaagttgatcacccacacctggcccgttacaatgatggcgccttgacatattcggaccactacccacagcg

SEQ ID NO: 2023 - DNA, 304 bp, Zea mays
  Peptide Sequence Number=SeqID_8413
  Probeset Number=SeqID_16426
ggccctctcgacgctgctggagcggtcgccagagtgagggatctctgcagcattctgccttctactacgacgtcactatcggactgtgatcgagcccatgacgtgcggcctgccaacgatcgagacctgccatggaggccctgctgatatcatcgaggacggggtatctcgtcctgcacattgacccttaccacagcgacaaggccgcgaatatcctgtgcaacttctttgacaaatgcaaggcagatcccagctacatgtgacacagatctcacagggctggcctgcagagaatctatgagaa

SEQ ID NO: 2024 - DNA, 951 bp, Zea mays
  Peptide Sequence Number=SeqID_8414
  Probeset Number=SeqID_16427
gtggcttgcttcgccggcctcccgtggtgcggttcgtccttgctccgggtgcgcggcgaaggccatggcgaagggcggcgctgccacggtcatcctcgccgtcgtgctgctgtgcctgtgccacccggccaagaacgacgggtcgctgagccttctcgtcgtcggggactggggccgtaagggggcgtgcaaccagtcccgggtcgccgagcagatgggaaggagaggagtagcacctcgagagaaatacattgccaacttgctgaaggatttggataaggcgctgaagaaatcaactggaaagtggaagattgccattggccatcatcccatgaggagtgtcagtccccatggtaacaccgaggagcttctgcaactgcttcttccaatccttgagaataatggcctcgatttctacatcaatgggcatgacccctgcctggaacccataagcagcagagacagtccaattcaatacttcccaagcggaggcggttccagagcatggagaggattcttccagccaaatgaagacaagctcaagttcttttatgatgggcaagggttcatgtccctccagctataccaggaccaagctgaattccccttctacgaaggctgatgggaatatattgtaccagtattcccagtggagcttgagagaaacatatctacgccccagctatgtcgcaaaagaatgaggcagtcccaatcccccttggagagttagattggttcggccctctgtatcaaattcgaatgagccattgtggtaagtggcatcagaaagttaaaaaaaaaatgcaaggatgtaatgtggtgtatggtttaactgccaaagaaacatggagcgactacaagagttgtaatgtgtatgcgctgatgtaaaagcaggtccaaccaccgggaactatttatgcaaatataggattagaccgtaagaatactttc

SEQ ID NO: 2025 - DNA, 279 bp, Zea mays
  Peptide Sequence Number=SeqID_8415
  Probeset Number=SeqID_16428
atgattacttatcaaaatgcgatggacaaggctttggattaccttaatggctttgacattccagtcgtcattacacttcatggacgattctcagaaggctggttctattgttatcaatcgaaggagtatctggaaacaggtgagttttctgctcagttggttggaaatgcaccgtttataattgataaagataatggagaaattcactcttttggtactgcttatccgttagataaatacttactggattacgaacaacaaaaaaacgaataacgtccg

SEQ ID NO: 2026 - DNA, 264 bp, Zea mays
  Peptide Sequence Number=SeqID_8416
  Probeset Number=SeqID_16429
atggacaccgggaagcgtaactgccggattgatgaaacgcagcggagacccagccttcaactcccggtcccgggaatgatgattcatgatgagcctcgcctgcgcccagccaccacccgtggtggcaaaagcctgctcccagctacgtcgcaccggcaccaccaccctcgccgcatcatcatggggacgatcgaccatcctgtgctctctgccgcggccataattgtgctggcaccgggccggctcgcacctgtgctctctgcc

SEQ ID NO: 2027 - DNA, 682 bp, Zea mays
  Probeset Number=SeqID_16430
cccgcgccagattatccgctgtggacggcggcggttttcgctgtcgagcggcaaagcggtgcactatctgtgcgacgaatccgcgggctggttcccggatctggatgatatccgcagcaaaatcacgccgcgtacccgcgggatcgtgatcatcaaccccaacaacccgaccggtgcggtgtacagcaaagagctgctgctggagattgtggagatcgcccgccagcataacctgatcatcttcgccgacgagatctacgacaagattctgtatgacgaagcccagcatcattcgattgccgcgctggcaccggatctgctgaccgtgaccttcaacgggctgtccaaaacctaccgcgtggcgggtttccgccagggctggatggtactgaacggaccgaagaagcacgccaaaggctatatcgaaggtctggagatgctggcttcaatgcgtctgtgcgctaacgtgccggcacagcatgccattcagactgcgctgggcggctatcaaagcatcagcgagtttatcgcgccgggtggacggctgttcgagcagcgccagcgcgcctgggaactgattaatgatattcccggcgtcagctgcgtgaagccgcagggcgcgctgtatatgttcccgcgaatcgatgcgaaaaaattcaacatcatggacgaccagaaaatg

SEQ ID NO: 2028 - DNA, 368 bp, Zea mays
  Peptide Sequence Number=SeqID_8417
  Probeset Number=SeqID_16431
tcagccggatctcctcatccaggaatcatgagtcgtcctagtcgctgagctggcaatgtacacggtgttttcgtgctgcatataccccagggagtatcctccgaccatgggctgcaaaaagggaagcgcaggttcaacgctagcaacgtcggcaagcgtggagcgctcaagcccatcgcctccggtatgtttgcgagttgtattggcatagcctccaagttttgaccaaatatcatggatgcgcacctgtgtctccgagtgagcgtccgtctgggccagcgcaccgatactcacgaacagggcgatcgatatagttcgtatgcggccggtggccttcatccaggttgacctggatgcggcgctgcaga

SEQ ID NO: 2029 - DNA, 386 bp, Zea mays
  Peptide Sequence Number=SeqID_8418
  Probeset Number=SeqID_16432
gtgaacggtatttacacctccagcggcgttgaaaataaaaatgacctgtggaagcgttacggacatttagtccgtcaggaagcgctgcgtttgcaggtacgcctgccggccagtgtggaactcgacgatttaattcaggccggctcgctgggttttttatctgccattgacagcttcgatccgaaaaaaggcgtggccataagcgcctatattattcagcgcgtgcgctgggcgctgatggatgaattacgcgagcgtgactgggtaccgcgtcgcgtacgcacccatgccacagaaatggctgcggtcattcagcggctgggtcaacagactttgtcagcgtcgggcgtaaaagagattgcgcgggaaatgggtatcagcctgca

SEQ ID NO: 2030 - DNA, 333 bp, Zea mays
  Peptide Sequence Number=SeqID_8419
  Probeset Number=SeqID_16433
gaaattgatgagagcacggtcatggaactgattattcaggcgggagaagcgcgctcctgctcgatggaagcgctgcgcgcggcgcggcgcaaagagtggccacgcgccgatgcgttgctgagcgaagccagcgaggcggccagacccgcgcaccgtatccagaccgaattgatcggtgccgacgaaggctgcggcaaaattccggtcaatctgatcatggtgcatgcacaggatcacctgatgaacgccatgctgtgtcgtgaactggcggaagagatcatccagctgcggcgcgagctggctgcggactaacaaggaggcagtatgcaacat

SEQ ID NO: 2031 - DNA, 243 bp, Zea mays
  Peptide Sequence Number=SeqID_8420
  Probeset Number=SeqID_16434
ggtgttgagtacttcactgggggtggcggccgatatctaattacaggctgtgatacacaaacttgcaaagtttgggattatcaaacaaagaactgtgttcaaacacttgaaggacatgcacataatgtctctgctgtatgtttccatcctgagcttccaataataatgacaggttcagaggatggaactgtttgcctatggcactccactacttacaggttttataattctcagaggtaccga

SEQ ID NO: 2032 - DNA, 856 bp, Zea mays
  misc_feature (1)..(238): n is a, c, g, or t
  misc_feature (856)..(856): n is a, c, g, or t
  Peptide Sequence Number=SeqID_8421
  Probeset Number=SeqID_16435
nnnnnnnnnnnnnnnnnnnnnnnnnnnnnnnnnnnnnnnnnnnnnnnnnnnnnnnnnnnnnnnnnnnnnnnnnnnnnnnnnnnnnnnnnnnnnnnnnnnnnnnnnnnnnnnnnnnnnnnnnnnnnnnnnnnnnnnnnnnnnnnnnnnnnnnnnnnnnnnnnnnnnnnnnnnnnnnnnnnnnnnnnnnnnnnnnnnnnnnnnnnnnnnnnnnnnnnnnnnnnnnnnnnnnnnnnnnnnnccatcccttcgtacagtcactttacagttacatgcacttcccgggtaaagccgtcagtgcagcttgtagcacaagctaaagcccttgtacatgatcctgaaatatgctaagcacagctcaattttttccctggatgctctcccttgtacataaggccgtctggttatggtggaggatgttttttcccctggtggattggatgattctacaccttaacaatttaggtagtcttatatagacctaggaaggttgaaatttgccccttctagctacaggttatgcagttcttaccgttctgacttcagaactgtgtcggatgcattctctatccgtacaattagagttgcaagcagtacttcatatccaggtgttaaattcttcatgcgcggtttcagttatttgtcaactctggtaattctcgttgtgcaggtgatttaagcggtcccaaggagataaatgaaagcatgcaatggtggtttgaatttggattcatttgatctttttgtttgatgtaggttgtgtctaacttgtctactgtctttggtttgatcggtccaacttgtattgatttggtggtgtccagtgtttaaacctggaaatgttaactttttttcaggn

SEQ ID NO: 2033 - DNA, 571 bp, Zea mays
  misc_feature (6)..(6): n is a, c, g, or t
  Probeset Number=SeqID_16436
cccggngtcgacccacgccgtccgtaccgagtttacctcatgtcctaataaactgttctctcccctgcaacctgcaggcttgtttgttcatatttgaagccgtgtaactttgccttgccattctgtaccctcttcacaagcatttatgtgatgattcattttactgttgtagcaatggcagaaatatcgataacaagattgatgcagaaatcatcctggctgacataaggtcttcggcccaattattaaagccagcaatggtcgcaaaaaaccagatctagcttcagttggagatagtacagcacagttgagactgtcagcagtttcctttcctgtatcttcaaattttgttcgctaggatttggtgtttagttgctagaaacttggctgtgaagatctgatctgtatgttaataaccgttgtccatctgtctgaaatattgttgcttacttgatttgtaggatgttgtatatttgaaaagtgtccataaaaaggtcttgcgttgtatgatgaggtggagttggactgaatttgtaaaaccattcagaaattcagattaccaggattagtt

SEQ ID NO: 2034 - DNA, 417 bp, Zea mays
  Peptide Sequence Number=SeqID_8422
  Probeset Number=SeqID_16437
atgcaattaagcgttacggatagcgtcacgcatcaggatctggatgaaatgcgcctcggcctgaacgccttcaacagccgctttattgacatcaatgagatgaaagccatcggtgtgttcattaaagacggcgccgggaaaaagctagcgggtctgacgggctcaacctatggcaactggttacgtattgatatgctgtgggtcagcgatgggttacgcgggcagggcgccggcagccagctgattcaggctgccgaacaggaagcccgcgcacgcggctgccgttacgcgcaggtagataccgccagctttcaggcgcggccgttttatgaaaagcttggctatacgctacgttttagccttgatcactatccacgcgaacatcagcgtcactatctgagcaagacgctgtaatca

SEQ ID NO: 2035 - DNA, 447 bp, Zea mays
  Peptide Sequence Number=SeqID_8423
  Probeset Number=SeqID_16438
atggtggcgaagatgacgccctttatcgataacctcaacacgctgaacggcgtcagcgcgcgcgtggtgtgggatgccgctggtcgtgatatcgcccgcgccgagatcaaatttgatgaagcggtgacgggctggccgaccggcgagctggtgcaggcgctgaaaaacggcgacatcgccatctatttccgcggctataaagccaacgaaggcattatcgaagcggatgtgcgcagcggccgtctgtgcctcaacgtgctggccggttcaaagcagaatgcgcaggcgatctggcaggcggcagaagggcatgtgctggtcggcgttttgtcgaaaaactacgcctcgaatgaggccgcgattgccgatatgcgcgagtacgcggcgctgattgataatgcgctgtcggtcgggctgggcgcgggcgacccgaatcagtcggcgatg

SEQ ID NO: 2036 - DNA, 345 bp, Zea mays
  Peptide Sequence Number=SeqID_8424
  Probeset Number=SeqID_16439
tgcagctgcgggtgatcccaaccaagtacccttccggcggcgccaaacagctgaccaaaattctcaccgggcgggaagtgccgcacggcggacgctcaccgacattggcgtgctgatgcagatacgtcggcactgcctgggcggtgaagcgcgccattgtcgatggcgaaccgattacggaacgcgtggtgacgctgaccggcgaggccattgcccggccacgtaatgtctggggccgtctcggtaccccggtaagccatctgttgcaacaggtcggtttcacgcccgggtgcgcgccagatggtggtcatgggcgggcccgttgatgggcttaccctgccgtcc

SEQ ID NO: 2037 - DNA, 644 bp, Zea mays
  misc_feature (601)..(644): n is a, c, g, or t
  Peptide Sequence Number=SeqID_8425
  Probeset Number=SeqID_16440
atggcgacgggggacgacgcggtcgggacacggaagggcggcgcagctggcggcgggggcacgcctaccacgcagacgcaacagcagcagcagcagcagccgcccccgccgcccgagccgggggtgaggtgcccgcgctgcgactccccgaacaccaagttctgctactacaacaactacagcctgtcgcagccgcgccacttctgcaagacgtgccgcaggtactggaccaagggcggcgcgctccgcaacgtgcccgtcggcgggggctgccgcaagaacaagcgctcgcgctctgcggcggccgcgcgcctctcgctcaacctaccaccggaggccggcgccgaccagcaggaggcgagtccgggcttccttggcggtggcggccccgcggccgactaccaccagcaacaggcgaacgccgccgtcgtcgggatgatgatgaccctgccgcggctccacgtcgcccccgccgtcggccagtacgtgccgttcggggagtggccgtcgggggcggccggggacgtttcttccggcggcggccacgcggcgaacggtggcgcggcgatgacggtgagcagcggcgtcgcgacgtcgatcnnnnnnnnnnnnnnnnnnnnnnnnnnnnnnnnnnnnnnnnnnnn

SEQ ID NO: 2038 - DNA, 457 bp, Zea mays
  misc_feature (450)..(450): n is a, c, g, or t
  Peptide Sequence Number=SeqID_8426
  Probeset Number=SeqID_16441
atgacgtatcaacaggctggccgcatcgccatcctcaagcgagtggctggctgggtgatttttattccggcgctgttatccacccttatctccatcttaggctttatgtttaaacacagcgaaaagcagcccggcattgacgccgtgatgctcgacttcgtgcatgtgatggtggatatgattaagttcaacacgccgtttctcaatgtgttctggaacaattcgccggtgccggaattcaacggcggggccaatattggcttctggctgatctatatccttatatttgtgggcatcgctttgcaggcctcgggcgcacgcatgtggcgtcaggcgcgccatattaaagtaggcattgaagaccagatgattctggatcaggcaaagggcagcgaagggcgcacgcgggcgcagctggaagagaaaatccatgtgcgcgccacaccattntgctgca

SEQ ID NO: 2039 - DNA, 311 bp, Zea mays
  Peptide Sequence Number=SeqID_8427
  Probeset Number=SeqID_16442
acatctgcgctcatgctacgctccatcgaatcctggaagatcaatctgatatccgtctggtttggctgcttttttaccggcctggccattagtcagatcattcctttcctgccgctttacgtggaagagctgggtatccgtggcggcaacgcgctcagtatctggtcaggcctgaccttcagtgtcacctttattttttctgccgccgtggcgccgctgtggggcagccttgccgatcgcaaagggcgcaagctgatgctactgcgcgcttcgtttggcatgggcgcgatgattctgctgcaggcatgcaa

SEQ ID NO: 2040 - DNA, 274 bp, Zea mays
  Peptide Sequence Number=SeqID_8428
  Probeset Number=SeqID_16443
cgacgacctgtcgatggaagcggcacgcgaaggcggcacgctcacgcaggcggccgatgcggcgctcgccgccggctgcgacatggtgctcgtgtgcaaccagccggacgcggccgaggtcgtgctgaacgaactgaacgcgcaggcgtcggccgagtcggtgcggcgcatcaagcggatgcgggcgcgcggcaaggcgctcaagtgggacaagctgatcgcgcagcccgagtatgtccgcgcgcagacgctgctgagcagcgcgctggcgtaa

SEQ ID NO: 2041 - DNA, 763 bp, Zea mays
  Peptide Sequence Number=SeqID_8429
  Probeset Number=SeqID_16444
gtgtaaattcgcaagatcaagttttttaaataataataccattggccaccttgctgaccgagtttttaggtctgtctgatttgtggctaactataccatatttcatttaagattagttgttcgaattaaataactaacttcaactttaaatagaaaagttagataagttaggcagggaataaacagagcatttatctgtaggggagaaatatcgtaataacacgtcagtacgggcccctgacatttattttattccatctcgacggggaagggacccccaatcaaacatgcaaaacaacagcaagagctagcttattgggggctgcctgcctgcttataacaaggcggacggacggaggagcatggaaggatccttcggttgggccgctggggatgagtctaggggatcttgcacccccagttttcggggaggaagtcgcggcacctgtacttgggggggcccttgtccggggacacggggacccattttttgcagggggcggcccacttggggaggaggtcgtcgaaggtccacacccccgaccaggtggggcactcgccgaaccaacactgtttttttgtcgtcggccctgcaggtcctttggccacggccgcaaaaaccaaaagggcctggaaaactaggatcgccaacagagggctgctcttaattttctcgacctctcgctttaccggttgttgccgacctctactacaaaaacgcaagcgtttgagttcgcctcgtgccgaattcctgcagcccggg

SEQ ID NO: 2042 - DNA, 321 bp, Zea mays
  Peptide Sequence Number=SeqID_8430
  Probeset Number=SeqID_16445
atgactgagactgacactgttgtgtgtcgacaacgatggcaggtggagcagcggtaccagcagtaccacgggcagatgcaggcggtgtcggcgtcgttcgatgcggcggcgggcgccgggtcgtcgcggacgtacacggtgctggcgctgcgcaccatctcgcggcagttccggtgcctgcgggacgcgatcgcggcgcaggtgcgcgcggcgagccgggcgcttggcgaggacgcggacgccgccctcgccgggggccgcaccgtggggtcccgcctccggtacatcgaccaccagctccggcagcagcgcgcgctgcag

SEQ ID NO: 2043 - DNA, 427 bp, Zea mays
  Peptide Sequence Number=SeqID_8431
  Probeset Number=SeqID_16446
aatgcggccggaacatcccctttcagaagggtggcgtaagccccttatgagttatctttttttgtttttagtccaagaggcaaaagagtgaactgatttgattaaaagtttcacggcgacacatagacctgacaaaatatgagccatgaatgctcaaccaaccactgggatacacccaacatagtttcagacattccgatggaaaaaaatttattcaccggatgcacttttttccgatactctttggaagacttttttatgataaactagaccttgagttcttcatcttagttggtgctgatcatgtggcggatcaggttggtccaacttttcatccccgcggattgctagttgtaaatgccacagagtattacgttatgatctttataaggttttttcatttttattttcaaagcaatacttcagc

SEQ ID NO: 2044 - DNA, 306 bp, Zea mays
  Probeset Number=SeqID_16447
atcggcaagagtttcatgaatcaagagcacatatatacatataaaaaaatgttaggggaagcatatctctaccaatatattacaagccgacaatggctcatacatctaacaacacttatgttgcctgtgatggggcaatgtaccgacaatgataacacatttaaggaatagcatgtacaggcagagcagtgaagttaagaactgcctgatagactagagtcactagcaaacgtgctttccattaaagtaatggaattagcaggagggatactattggtagttaaggcattagaccacattatcttg

SEQ ID NO: 2045 - DNA, 337 bp, Zea mays
  Peptide Sequence Number=SeqID_8432
  Probeset Number=SeqID_16448
cccctgatttatgaatataacattccgatagtagtcgactttttcttgatctaaccgtttttctacttattcacaagaaaatcaagattatgataccaaattatgaattttgcttcataggtcaaggaacctgaagactcgtgttattggttgcccaaagactatcgatggagatctgaaatgtaaggaggtaccaacaagctttggatttgatactgcttgcaagatatactccgaaatgattggcaatgttatgactgatgcaagatccacaggaaaatactaccactgtaacagcgacgctggcagtccaggcagcgaagcaggcagcgactgc

SEQ ID NO: 2046 - DNA, 395 bp, Zea mays
  Peptide Sequence Number=SeqID_8433
  Probeset Number=SeqID_16449
atgagcatgagcttcctgccgatgggcgctgactttgacctgaccaaatacgtctctacccacaacgtgggcggcgcggtgatgggcgacaacccgaaaacctcggcgctgaacaagtacctgcaaagctgggatgtgcacaacgtgtttgtgccgggcggtaacgccttcccgcagaacttccaggcgaacccgaccgacaccatcggcgcgattaccctgatggcggcgcaggctattaaagagcactatttgcagaatcccggcccactggcgcaggcagcagatgacgcatcactgattaaaaagggcgagtatctggcgcgccttggcgactgtatggcgtgccataccgtggccggcaaagcggattatgccggcgggctggcgattga

SEQ ID NO: 2047 - DNA, 456 bp, Zea mays
  Peptide Sequence Number=SeqID_8434
  Probeset Number=SeqID_16450
tgctgatcattggcgagcacaccgctgaggtccctgagctggatcacgcgctcgtggcggccatcgcagaggacctgtaggaactgctggtggtccccgttcctcgtgactactggttagtggaccccgatgccctggtgcacacggagtggatcgtgacccatcgcagggaccgcgtgggcatgctgctgaacggccggacactgcttcaccgctggcccgacacgtgagctgtccagcgagggcacaacaaggggcgcaattgaggtgccgcccaacggtttaccggtgatcctcggacctgaccatccggtcaccggtggttacccggtgatcggcgtcgtcgccgaccacgacatcgacaaggtggggcagatccggcccggacagcacgtgcggatgcactggtccaggccgcgccaaccgttcggtgcctgaacccgtacaggcaccagc

SEQ ID NO: 2048 - DNA, 491 bp, Zea mays
  Peptide Sequence Number=SeqID_8435
  Probeset Number=SeqID_16451
ctgaatggtttcttgtccgtttaaagtatacttttctatttgtataggtaaacctctttatcaacaatcttggagaagtaccagaccaactctggaaagataccgtgggatgagaaacgcaaggtaatattggagaagatatctcgtgcttcagctcccaatagtaaaacggctctggctctttgatgactctcggtgaggagcctttttttagaccgtttggtacagcttcacgaagagccgaaaaaagagccaccgagagtcctgacaaagggggccttagttgtcagtttaattctgaatctgaaactagaaagctcgcctaagccactatttctcttcattatctgcagcaccagcaggatatcgcactgagcggcagcatgggagatcttgagctgggctaccatactgaccgcgacttggcggcccagatgccaatcaccttccgcatgcagcccagtcatcccaacttgcaggataacaattag

SEQ ID NO: 2049 - DNA, 628 bp, Zea mays
  misc_feature (601)..(628): n is a, c, g, or t
  Peptide Sequence Number=SeqID_8436
  Probeset Number=SeqID_16452
ctccactgttcttgctgcgcttgcgtccgagctacatggggatggggttttagtgcagttgtcgatttatttgagcttgctcgacgacatggtgtacaagagattactgaaccaatacatgctatatggcaacaacaagcttcagcccattgttatgaagagtggcaagtacactctcggctacaagaccgtcctcaggactctcaggaactctaagtcgaagctagtgatcatcgctaacaactgtcctcccctccgtaagtctgaaattgagtactatgctatgcttgctaaggtcactgtccaccacttccatggaaacaatgttgacctgggaacagcctgtggaaaatacttccgtgtctgctgcctcagtattattgatcctggtgattctgatatcattaagactacaccgggtgagcagtaaggaagccacaccagtagagcgctcttgtgcaatagtgctgtagcggatcttcttgctggacttgtcttttgttttgttcctatagaatttacctgacagtaaacagagttcgtgggaacattattctctttgattgaaaattttgtacctggcaattgagtaattgacatnnnnnnnnnnnnnnnnnnnnnnnnnnnn

SEQ ID NO: 2050 - DNA, 262 bp, Zea mays
  Peptide Sequence Number=SeqID_8437
  Probeset Number=SeqID_16453
gcttgcatgcctgcagtaatatgctgaagccatcatactttcggatggacccactacctggacgaaacgcgcttttaccatcccagccaggggagaaaattgtacagtatcctattcgtccagtagatactacaacagattttgaaggaacaacaagccttcaaccaactcaaccggtaacacacctcttcctaacaccttattttccatacctggtttaggaacccaacttcttgttagttctaattatccatctgcagaa

SEQ ID NO: 2051 - DNA, 224 bp, Zea mays
  Peptide Sequence Number=SeqID_8438
  Probeset Number=SeqID_16454
ccagtcgcgagatagtcgatccgctcgcgcgaccctgcttaacagcagcctcgcaggtacaccaggccacccgaggctcagacacagtggcagggacctttgttgccgcaattagtacggtacgtaaactgcccatctcggtgggtaagctaatcgaccacagcactagtgctgcggttatttttacagggggggtgtgaataaaaatgataactcaaaaagtt

SEQ ID NO: 2052 - DNA, 352 bp, Zea mays
  Probeset Number=SeqID_16455
gtgaataaatcaatgttagcgggtattggaatcggcgtagcagcagcgttgggcgtggccgccgtcgccagcatggatgtgtttgatcgtggcccgcagtatgctcaggtcctttcggcaacgccaatcaaagagagcattaagcaaccgcgtcaggagtgccgcaacgttaccctcacgcaccgtcgtccggtgcaggatgagaaccgcatcgccggttccgtactgggtgccgtggccggtggggtgattggtcaccagttcggcggtggccgcggccgggatatcgcgaccgtagccggtgcgctggcaggcggctacggcggtaaccaggtgcagggtgcggtgcaag

SEQ ID NO: 2053 - DNA, 218 bp, Zea mays
  Peptide Sequence Number=SeqID_8439
  Probeset Number=SeqID_16456
accattatattgctagagtatgccaagacacgagcaagaagtcgccaatggaactgatcaacgaggtacctccgatcaaggttgatggtcgcattgctgtctgtgaagggggtaggcgtgttggacttggccacccaatcgagtacatctgccttgatctggaggcacctaatgtgtgcaaatactgtggtctccgttatgttcaagttcaccatcac

SEQ ID NO: 2054 - DNA, 536 bp, Zea mays
  Peptide Sequence Number=SeqID_8440
  Probeset Number=SeqID_16457
ctttagagtcgacctgcagtgaagctaggaaaagaaatccactaccgttctatgaggatgagaggctgcggagatgtcattgttgaatccgcactcgtggacctgtacgcaaaatgtggtgcagtagactatgcctacagagtattcaaaatgagcagtgtccgcaacatgattacttggaatgccatgatttgtggttgtgctcagaatggccatggtgagcgaaccatcagcctgttcaatgagatggttagaggaggggtcaagccagactacatgagtttcattggtgttcttttttgcttgtagccatactgggatggttgaagagggaaggaactacttcaactcaatgagcaaggactatggtattccccctagtattgaacattacaattgcatctgatgacctcctcagtggagtggaacgctagctccgatcaacaacgctattactcgatctgatgcaagaaaacacacaaaattgtggagtgcttcggcgttcttcatgacagatgctacggggctgatgacag

SEQ ID NO: 2055 - DNA, 733 bp, Zea mays
  Peptide Sequence Number=SeqID_8441
  Probeset Number=SeqID_16458
acgccgggccgttacgtgctgcaaaccaccagcagcgacggcgatgtgcgctccgggccgttcattattggtgccgatctgctcgagcgctatacgctgtccgatgtaattgcctatttcaaaagccagcgcgtcaccggcctgttcgataaggcggaccgcaaactgccgctgccaccgggcaccggcagcggcacggttgacgtccacggcggctggtatgacgccaccggcgattacggtgtgcacctgtcgcaccagaatctgacctcttatttcaatccgcagcaggcgccgctggtggcgtggagtttattgcgcggttatcaaaatctcggggcgcgtgataacccgaactttgacgagtatcgccggcgcatgctcgacgaagggctgtacggtgccgatttcctggtgcgcatgaagcggccgggtgaatccttcttccaggcgatctcgtcgccgggcaaagagaagctggctcaggaccgggtgatcgccaatcccaactggcgcacgcagatcaaagagaaggagtcagattccaccattgttgaagaggaggcggtcggcccgctggcgtggcaggccagcttccgctccggtgccggcatgtcaattgccgcgctggcgctggccagcaccatggagaatgacggcaacttcacgcggcagcagtatctgcaaaccgcagaagatgcctttgcgttcctgcaggtcgaaaatagaggat

SEQ ID NO: 2056 - DNA, 270 bp, Zea mays
  Peptide Sequence Number=SeqID_8442
  Probeset Number=SeqID_16459
gctccgggggtcgccttctccgtgggcggcttggcttgccttttttgtccccacctcttggtcgccggggtgcccttctcggggggcggcgccgggtttcgtcacttcttcttcgctgtcgtcgtatcggtccccttggttgatgccactgtgggcagctttgcctccgcgttccccaactctaacgttgggtgccttgtgggccatcttgcgggttgctctcgcaagtggtgcgtgtctcgctctgtgtggttgcgccggccccgcgcg

SEQ ID NO: 2057 - DNA, 435 bp, Zea mays
  Probeset Number=SeqID_16460
ggccccggcgatcaggcccgacgaaggagacagcacagatggacacccaacgcgcagcggtcgtcacgtaccgcggcaatgcgatcgagaacacgcacatcgccgatgtggcggtcgtggatgccggcggcaagctgctgttccggctcggcgatccgttccggacgaccctcgcgcgctcggcggcgaagccggcgcaggcgctgtccgtgatcgagacgggcgcgccggagcggttcggtttcgacgacgcggacatcgcgctgatgtgcgcatcgcacagcagcgaggaacggcacatcgcgcgcacgcgggcgatgctcgcgaaggtcgacgcgcaggagtcggatctgcgttgcggcggccatgcgccgttgtcggatgcggtgtaccggtcgtggatcaagcgcgactacacgccgaccggcgtctgca

SEQ ID NO: 2058 - DNA, 233 bp, Zea mays
  misc_feature (107)..(107): n is a, c, g, or t
  Peptide Sequence Number=SeqID_8443
  Probeset Number=SeqID_16461
gcgatgtcaccatgtcaaacatggacggctaccggctgacgcagcgtctgcgccagctgggccatgctttcccggtgattggagtgaccgctaacgcactgtcgganaacaaaccagcgctgtatggatgccggcatggataactgcctgtcaaaaccggtgacgctcgatgtactgaaacaccacggctggctcgtgtataccgtatacggtacacgaaatccgggaagggt

SEQ ID NO: 2059 - DNA, 240 bp, Zea mays
  Peptide Sequence Number=SeqID_8444
  Probeset Number=SeqID_16462
acccccaagttgtggacattgtcccgtcggccgaaaacttcgggttgaattacggcttaaaattttcttgcggccccgccggcaagggttcttacaattactacaacaaggcccgtgccggattggccggttcaaccccttccggcaacccgaaaaattccttgtggtggaacggattcattttaacgaaagccgcttacggttcattggggattggttggttaaagggaacctattgaa

SEQ ID NO: 2060 - DNA, 214 bp, Zea mays
  Peptide Sequence Number=SeqID_8445
  Probeset Number=SeqID_16463
aggacaacaccatattatgagaggattaacaaagctcatgtttgcagtttctttgttcgtggcgaatatacaagaggagctgagtgcccttatcgtcaggagatgcctggaactgggcagttacctcagcataacattaaaaatcgctgctatggactggattttccattgagacctacaggcttccaacatactgatatggtgccacctgcag

SEQ ID NO: 2061 - DNA, 305 bp, Zea mays
  Peptide Sequence Number=SeqID_8446
  Probeset Number=SeqID_16464
atgatgatggccggcgcgcagcagacgcggggagaaatgacggtgggggaaatttatcgatatcgcgccgacgtggcgctgctgtcaccggtcggcatcgatgcccgaaacggcgccagcagcttccatccgcatgaagctgccatcgcgcacgccatggtacagcaggccagccgcaccctgctgctggcggatcacagcaaactcggcgtgatcagccgtactcagtacgcccctgtcggcgatatcgatctgttgatttgcgacggcggcgcggcaaagcccggtgcgctcagcgctctgca

SEQ ID NO: 2062 - DNA, 462 bp, Zea mays
  misc_feature (14)..(14): n is a, c, g, or t
  misc_feature (19)..(19): n is a, c, g, or t
  Peptide Sequence Number=SeqID_8447
  Probeset Number=SeqID_16465
gcagtggaacaacncgganagcggttttttttttttttttttttttttttcaaacaaaaccatggatatgccttgcatagcagccataataaggggtactatcagtatggtagatggacacatggtagcaaaattacatagctaaaagataaaaaaaggaaacgggcggggggggggggcgctacatctcatctccccgcgtactctgcgttgaaccactcttcccgcgaactctgcgttgttaccactgcttcccgcgtactctgggttgttaccactgcttcccgcgtcctgtgcgttgttaccactgcttcccgcgtcctctgcgtggttcccactgtttcccgcgtcctctgcgttgttcccactgcttcccgcggactctgcgtcgggccccctgcctcccgcgtcctctgcggtgggcccactgcttcccgcgtactctgcgttgttaccactgct

SEQ ID NO: 2063 - DNA, 563 bp, Zea mays
  Peptide Sequence Number=SeqID_8448
  Probeset Number=SeqID_16466
ctacccggcgatgccgtacccggattacgccaaaatcagcgatgaagacctgcacgcgctgtacgtctacttcatgcagggcgtgaagccggatagcgcgcagccgccggaaacaaagctgagcttcccgttcagccagcgctggggcatgcgtttctggaactgggcgtttaccttagataagccgttccagccgattggcggcgcgtcagcgcaggttaatcgcggtgcatacatcgtggaaagccttggccactgcggcagctgccacacgccgcgcggcctcggcatgaacgagaaggcgctggacagcagcgacgatcgcttcctcgccggcggcagcctgaataactgggaggtgccgtcgctgcgcggcgtgccacgctggagcgagcaggagattgtcgattatctgcaaaccggacgtaacgataaagccgcggtgggcggcgagatgacgtcagtggtggagcactccagctcgcacatgacggatgccgatctgcaagcaattgccgcttacctcaagttcctcggcggcaaaccgccgctgcaggcatgca

SEQ ID NO: 2064 - DNA, 1520 bp, Zea mays
  Peptide Sequence Number=SeqID_8449
  Probeset Number=SeqID_16467
atgacgaggccagcaccaccatcatcgcaggctctagtgcttctcgccgccgtcgccgtctcgctccttctttcccgctccagccatgtcgctgccggcggacaccctgattacgcggacgcgctcgccaaggcgatactcttcttccagggacagaggtcaggccagctgccgccggaccaggctgtcacgtggaggtccaactccggcctctccgacggctccgccgcaaactctctctatctgtctgttgacgtgcgcgcgcggcaggtcgacctcaccggcgggtactacgacggcggcgacaacgccaagttcggcttcccgatggccttcacgacgacgatgctgtcgtggagcgttctggagcacggcgggcggatgaaggcgcgcgtgcgcgacgcgcgcgccgccgtgcggtggggcgcggactacctgctcaaggccgccacgcagaccccgggcaggctgtacgtgggcgtgggcgaccccggcgcggaccaccgctgctgggagcggcccgaggacatggacacgccgaggaccgtgtactgggtgtccgcgtcggcgcccggctccgacgtcgccgccgagacggcggccgcgctcgccgccgccagcatggtgttcagggccgccgaccgggcctactcccggaggctgctcgccgcggcgcggggcgtgatggagctcgccgtgcagcaccaggggaggtacagcgacttcgtgggcggcgacgtcggcgcgtactaccagtcgtactccggctacaaggacgagctcctgtgggggtcggcgtggctgctctgggcgaccaacagctcctcgtacctcacctacctctactacttgggggacaacgacggcgtcgacatgttcagctgggacaacaagctcgccggagcgcgcgtgctgctgtcacggagagctctggtgaacggcgacacgaggctggagccgttcaggcagcaggccgaggacttcttctgcaggatcctgcgcgactccccttcctccacgacgcagtacacgccgggcggcctgatgcacaagtcggggtacgccaacctgcagtacgtcacctcggccagcttcctgctcaccacctacgccaagtacatggccgccaccaagcacaccttctcctgccagggcctccccgtcaccgccacctccctcagggctctcgccaagcagcaggtggactacatcttgggcgccaacccccagggcatgtcctacatggtggacttcggcgtgcggtggccgcagaggatccaccaccgggcgtcgtcgctgccgtcggtggccagccacccggcgcacatcgggtgccaggagggcttccagagctacttctattccagcggcgccaacccgaacgtgcacacgggcgccgtcgtcggcgggcccgacgagcacgacgagttcccggacgaccgcgccgactacgcgcggtcggagccgacgacgtacaccaacgcgcccctcgtcggctgcctcgcctacctcgcgggcac

SEQ ID NO: 2065 - DNA, 675 bp, Zea mays
  Peptide Sequence Number=SeqID_8450
  Probeset Number=SeqID_16468
tgcagtcgctgaatgacgtactgagcaacaccaccggcatccacggtgtggccgccgatatggaccgcataaattactattcgcgcggttttctgattgataattacatgaccgacggcattccgaccgcgtttgcccagcgctggaacctcggtgacgcgcagaccgataccgcgctgtacgagcgcgtcgaagtggtgcgcggcgcaacgggcctgctgaccggaccgggcaatccttccgctgccatcaacatggtgcgtaaacatgccgacagcaaagagtttaccggtagccttgaagctggctatggcagctggaataagcagcgttacgtcgccgatctttctgcaccgctgtcaccggaaggcaacgtgcgcggtcgcctggtggccggctatgaagacaaaaacagcttcattgaacgctacggtgccgataagaagtttatctacggcgtggtcgacgctgatgtgacggacgccaccagactgtctgttggttatgaattcagccaggtaaataccgattcaccgatgtggggcggcgcgccgcgttggtacaccgatggcacgcagatccactcgcgtcgcggctataacaccgcgccagaatgggcttacaacaacaaagaaaataaaaaggtctttgttaacctgcaggtagactctagag

SEQ ID NO: 2066 - DNA, 459 bp, Zea mays
  Peptide Sequence Number=SeqID_8451
  Probeset Number=SeqID_16469
cgctcttcgctcagccacctggtgaaaacgctggagcataacctcggcgtgcagctgtttcagcgcaccacacgcagcgtgtcgctgaccgacgccggtgagcagctattacagcgcctcgcgccgctgctcaatcagatggatgaggtgctgcacgacgtcagcctgagccgccagcagcagtacggtacgctgcgcatcagcgccagcgatgtggtgattggcctgctactggatcaggtggtgcccgagttcagcgcgcgctatcctggtattcagcttgatttatccgcccagggcgcgctggtagatatcaccgccgccgggtttgatgccggcatccgtctgattgaagatgtgccgcaggatatggtggatattgcgctcggcggcccgctgaccttcgttacggtagcctcgcccgactatctggcggcgcacgcgccggtgcgtcggccg

SEQ ID NO: 2067 - DNA, 455 bp, Zea mays
  Peptide Sequence Number=SeqID_8452
  Probeset Number=SeqID_16470
tgcagctggcgctggccaaaccaccacggcgttcgctgtgagatcgtcgcctttccgcagcatggtatgctgcattcgcaggtcgatggtctgatgcgcgaggcgatgcagctcggcgtgcagtatgtcggtgggctggatcccactaacgtggacggcgccatgcaggcttcacttgatgcgatgttccgcatcgcgctcgattacgatcgcggcgtggacattcatctgcatgagaccagcgccgccggcgtggcagccattcagtacatgatcgccaccatcgcccgtaatccacagctgaaaggcaaagtgacgctgagccacggtttcgcgctcgccacgctggaaggtaaggcgctggatgagattatcgccggcatggccgaacagcagatgagcgtggcgtcaacgattccgattggcaagctgacgatgccattgccgcagctgca

SEQ ID NO: 2068 - DNA, 627 bp, Zea mays
  Peptide Sequence Number=SeqID_8453
  Probeset Number=SeqID_16471
tgacgaggtgtcgaacgacggccgtttccaggctcgcgtggctgccgcgatcaaagaaggcctgcgcgcgctgggctattacgagccgcagatcgactttgaatcacgcccggcaccgccgcagggtggccgtccggtgctgattgcccgcgtcaccgccggtgagccggtgaagattggcggcagcaccatcgtggtggaaggtgccgcaaaagacgatcctgattatcaggcgtgggtgaagcagggcaggccgaaagtcggcagccagcttaatcacggcgactacgataaattcaaaaacggcttctccagcctggcgctgcgtaatggttacttcgacggtgactttaagcagagccagcttggtgtctcggtcgaacggcgcttagcgttctgggatatcgactacgacagcggcccgcgctatcgcttcggcgatgtcagctttgaaggctcgcaaatcaatgaagcctatctgcgcaacctggtgccgttcaaaaagggcgatccctacagctcacgcgatctggccgaactcaatcgtcgcctctccgccaccggctggtttaattctgtcgtcgtggcacccggagtttgataaaagggcgccagaaccaaagtgct

SEQ ID NO: 2069 - DNA, 222 bp, Zea mays
  Peptide Sequence Number=SeqID_8454
  Probeset Number=SeqID_16472
ggtgcggctgcggccataggaaaacgcgacgcgggtcggtcaggcttggcccagaaagttggcatggcgtcggcgtcgccccgatccgccactgttgcggctggtagctaccgatgtgacaacaacacggcgtcgttgcctgcctggtgggcgcagggaggaccagagcactgccttgtggctgcatgcgtctgccacgagcccacgacaaggttcatttga

SEQ ID NO: 2070 - DNA, 270 bp, Zea mays
  Probeset Number=SeqID_16473
aagctacacctcagcgtccgacagcggcattggggcaatagggcggagatccgcctgccgcgtagccgcacgcccgcactagccactggctcatcaccttcgacaccaccgagggggccgcgcacgcctatgacggcgccggcgttccgcctccatggggaccctgctaggctcaacttccttaagcctaggcgcggcgggcagcacctcggcctgccgtaccacaccgcgattgatgccaagctccacgccatctgtagcggcatggac

SEQ ID NO: 2071 - DNA, 459 bp, Zea mays
  Peptide Sequence Number=SeqID_8455
  Probeset Number=SeqID_16474
caggtgctgcagcgttactggaagcgcgggtgtcagatgaagcggtagcaaaccgcgtcctctgagcagtggcaccacattgtggtaggatccaatcatccacggacaatgtggatgcgcgtgaatcggcagcatcacagccgtgacgcctggctggcgttattatcccagcagaatcaaaatgcgttgtagtggtgacgcgccggatgcgctgagtcttcaagctccggctccggtcagtcagctgccaggctttcagcagggctgggtaacggtgcaggatctctctgctcagcgttgcgccctgctgctggcgccggaaatcggcgaaaccattctcgacctgtgcgctgcgcccggcggcaaaaccacccatattctcgaaattgcgccgcaggcccgcgtgatggcggtggatatcgatgcgcagcgcctgtcgcgcgtgacggaaaacctgca

SEQ ID NO: 2072 - DNA, 373 bp, Zea mays
  Peptide Sequence Number=SeqID_8456
  Probeset Number=SeqID_16475
gtaaagcgatgtgcagaaatgtcacgcaaactaaaatttttcagtgatcagatcaacagggcaggtttaagatcttctgttcgacctgcacttgaaccggatattgatctggaggagctagaggcaagattgggtgaacatgagcatgaactgcttgagatgaatacaaatagtgacaagctaaaacagacatacaatgagcttcttgaattcaagctggtcttgtcaaaggttgtatctcattcgtgtgacttgattgtattactgatccattatttttctcttctttccattaaatgttttatcaaacaacatcttgcaggcaggtcacatccttgcttcttctcacagccatgcagcttcaaaaagatct

SEQ ID NO: 2073 - DNA, 626 bp, Zea mays
  Peptide Sequence Number=SeqID_8457
  Probeset Number=SeqID_16476
cccggcgcctcaacgggcagaccatccccagccatattccgggtgcccagctgagtacgctgaaggagcccgtcggggtctgcgcgctgctcaccccatggaacttccccagcgccatgatcacccgcaaggcggctgcggcattggcggccggctgcacggtggtggtcaagccggcccacgaaacaccgttctcggcgctggccctggcccagctggcagaggacgccggcttcccgccgggggtattcaacgtggtgatcggcgagccgcaaatggccatggaaaccctggtgcgcgacagccgcgtgcgggcggtcagcttcaccggctcgacccgggtgggcaagctggtgctgcaagccgcggctcaggatgtgaagaaagtggcgctggagctgggcggcaatgcgccgttcatcgtctgcgccgatgccgacctggagctggccgtgcgggtggccgtggcagccaagttccagacgtctggccaggactgctgcgcggccaaccggatcatggtgcagcggccgttgtacgaagcattcctggcgcgttttgcccaagcggtgcgggcgctgaaggttggcccggcgaaagtcgaaggcgaggagacagccacggag

SEQ ID NO: 2074 - DNA, 351 bp, Zea mays
  Peptide Sequence Number=SeqID_8458
  Probeset Number=SeqID_16477
catatcgcagccaggggcgttgggtgatctggctgtccttccttgttgcgcttatcctgcaaatcatgccgtggccggatcagatttacatgttccggccattcttggctattgctgatcctgatctactgggtgctggcgctcccggcaccgggttcaaatgttggccacgggttttttcttgggccccataatgattttgttcccgggttcaaccttggggttggttcgttggcttaaccatattgcctattttgttgccctttaaatttaagttattccccattttggcgttttgccaccagccattaatggttatggtcctttcgttgccggttaatgtgattgttt

SEQ ID NO: 2075 - DNA, 482 bp, Zea mays
  Peptide Sequence Number=SeqID_8459
  Probeset Number=SeqID_16478
tgcagctaatccggccgggcgatcgcattctgctggtgggtgcggacggcacggcgcgtggggtgatcctgccgctgctctcgacgggctgcgcgctggtggtggttaaccgcacggcagaacgcgcgcaacagctggctgagcttttccagcacagtggggcgatccaggcgatgagttttgatcaactggccggcgatcgttttgatctgatcatcaatgccacctccagcggcgtagcgggcgacgtgccgccgctgccggttacgctgattgatgcgcaggtgcgctgttacgacatgttttatcagcaggggctgacgccatttctggcgtggtgccagcagcacggcacacagcagctggcggatggactcggcatgctggtgggtcaggcggcgcatgcgtttcagctgtggcatggcgttatgccggagatcgcgccggtcatcgatcaacttaaacaggcgatgcaggcatga

SEQ ID NO: 2076 - DNA, 500 bp, Zea mays
  Peptide Sequence Number=SeqID_8460
  Probeset Number=SeqID_16479
gtttgcagcataaccgtctctgctgatgttatacgaccactaagatataaacaaaacagtcaacattgattgaacttgatcagcctacttattcacaactgatctgaagagtaaaggagaaccagggactgtaatggctactcaaagaagcacttataaactgacaacacagctacacacacaaatatttataagattcaatcttttaaatggtctggtaactgctcaagtggtctggtaacgaagaatctgcaaactttgaaagatttattgctggtgcttttgctggggttacaacaacgatcatgtgcatacctatggatacaatcatgacaaagatggatgctcctggtggtgaagctatacgtggggtcattggtgttgcccgccacatgatccaaactgaaggattcttctcgctagataacggattgatgccttctcttatcagtatggcatcctctggcgatgcattctatggagtgtatggcatactgaag

SEQ ID NO: 2077 - DNA, 493 bp, Zea mays
  Peptide Sequence Number=SeqID_8461
  Probeset Number=SeqID_16480
aggcgactaaagacgccccccgtatcgagggtctggacgtcaaacacagcagcaaagaacagaccgaaacggacgctggcagacgggctgaataagaggtcagggcaaccgcaccataccggaagatgacctgggtggcgggaccttcgataaggcgatcatggagatcaacgaagagaaccgcgagaaaaccttggaagaactggcgaccgacggtgatacccagccgcgtggtgaagacgtcaacagccgactcagcaactgcctgtgtgacgcaagcaagaaacatccggcgcatcgtccagacaacaatgcgctggcgatgcaccgcctcgtaagaaggccgaccagaaagcaaagaatgagcctgtgtctgcccagcagacagacgtgaacctgccgtacatcgcgggggaagccactgggactaagcaccagaccatcaaagggacccgagccaagctggaaccactgggggaagaccaagtaaccc

SEQ ID NO: 2078 - DNA, 225 bp, Zea mays
  Peptide Sequence Number=SeqID_8462
  Probeset Number=SeqID_16481
accttaaacaacaccacggcaactaatttaggctgtcgaactggagtagggcaagggaaaatgttaagcagaggtatatgtggtggtggtggacatggtggaaaaggcggggatggtttttataagggaaaccttgctgagggtggagctatctatggcaatgctgatctaccttgtgaacttggcagtggcagtgggaatgactttaccgaggtgtccacaagg

SEQ ID NO: 2079 - DNA, 500 bp, Zea mays
  Peptide Sequence Number=SeqID_8463
  Probeset Number=SeqID_16482
ccagcgcgcagcagcaggacagccggagcaaaaacaagcgacatgaccaaccgcccgacgcagcggagcaacagcggctgcgactgctgcacaaacccggcacgcgcgagaataacgcgctgcaaatggcgcgcgggctgaaacgcgaacatccgatcaaagccaaagtgctgccaaccgaatggctgggcgaacacagcgccgagcaggtcgccaatgcggaggattcgaaactggaagaagaggcacgagaccagggccacgaaaaccgcctcgggaataaccgcgcggaacagcgcctgatagagcgactgaaaaacgacccggagatggctgaacgcgccgagaccaacaaacactggccgaaagaggacgagtcgtctaacccgtatatcggcgagctgcggcaggaccagcgccgcaggctgaaaagcgaccccaacggagacaatacgcgcgagcaggagcgggagcggccggcggcgctgaggcagggcgag

SEQ ID NO: 2080 - DNA, 248 bp, Zea mays
  Peptide Sequence Number=SeqID_8464
  Probeset Number=SeqID_16483
atgggcacggtgaaagcggcggaaattgccgccgggctgatcgaacacggccgcgcgccgtcaacgccagtggcggtgattggtcgcggcacgcgccaggatcaacaggtgctgaccggcaccttagcacaactcgaggcgctggctgctgccgcgccaacgccagcgctattagtgattggcgaagtggtgaatctgcacgggcaacttgcctggttccaacattcggcacagcaggggactcgcga

SEQ ID NO: 2081 - DNA, 480 bp, Zea mays
  misc_feature (131)..(131): n is a, c, g, or t
  Peptide Sequence Number=SeqID_8465
  Probeset Number=SeqID_16484
atgccgctgatggtggagccgctggtgatggcccccgccggccagggcgcggcgtacggctcgctcggtgacgtcagacaaatcgtgccgctggtgcggctggcgcgggagctgggcgccgacatcattanagccgaccccacggataacgtagaggatttccatcgtgtggtggaggcggcgcgctgtccgacgctggtgcgcggcggcggcaaaggggaactgggcgcggtgctggcgaaaagcgccgcgctgatggcgcagggtgccagcggcatggtatatggccgcaacgtttatcaacatgataatccgtcacgcgtggtcagcgcgctgatggcgattatccatcagggtgtcagcggcgcggatgcgctggacatctaccagcaggcggagtgcgccggcgaaacgcatcagccgcaggaaggctttgctgagcggccagttgaagatatctggcgcggcgtcagcaacgcg

SEQ ID NO: 2082 - DNA, 505 bp, Zea mays
  Peptide Sequence Number=SeqID_8466
  Probeset Number=SeqID_16485
atccatccgtggtctacccctgcgggctcgcccagctccaaagccccctcctgctcgcgggcacacggccaggccctgggtcgtcgtctccagcatccggctcaagggcgcgcgtggaagaagggcccgacacgggggaagggcggcccgcagaacgcggcgtgcgccagaggacgtgggcaagtgggtggccgagatccgagagcccaacaagcgcacccgcctctggctcggctccttcgccaccaccgagcaggccgcgctcgcctacgacgaggccgcgcgcaggctctacgaccccgacgctttcctcaacttgtcgcacctccgcgccttcacccctaccctccacacgactgcaacctctctgccatcctcatccaagagccgccaaccacctccccacgtcctgcagcggaagagtcaggatgtacgggaccagatcacccgctcctgcgagctcgtggcggactgctaccgcgtgaggagccgccgcacggtctag

SEQ ID NO: 2083 - DNA, 353 bp, Zea mays
  Peptide Sequence Number=SeqID_8467
  Probeset Number=SeqID_16486
ctgcagtatctcttaacttcatccaaagataagacagtgcgcttatggaaacccggctgtgatggttgtcttgcagttttcaaacacaaagactatggtaagcagaatatcaaactgataacagtaacatgtgttcagttcaaccctattgatgagaaatacttcatcagcggttcagtagatggtaaagtgcgcatttgggacgtgttggacaagcgagtaactgactgggccgatacgcgaaatatcataactgatttgagttaccaaccggatggaaaggtgtgaatcagatacaattgtcgttgcatattattttttttcccagtaactcgattctaattcacgctttt

SEQ ID NO: 2084 - DNA, 530 bp, Zea mays
  Peptide Sequence Number=SeqID_8468
  Probeset Number=SeqID_16487
ctgccgggagagcggcctcacatccgaccacttgtgtctcgaggccgaccgatggatcgtgctgccgaacattctccagccggcccccgagatctttgcggggcgtgcacgtgtcacttgactaaccggactgacttgatttgtacctgacgacccggcctcatctatggatacacctccgacgagaccccctatctgatgcctctgaaccgcgtgctggccaccattgtctgaccgcgccttaccgaagatcgcatggacagtacctgcgcctgaatcatgcccgacggactgaccgcatgtacagtgtgctacttagaacgaaggcatcgccatggagcctatacacgtgcccaccgagctaatatattaccagcacgactagaccgtctccaacgactagatcggggcccaccttttagtggacttcctcaaccccggcatcccggatagggacctgtacgataagaccgtcttccacctcaacaacaccgtgtgcttgaagatcggggggccccacggggaccccg

SEQ ID NO: 2085 - DNA, 274 bp, Zea mays
  Peptide Sequence Number=SeqID_8469
  Probeset Number=SeqID_16488
tcacgaagcactgccggcgggccgatgaatcagcatcgccacctccttagccctcgcgttcgccgcgatctccgcctccgttggggccacgacctccaccaccgcgtcctgcgacgccactggccccacgatgagtagcgaagcactaccggcgggcagatgaatcagcatcaccacctccttagccctcgcgttcgccgcgatctccgcctccgttggggccacgccctccaccaccgtgtcctgcggcgccactggccccacgatgagcagc

SEQ ID NO: 2086 - DNA, 508 bp, Zea mays
  Probeset Number=SeqID_16489
tcggcaagctcgacgtcgacacggccgcgaccgtcgtcaagggcatcgcgcacggctgcgagctgtcgggctgcgcgctgatcggcggtgaaacggccgaaatgccgggcatgtatccggacggcgaatacgacctggccggcttcgcggtcggcgcggtcgagaagagcaagatcatcgacggcagcacgatcgccgagggcgacgtcgtgctgggcctcgcatcgagcggcatccactcgaacggcttctcgctcgtgcgcaagatcatcgagcgcgcgaatcccgacctgtcggccgatttccacggccgttcgctggccgacacgctgatggcgccgacgcgcatctacgtgaagccgctgctcgcactgatgcagaagctgacggtgaagggcatggcgcacatcaccggcggcggcctcgtcgagaacattccgcgcgtgctgcgcgaaggcctcaccgccgagctcgaccagaacgcatggccgctgccgccgctgttcaa

SEQ ID NO: 2087 - DNA, 481 bp, Zea mays
  Peptide Sequence Number=SeqID_8470
  Probeset Number=SeqID_16490
tgtacaacttttgcactggccgagctagccaccagagtgcgcgctggctattttgccctctactgggggcagaacatcaatgaggggatgctggcgtagactacgccactagaaactacaagttcgtcaacgtggccttcctccccacatttggcgagggtcaaacgccggcaccgaacctggccgacctctacgacctggcgagcgacggctgcacaggcatgggcacagacatctaggcgtgccagcacatgggcatcaaggtcctgctctccatcggtggaggcgttggcagctatgggttgtcgtccctagccgacgcgaggagagcttcacgacgtacctcaggaaccactaccttgatggctagtctattttcatttccaggcccctcggcgacacggtcctcgatgacgtcgacttcaacatagaaagtggtgggggcatgtcctgggatgactttgacgagtgtgtgagcttg

SEQ ID NO: 2088 - DNA, 348 bp, Zea mays
  Peptide Sequence Number=SeqID_8471
  Probeset Number=SeqID_16491
atggctcatttcactgatatccgcgcgctggcgttcgatctcgatggcacgctggtgcacagcgcgccaggcctggcacaggcgatcgatctggcgctggccgatttgcagctgccgcccgcgggcgttgagcgcgtctcaacctggattggcaacggtgcggacatcatgatggcgcgggcgcttagctgggcgctgggccgtgagccgcaggccgacgagcagcgcgacgcgcgtgcgctgttcgacaaacattacgccgcaacggtggaagccggcagtacgctgtttccacaggtgcaggagacgctggctgcgctgcacgccagcggtctgccgctggccatc

SEQ ID NO: 2089 - DNA, 424 bp, Zea mays
  misc_feature (337)..(337): n is a, c, g, or t
  Peptide Sequence Number=SeqID_8472
  Probeset Number=SeqID_16492
gccttggccccgtaggctcttccccggcaggtgtggcgtgtcgtctgcccgctcgccccgtcgccacgcctgtcggccggtgcgttggcgttcaagcccgcttctcgccggcggccccccgtctgccgcgcaggagctccggccgcggcccgctgcggcgtgcccgagaagcccccccgccagcccgtccgcccgatggcgagttggcgcccggctctgtcctgggcgctgcctgcgccaggacgcggcggagagggctccgagcgctccgctgctgcttgccgcgcgcgcgcgtcagaattcaggtccaccaaggcgccgttatggatcatggatntttacataaggacaaaggagcagctagtggtattcctggtgcccgatacatcgctgaaaggcggcctcggaggccggccggtgggcg

SEQ ID NO: 2090 - DNA, 479 bp, Zea mays
  Peptide Sequence Number=SeqID_8473
  Probeset Number=SeqID_16493
cccccgcaccacatcgtatcatcgtggtgttcgtctccctgggcggcctgctgctgctggcatgcctggctgccgcgctcctctgctggcacaagaagaagaagaggagggggaggaaggcagaggaggaggaggccaaggccgacgtgctcaacttcagcgaccacgttcacgttcacaagcagaccgtgcccggaccggccgggggcgcgagcgccgtcaggctgacggtggacgaggacgtcaggctccaagaggcggtcaggaagcaggacgccatcggcgagtcctcgagcaccgccccttggacctggcacaagaaacaccagagcggagaggagaggaagacggctgtcatcaacgtcaccaagcacaagcacgtagacgagatgatcgtgcctgggccacatggcgatagggtcgatgtcctttcggaggatgaggacatcaggtgtgaagaggccagcgagagccagtaa

SEQ ID NO: 2091 - DNA, 285 bp, Zea mays
  Peptide Sequence Number=SeqID_8474
  Probeset Number=SeqID_16494
gataaatatctgctgctcgggctgtggctgctgtgccacagtctgctggccgcaccgcgcgtcattaccctgtcgccgcatctcactgaactggcgtttgccgccggcatcaccccggtggcggtgagcgcgtggtcagactatcccgctgctgctcgccagctggagcaggtggcgaactggcagggcattcgcgttgaacgcattgtgcagctcaggccggatgtggtgctggcctggcgcggtggcaatccgctgcgccaggggagcagctgcaggcatgca

SEQ ID NO: 2092 - DNA, 304 bp, Zea mays
  Peptide Sequence Number=SeqID_8475
  Probeset Number=SeqID_16495
cgacggcacgatcccttgcatcacccttatcctaggcggaaacctgactcaaggtgggcgctatttcgatcaaaatcagacacagtggcgatccaagcacgtccaccccctggacgagacgatggcgcggcttcggaagtcggggctaaagcgtgcggtgatcgtcgcgatcatgtgtgtccgcttcgtgctcctcccgctgatcggcatcgccgtgtccgcgccgcgtacgagctcggcttcctgtcccgtgacccgctgtaccgctacatgctgatcgccgtgcctcccgcgatgaatatcg

SEQ ID NO: 2093 - DNA, 496 bp, Zea mays
  Peptide Sequence Number=SeqID_8476
  Probeset Number=SeqID_16496
aatcgctgctgccgtatctggagaaccacggcgtgctcacgcgcgactcgctcgatccgtcgctgaagctgatgccgttcaaggattcggccgactacaaggagtcgctgacgagctattactaccggctgtgcgagatcgacgacctggtctgctacccgtggatcgcgcaggcgttcgccgggctgtcgctcgccgacctgaagcgccacatcgacgcgatgctcgccgacggcaagccggtgccgatccgttactggcagggcgacaaggtcgtcgacggcaccgcgaacccgccgcgtttcttccgcgggatgcagcagctgtacaacgcgctgcgcgagaacgggatcgaggtctacgtgatgacggccgcgcacgaggagctcgcgcggctcgtgctggccgatccgaagtacggctacaacgtgaagccgcagaacgtgatcggcgtgacgacgctgctgcgcaatccggcgaccggcgcgctgaccac

SEQ ID NO: 2094 - DNA, 581 bp, Zea mays
  misc_feature (562)..(562): n is a, c, g, or t
  Peptide Sequence Number=SeqID_8477
  Probeset Number=SeqID_16497
tgcagtgggaagccagcaatgtgcgctgccgcagcggggaaatcgacctgattatgcgcgacgcggattgctgggtgtttgttgaagtgcgctatcggcgcgatgcacgttttggcggcgcggctgccagcgtgacgcgccagaaacaacaaaagctgctgcgtaccgctgcgctgtggttgctggcacgcggcggcagttttgatacggtgaattgccgttttgacatcatcgccatcaccgggcgcgaactgacgcaaatcgccgcagccgaagcgctgccagatgcgatttcccgcgccgcgatgacgctggtgcagtcactgctgaacggcaacaaaatcctcagctgcggtaacggcgcctcggcggctaacgcccagcattttgccgccagcatgattaaccgttttgagactgagcgtcccagcctgccggcgctggcgctgagtgcggacaatgtgatgctgacggcaatcggtaatgaccgtctgcacgacgaaatttatgccaagcaggttcgtgcgcttggacaggccggcgacgttctgctggctatctncacccgtggcaacaccccg

SEQ ID NO: 2095 - DNA, 209 bp, Zea mays
  Peptide Sequence Number=SeqID_8478
  Probeset Number=SeqID_16498
atgagcgcggcgctgccgctgctgcacttcataagcacgataaatgatgaagaaggattcaacaagcgtgacgcgaaagcaaatgccaagtcagcatgaacagtacgagagcactgttcatctatttataggcacaggacgcagcccatgtaaaattacattcatgtccctgatatttactgttgaccataaggcatgctgtcgaggac

SEQ ID NO: 2096 - DNA, 477 bp, Zea mays
  Probeset Number=SeqID_16499
ttcgacacacacttcaacgcccttccagagagtgtggatcacaatcttgacggtttaggatcatgcccgccgtatgcacgatcgggtgccgccaggcccggccggggtgccgatcatcgtcagcaagctctgcctggtgtcataaaagccggtggttcggtgggttcatggccttctcaaggacatgaacaccaagatcctatgcctccgcttcggggccgtgcacgtcgtggtagtcgcctgcccggagatagcccgcgaggttttcaggacgaacgacgccgccctggcgtctcgtccggagacggacgcctgcgagctgttcagcctcgggtacaagggcgccagcctgtcgccctacggggagcagtggaggaagatgcggcgggtcctcacctccgagatcctgtccgcgtcgatggagcagcggcagcagcggcggcgagcgcaggaggccgactacctcgtccgttccct

SEQ ID NO: 2097 - DNA, 715 bp, Zea mays
  Peptide Sequence Number=SeqID_8479
  Probeset Number=SeqID_16500
gctgcaccgtaccacgcgccgtgtgcatctcacccaggatgggctggtgtattacgatcgctgcctggatttgctgtcgatgctggatgatatggacagcctgttccagcacgatcctgccacgctgagcggcaagctgcgcgtcgatatgtcggtggcgatggcgaccggttttatcctgccgcgcctgccggagtttttgcagcactatccgggcgtggagattgagctgagcagcagcgatcgccaggttgatgtgattcgcgagggctttgactgcgtgttgcgcgttggcgaactgaaagattccggcctgattgcgcgaaaaattggctcgcacgccttgatcaattgcgccagccctggctacctttcccgcttcggcatgccggtgcggctggacgatctcggccagcacgccatggtgcactatacccaacagttggggcagccctcgccgggctttgagtactttgatggcaaacagtgccactacgtgcagaccggcggcgtggtgacggtaaacagcaccgaaacctatcgcgccgcctgtatcgccgggctgggcattattcaggtaccggcgattggcgtgcagccgctgctggaatccggccagctggtcgaagtgctgcaccacttcccggccaaaccgatgccgatttccctgctctatcctcaccgtcgcaacgtggcgcgccgggtgcgagtgttt

SEQ ID NO: 2098 - DNA, 441 bp, Zea mays
  Peptide Sequence Number=SeqID_8480
  Probeset Number=SeqID_16501
atgggccgctttaagctgggctcgacggtgatcaacctgtttgcgccgaaccgcgttaagctggctgaaagccttgaagccgaaagcaaaacccgcctggcccggcgacagcgctccgctcatcgactaattccgggaaacaccgccgtgcgcgcctctctttttctgctgctgagcctggtgctcagcagcaccgtctttgccgccaccgttccacccgccagccagttaaaacaggatctggaaacggcgaaatccgcgaaaagctcgcccagccaggccgaacaggtgcaggcgctggaagcagcaattaacttcctgtccgaacgcgacgactcgctggaacgggcgaaacagtatcagcaggtaatcgatgatttcccgcggctggcgcgcgagctgcgtcagcaaatcgccacgctgaccgacagcagcaagcca

SEQ ID NO: 2099 - DNA, 519 bp, Zea mays
  Peptide Sequence Number=SeqID_8481
  Probeset Number=SeqID_16502
atggacgaggtcaccctgtgccccaagcctcgtttcctggtcatcccatggccagccactagccacatgattcctatcgtggacatcggctgcctcctcgccgcggacggcgccccggtcaccatcatcaccacgccctccagctcgcagctcgtccagagccgcgtggacgaccgcgctgggcaagcgggctcggcggacaccacggtcaccgcgctcccgttcccggccatggaagccggcctgccggacggctgcgagccctgggccgtacctgagggggtgccagggtcacccgaccgttggcggctttgtgacaaactgtgggtggggctcgacgctggagagcgttgctgcgggcgtgccgatggccacctggcgttctccgccgagcagttcctgaacgagaagctggccgttggcgtgctgggcatcagagtgtctgtcggcgtgacgaagcccacggagggcgtgctgaccggtgccaaagacggcggcggcgctagggcggaggcagat

SEQ ID NO: 2100 - DNA, 242 bp, Zea mays
  Peptide Sequence Number=SeqID_8482
  Probeset Number=SeqID_16503
tggaacaaatcccagaggaagagaataatcttggcccacatgatcgattggttcatgtttaccatttcatgaaagaccctaaccagaatcatcaaattcagaatttgagagatccctttgtatggttatttgggaaggtgagaccgctgctgaggtaatggagcgcatccagagaaaacttagagttcatgatgatgaattgtccaagctccccttcctgtcaagctacatgcttcgaccag

SEQ ID NO: 2101 - DNA, 285 bp, Zea mays
  Peptide Sequence Number=SeqID_8483
  Probeset Number=SeqID_16504
atgggagtggtggatgaagcaaagccagtgaagaagacgacgataagagtgagggagtttgacgtggagagggacccccgggctgtggaggagctggagcgactgtgccaggtcggcctgtctggcgaccaaggctctgaccaccctgtcgccgaccatgatagaggtgcagagaagacgacgaggagcagcaagaagaagaagaagaaaggcatgtctctctacgtcgagcagatcggtgacccgtttgcccgggtgcgccatgcgcccgacaacatcatactg

SEQ ID NO: 2102 - DNA, 515 bp, Zea mays
  Peptide Sequence Number=SeqID_8484
  Probeset Number=SeqID_16505
tcaccaaatctggtcccgtggccgatcggcagcgtctttcggcggcgcgtcgtccccgccactctgcgggtaagcgagcgggctgtcagcgctagggacggcgaccgcggccgcggcgcgtgcgcgctcgcgctcgcgccgcctctcccgccgttcccgtcgctcccgccgccggtcccgccggtcccgcgaccgcatgagccttttcatgttggtcagaatgtcggccacctcctgctccaccgcatccacctccaccaccgacgccggcgccgcatcctccttgtccttgggcgcgtgatcatccaccttcgacgccgcctcctccatgtacgcgtgctgcatggtatggacgaagccgctgctgctgcggcggtgcgatatgaagaagagttccatctgcggcggccgtggtggcaatggcgtcatctccgggagcccatcggccacagcgacggcgaggtgccgtgccacgctgccgccgaaggcgtggcgtccggcctcggctgctggta

SEQ ID NO: 2103 - DNA, 212 bp, Zea mays
  Probeset Number=SeqID_16506
tggtgtatatatgtgatggcagtagctgccacaaatctagaagccaagcaaatgatgcaaaagcagaagtaatcaagttttttgggtccgggcaatatgaggaagcattatctaagtatgaaatggcattgcaaactgctgctgagctggaatcatctgaggatatacgtgcagcatgccattcgaatcgtggtgtgtgcttcatgaaagtg

SEQ ID NO: 2104 - DNA, 380 bp, Zea mays
  Peptide Sequence Number=SeqID_8485
  Probeset Number=SeqID_16507
ggctgggccggctcccctggtgtcggcggcctcctcccggtgttgtcgttctcggtctctgtctccttcggctggggggagtctgttcttgcgtgggtggtgtcgccccccgtctcccggtcccggggcctttttttgggtcggctgcacctgcccttggtggtggtgctgccgcagcgtctggcggtgctgctgttcctgtcgtgggtcgtctgcttcgccgggttggtctttggcttggtcgcccggtgggtgtcgtcagggtcttggggctctgtttgcggggtctccagatccagctggtggtcgtgttgtgtgcgtcgtacaggtccttggtggctgcgcggcccggctccgggctgttcctggcgccctgggtc

SEQ ID NO: 2105 - DNA, 309 bp, Zea mays
  Probeset Number=SeqID_16508
ccggtaactgggagttccgcgccaacgccggcagcggctggaccgacgaattcaagctggatatcgatctcgcaccggcagcgaaaacggaaatcacccacgcttacgatgactttggcccgttcaccggcatgctcggcaacggcgcgattaccaatgcccgcacgccaaaacatgcccgcccggccccgattttaccagcttgggtgcctgccggcgccaatgccccttggaagtataagactgcccttctttctccggggacaaataagttccagccgggaacgtctggcacgcgtgatacgaaag

SEQ ID NO: 2106 - DNA, 362 bp, Zea mays
  Peptide Sequence Number=SeqID_8486
  Probeset Number=SeqID_16509
atcatctgttttaatgtgagcttctttcttatcatttactttacgggatgattcatatctgggagagctatatcagtactattggagttgattttaaaatccgcaccgttgagcaagatgggaagacaataaagctacagatttgggatactgctggcaaacaagagcgtcaggaccagcacaagcagctactaccgtggggctcatggcatattggtcatgtatgacgtaactgaccaggagatcaagtagtggctgaatgaatgatcaagtagtggctgaatgaaattgacagatatgctagtgaaaatgtgaacaagcttttggtcgggaacaaagctgatatattgtcgcatcgcatg

SEQ ID NO: 2107 - DNA, 280 bp, Zea mays
  Peptide Sequence Number=SeqID_8487
  Probeset Number=SeqID_16510
atgcctgccttcttcaacaggatcgagggaaagctcaacatgggggggaaccacaaaagggaggatgactaccaaaggatggccgaggtgcaccacaggaggggggagggggagctccacaaaatggacggggggaagcatatggaaggcgtcctgaagaaaatcagggacaagatcaccgtcgagctcggaaacaagtccggcgtccccatggatatgatggccaggaaaaggatgacggaaaagatgaagcgcggagagggccaccaccacgacggag

SEQ ID NO: 2108 - DNA, 375 bp, Zea mays
  Peptide Sequence Number=SeqID_8488
  Probeset Number=SeqID_16511
atgaaaactgcatccaggcgcgttatcgcgctactgctggcgggcgcgacgctgggcttcagccagctggctctggcacatgcccacctgaaagccccggtgccggcggataacgccgtggtggagcacgcgccgcagcaactcaccctgacattcaccgaagatattgaaccggcattcagcggcgtggaaatgaccaacgcgcagcagcagccggtggcgctggataaagcccagctgaatccgcagcagcacgatcagctgattgtgccgatcgcccagccgctggcgtcgggccagtatcaggtcaactggcacgtgctgtcagtggacggccacaaaacgaaaggtagttacagcttcagcgtgaagtaa

SEQ ID NO: 2109 - DNA, 398 bp, Zea mays
  Peptide Sequence Number=SeqID_8489
  Probeset Number=SeqID_16512
atggaagccgatccggagctgaagccgcgcgatatcatcgtcatggtggcagacatcgacagctacgcgcctttcattcaggcggcttttgccagtgcgccgcctgagcgctatctgccgttcgccatttctgaccggcgcgccagtcaggcgcatccggccatcctcgcgctgctcagcctgctggcactgccggacagtcgctttgcctcagaagaggtgctggcgctgctggaggtgccggcgctggcacagcgtttctccgtcgaggagagcggcctgcgcctgctgcgccgctgggtgatggaatccggcatccgctggggactggatgacgccagcgtggaagcgctggcgctgccggtcaccggccagcacacctggcgctttggcctgca

SEQ ID NO: 2110 - DNA, 368 bp, Zea mays
  Peptide Sequence Number=SeqID_8490
  Probeset Number=SeqID_16513
cgttgagcttatatacaagcacgctgtgcctgttccgaagtgtgagtgcagcaaggctccccagttgggtattagttgtgccggtggatacatggcaggtgtcttctgtgctagtgtttctcacccggcagaaaaccttgtgtctttcttgaccaatgccaagcatgttactgttggccatcctgttaagaagcttggtctctggggtcattttcactagagggctgcctcttcgtatggtcaagaatggtaccgtgcatggtgctcagtggggaatttaggacgctttcaaagtcatggttggaatcacaacaacgggaggtgttacacctgccccggcaccgaagggtgaactgcaagccagggct

SEQ ID NO: 2111 - DNA, 238 bp, Zea mays
  Peptide Sequence Number=SeqID_8491
  Probeset Number=SeqID_16514
atgcctgctctgcccgtgatgcactcggcgaacctgaagacgtggacgacccggtcggcctatccggacgagccgccgtacaactcgctgcccggctacttcaagcgctacaacgacgcgatgcctgtcgggtacgcggcgaagtgggcgccgtcgagctcccgtgcgagcgggcgctcgcacgtcgggttctgggagccctcggtggcggcgggaggagactatttgggcgtggctg

SEQ ID NO: 2112 - DNA, 840 bp, Zea mays
  misc_feature (1)..(239): n is a, c, g, or t
  misc_feature (840)..(840): n is a, c, g, or t
  Probeset Number=SeqID_16515
nnnnnnnnnnnnnnnnnnnnnnnnnnnnnnnnnnnnnnnnnnnnnnnnnnnnnnnnnnnnnnnnnnnnnnnnnnnnnnnnnnnnnnnnnnnnnnnnnnnnnnnnnnnnnnnnnnnnnnnnnnnnnnnnnnnnnnnnnnnnnnnnnnnnnnnnnnnnnnnnnnnnnnnnnnnnnnnnnnnnnnnnnnnnnnnnnnnnnnnnnnnnnnnnnnnnnnnnnnnnnnnnnnnnnnnnnnnnnnncgctgtcctcttccctcaccttgtgcgccacggactcggggccgccgggcgtcgtggcctcgcgcggctcctgctcccgcgaggaggagaaggaagacaacccccggatgcttgccaacgcgacccaccgcgccagtggcctcttcggcgccggagaaccgcggcggccggtccgtgaagtcgtcactcggcgcctagatgtatctgctgctcatctcctgagattgagccgtagcccaactggtcgccgcgtccctcgcccctcccctcgcgcgcagcagcagagcaccacagcgagcaatggaggcggtgggcgtcgacctggcgctgggcggcatcgccgcgtccctccccgctccccccgcgcgcagcagcagagcaccacagcgagcattggaggcggagggcgtcttgctagcgctgggcggcctacaagtgcccaccgggagaaagaactgtacttccctgccttctgcactgttcttcattcgttccagcacacgctcaaacgctggtttcccagtagtctctccaagagcagctataagatcagccctccttgggtcaagcaaggccccaaacgcagaaccaagtgcaacan

SEQ ID NO: 2113 - DNA, 217 bp, Zea mays
  Peptide Sequence Number=SeqID_8492
  Probeset Number=SeqID_16516
ggcgtctggaggacgattaatagccgaggggtgcgtatgcagcacctgtgcaagagggtgccggaaatccgggggccccgaaggtattttcacatatgggtggtcacattctctacgcactagatggaggcgcgcgcgcacgacatgggggctctatccatcaagggccgaggcaaacatcttaatttcccgtagcgcgctcacgagttgccgtggc

SEQ ID NO: 2114 - DNA, 487 bp, Zea mays
  Peptide Sequence Number=SeqID_8493
  Probeset Number=SeqID_16517
atgtccggcggcgtcgacgagatgcgaaacgcactcaacgacatggagaaattggcaccgggcctggtctctgccctcgacggcctgaccatcaccccgagcgccggcgccagcggattcggcggaaccccgaccggagaaaccacgcccgatcaccccgatcagccggcggcacccgccgcgccgatcgctccgggcggccccgcgatcgccgcgccgccagccgcggcgccgatcgacaacaagcaggcggacaatcccgcccgtgacttggcgtcgatgctgcgcaacgccgcccccaacggcggcatgggtatgccgatgccgcagatgccgcagattcccaacctgggcagcatgatcccgcaatccctgcccggcgccaagcccgccggcctggacaacaaggaactgcccgacgacctcaaggctaagctggccgaccggctccaggacaaagacaaggacaaggacaagaaggacttgg

SEQ ID NO: 2115 - DNA, 312 bp, Zea mays
  Probeset Number=SeqID_16518
acccctgttaagcatggcaagatatttgcaacgagatatacatcctgagccggttgcgacatccaaacgtgatatcgactcttggtgcatgcattacacctccacacttgtcaatggttactgaatatatggaaatgggatcactgtatcatctcatccatatgagtggtcagaaaaagaaacttagatggcgcatgaggttgagaattattcgtgatatatgcaggtatgatcctttctcattgcacaataactatccctctagatttttcttctgcctctagtggtactgagcaattttggcccttaaaa

SEQ ID NO: 2116 - DNA, 505 bp, Zea mays
  Peptide Sequence Number=SeqID_8494
  Probeset Number=SeqID_16519
ttatgcatcccggtcccatagtcctttcctgtccggcggctctgcgctgcaggcgtgccgcgtggccatgtttcgtctgggtgtgttgttcttttcgcagtgccccaggtatatctgtattcccatgttagcgtgtggtgctgtgttcccgcagttcttgttcttgggctccggctccttcatggcgttctggcccgcggtcatagcattggtgcaggccgtcgcggctgtctccagtgcgcttcgctttttccttggtgccctggtcatggcagccctgtcctcagctgtcggcgtccgtgcctcgctctggtgcgtgacgttcgtcatggtgttcttcactggccttggcgcgctcgggtttttctcgcacacgctgctggcctccttgtcagctagccatggcctggctgcgccctccaccgctgtgcttgtgtgcgtgcggcaggctggtctcccgtttgggatggtccctttaggacgccagaggtcccttctgctgccc

SEQ ID NO: 2117 - DNA, 612 bp, Zea mays
  Probeset Number=SeqID_16520
ctgcagtggaaggacggcaacccggccgtcgtgacctcgatgcgtgggatgaccggcgccaccctcaccgtgaccggtcccgctcgcgacgtgcacagcggcgcggtctccggccccgcgccgaacccggtgcacgcgctcgtcaccgtcctcgcggcgatgcacgacgaggacgggcggatcacgttgcccggcttgtacgacgacgtcgaggagctcaccgaccgacggcggcgggagctgcgggacctgccgttcgacaccgacgtctggatcgagcgcaccgagacccgcaccgtcaccggcgaggccggctacaccgtcgaggagcgtctgtgggcgcggccgtcgatcgaagtactgacgctgctcgccggcgaccccaccggcatccgcacggtccccgggcagcgcgtcgagtcggtcgccgaccagctccgtcggttcgtcgccgtcacgatgccggacggcgtcgagtacgaactcgacatccccgaggagaccggacaggacccgtacgtcaccccggacggccctgcgctcgacgcgctggtccgtgccatggaactcgggcccggaacggcgaccgcgggccggatgggcaacccgggt

SEQ ID NO: 2118 - DNA, 336 bp, Zea mays
  Peptide Sequence Number=SeqID_8495
  Probeset Number=SeqID_16521
atgggagccggcaaccagaacgccgtgttcctcggcgtgggcgacgacgggcaggccatggcgatcaccgagcgcggggaaatcaagccgctcagcgaagttgccaaatgggacggaccccatcaagggttcttcgccctgcccgacgacggcgcaccagtggcgcaggtccacgaggcctccgctcagcagcccgctgcgggaaccccggccgctccggcgacgcccgcagcggcgccggcacctagcatccaggacaccaacgctgggattctgcctggccagacgaccggcaaccggggactgaaccccgagtcggtgcccccgaaccagtga

SEQ ID NO: 2119 - DNA, 214 bp, Zea mays
  Probeset Number=SeqID_16522
tgtatacgatcagtcaagggaatgagctatgatagacccagtacctggattatatatgatcctatgtgtcgtgacaagtcggtactactaagaatgatttcgtcagtcagcagcagatcctgtccatgtccggcttccttgtgagattgttctccttcaatggagatcagggctcatttgtagattcggtcagctatgaaggggcaaagcaagg

SEQ ID NO: 2120 - DNA, 432 bp, Zea mays
  Peptide Sequence Number=SeqID_8496
  Probeset Number=SeqID_16523
ggcgctccacagcagggggctcaggcggcaccagtcgccgcggagcgagttcccggctcggctcatagccgaggcggccatcgagctggaggaggcggctggcgcggacgtggcctcggacccaccggacatgccgccggtgctggcacctgctgctactgaagccgctgctgtcccagtcgggagcgacctgttgctgccgacgctgagatggccgaggcgtcggctcggcgcctcggaggagggggcgtccaaacacaacgcggcccgccgagcggcaacctagccccagcgcgggggagctccgagggccgcccccagctggtccgggttcggacccgtgagagcctagagccctgaatcgaggcttgacgaagagcggcaggagcagccaagagacgagccccgccagcgtgcccaagcaacggtggg

SEQ ID NO: 2121 - DNA, 329 bp, Zea mays
  Probeset Number=SeqID_16524
atgcagtattcggaagaccacgaccgtatcaggcagtgggtgccgctgatgatggaaggccgcgatcgttcgcaaaaggtcgccgccacgtggacgccgatcggcaccgacgtgaacttcggcgagatcacgcgccagttcgtcggctacctgaaggcgcagccgaacttcacgctgtcgctgtcgagcgaagtgcgcgagatcgcgcgcaacgcggacggcacgtggcacgtgtcgtgggtcaagctgcattccgatgaaccgccgcaggccgtcgacgcgaagttcgtgttcatcggcgcgggcggcggcgcactgcatctgctgca

SEQ ID NO: 2122 - DNA, 655 bp, Zea mays
  Peptide Sequence Number=SeqID_8497
  Probeset Number=SeqID_16525
aattcatgttttgggcaatttaagccgcggatctttacgtctggccgtgacgccgactttcacgacctatcttgtctgaccgctggtcgaggcgtttcactcccgatatccggggatcagcttaaacgtgcgggagatatcgcaggagaatattgaggagcagctcctggcgggtgaactggatgtggggatcgcattcggcgaggtgagcggtcaggaaatcgacgcgatcccgttgctggacgagacttttgcgctggttgtcagcaccctgcatccacttgcgcaggaaaactccgtcgggttacaggccctgagcacggaatctctcgttctgctcagcagggaatttgcgacccgcgaacagattgaccgctattgccttaaacacggcatacatccgaaagtactgatggaggcggacgccctgggtgcggtaatcgaaattgtgcgcaggacgcgactgtcaacgctgctgcccacaaaaactgcccaggctcagaacaacctggtggcgatcgctcttgaaccggagcacctcacccgcacagcggttctcatgcggcgcagagatgcatatcaaagttttgcggcccgggcttttaccgggctggccgtggaagtggccgctcagttaaaccagtaatactcttca

SEQ ID NO: 2123 - DNA, 597 bp, Zea mays
  Peptide Sequence Number=SeqID_8498
  Probeset Number=SeqID_16526
aaggaaacatggacttgatggcgccaataagcctgggcaaaggaaaagggttaaggattggaaaacccttttttttcattttgcccccagtccaagaaccaagccctcagtgatctttttgcccattatgttgatgcgtggaagacatggtattttgaatttgctcaaggcagcagcttcatgcaacaaccctttggtcatcctgatgcccattttttggaggcaaattttagggccaaccattccagtttttagtccgtgcatgcaaaatttccctatccaatcgtctaacttgaaggaaacaaaaaaatcaatgatgctagggttacgtgccctggactaatcgagtacgtttttaggctatttcaggtagggtttttagtacgggcaacccccggaggctgcagagtttccccccccacacattggtaacatcatgatctgtcaccttctgtgggttaccatttgttaattgttgtttatgacctatccaatgagccctgtaactgtcatgcggtagatgccttgaccccccgagcgctatgcaaagcttgagaaggatggttcgtcgaaaaaaaaaaaaaaaaaaaaaaaaaa

SEQ ID NO: 2124 - DNA, 282 bp, Zea mays
  Peptide Sequence Number=SeqID_8499
  Probeset Number=SeqID_16527
ataggaagccaccaggtgttggccgcggaagaggaaggggggacgttggtgctaaacctggaagccgaagcatgggacgtggccaagatgatggaggtcgacgcagtggtggccgctgaaggggcggagttgcagccaaaggtggtaacaaaggtggaggccgctgccgtggctaaatctgtcggacacatgggagaatgccgctttttaaggcctgcaaaaaaccagaatggttcctgtcttctggacattgaggaagcggcggcagtcaggcttgtcgct

SEQ ID NO: 2125 - DNA, 247 bp, Zea mays
  Probeset Number=SeqID_16528
tcgccatagcaccgcgtcggtggagagcattgaagcgcagctgatgctgatcctttccgggcgttacattggctttttacccgagcattacgcgcgcagccgcgagcagcagggccagctgctgcgcctgctgccccaccattttcactttcgtgcgccgttttcgtttgccttccggcgcggccgcgcgcgcgagccgctgatccgcgcgatgcgcgaaattctgaatccagcgtgaaaaactgag

SEQ ID NO: 2126 - DNA, 374 bp, Zea mays
  Peptide Sequence Number=SeqID_8500
  Probeset Number=SeqID_16529
tggggaccctgtgatgctgtacagccgacctgcagaacttaaaagctagatatgaattgaatgaaatatatacttatactggaaatattctgattgcaataaatccattccaaagactacctcatatttatggtgcgcacatgatgcaacaatacaagggagctccatttggggaattaagccctcacgtgtttgcagttgctgatgttgcatatagggcgatgattaacgaaaaaaaaagcaattcaattctagtcagtggggaaagtggagctggtaaaactgaaactacaaaaatgcttatgcaataccttgctttcttaggtggcagggctggtaccgaagggcgaacagttgaacaacaagttcttgaa

SEQ ID NO: 2127 - DNA, 411 bp, Zea mays
  Peptide Sequence Number=SeqID_8501
  Probeset Number=SeqID_16530
caccatgctgactgcggctgcggtcatgcccacctgacgagcgcgcaacagctggccggtgcggtgagcggcaaaacccatgcgctggtggtgctgtcgatggggctgcggccctgttctggtgccatcatgatgctgctgtttgccaaagagattggcgtatatggctggagcgtggcctcggcgctgaccatggcgctgggcaccgcgctcaccgtgtcgttgctgggtttgctggtgcagcgctcgcgcgtgctggcggtgcgcctgggcaggctcagtaacagagggactgcgcagtggttgttgccggccgtgatgctggctggcagcctgctgttgctggtggccggctttattttatggcacagggctactcccggcttcggtggcggtcagcgtcctttttaa

SEQ ID NO: 2128 - DNA, 293 bp, Zea mays
  Peptide Sequence Number=SeqID_8502
  Probeset Number=SeqID_16531
ggatcctcttgagtccacttgagatcgacctgcagtcactcatattgcacaataacaatctgactgggagtatcctagagtcattcatttaaaggatgcaagaacctcacaaagctgaacttgctaggtaaccgtcttaatggtgagataccagattacttggctgagctaccgcatagatagtaaaactggaattgtcccaaaacattttcacgggaatgcagcctgacaagttgtgggagtcatcaaccattttggagatctcccttcctattttagaactgcaagtcctt

SEQ ID NO: 2129 - DNA, 399 bp, Zea mays
  Probeset Number=SeqID_16532
atggggcccgcccgaaaagggccccgcccgcacagggtggacgccaaacgagggcagcgggaagggggccagagccacaacgaggaggggggaggaccaaaagccccccgggaggcaaacgacgaaaggcgaggcaaccggaccaagagaagggggagggcaacacgacgggcgcccgaagggaggcacaagaaaccaaaaccgggaagaccgcaaaaaaatagggacgagagggccaggagagaacacgcggggggccagagctaccaaagaagaggaagacgtgcaccaagaacccaccatgcgcgggagagaccggggcggctttagaggcgacccgggtgacaaggcacaagccggaaccggggaaaacaaggggcatgaccggaaagcgaaggc

SEQ ID NO: 2130 - DNA, 285 bp, Zea mays
  Peptide Sequence Number=SeqID_8503
  Probeset Number=SeqID_16533
ttagacgccgacggtctccgagtccaatccagcgtatcctttgcttgcatacatgacggtcacgttgagttgctggccaaaccaatctaccgtggccgtgcaaatgcctggcacgcccacttctttgggcgtcgtcaacaagaatcggtccttgtccttgtccctagctccctcaacagccagaaacattcccacgatcctcgccgcagggctgacgacgtccgtctcccacgcgtcgcgctgtgcctttgggttcccggcgttcccgaccttgagctgaagcac

SEQ ID NO: 2131 - DNA, 340 bp, Zea mays
  Probeset Number=SeqID_16534
atgatgatgctctctgatctctcctctgaccacgaggccactggatccagctcctatggcggggacatggccagctacgccctcagccctctcttcctcgcaccggcggcctcggccaccgcgccgctgccgctgccgccacctccggccgaggagctcaccaacaagcaagccgcgggcggcggcaagaggaagagaagccagccgggcaacccaggtacgtagtagtaagtagctgatccgatcccgcccgcttaattactagctatacactgcctgctgggcctgataatcacgccgactgggctgacgcacctgatgaactaaatcaatgtgctac

SEQ ID NO: 2132 - DNA, 343 bp, Zea mays
  Peptide Sequence Number=SeqID_8504
  Probeset Number=SeqID_16535
cttcgcctttccccagggctgggcgtcctccccgtcctggttggccgttctctgtgtcgcccaaccccagggcttgcactcgtcctcggcctcggtctacggtcttcgcctcgcccgtctcccgggcccggactcggcgccgtcttcgcgcttgtctcggcctcgcccttccccgggctcggcctgaccacgccgtcggggggggccgtcctttctctacccttagccgctgtggtcttggtgagcaagtccggcgccccctgcggctcgccccggtctcctgtgtattgttggccccccgtgtgctgcacatcgacaatggctctccgcgccttccgggcgt

SEQ ID NO: 2133 - DNA, 277 bp, Zea mays
  Probeset Number=SeqID_16536
tgcaggtctttcgcaaagatgactacgcggtgaaatatgcggtggaaccgctgctgctgggcgacggcccgctgggcgagctctcggtacgcctgaagcttatctacggcctgggggtgatcaatcgccacgaatacgaagactgcgagctgctgctggcgctgcgtgaggagctgaatcacgacaccagcgactaccgctttaccgacgatgaaatactcggcccgttcggcgaactgcactgcgtgctggcctggccgccgcaacccgatttcac

SEQ ID NO: 2134 - DNA, 611 bp, Zea mays
  Peptide Sequence Number=SeqID_8505
  Probeset Number=SeqID_16537
atgctgctggacaccgcatccctctacttccgcgccttctacggcgtgcccgacagggtgaaggcgccggacggctcgtcggtcaacgccgtgcgcggactgctggacatcgtcgccaagctcgtcacgctgtaccgaccgacgcagatcgtcgcgtgctgggatgacgcctggcgcccgcagtggcgcgtcgaccgcatcccgagctacaaggcgcaccggctgatctcatcggacgcgggcgagatcgaggacgtcccggaggccctcgtccagcaggtgccgctgatccgccaggcgctgacggccgtcggcattccgatcgtgggagtcgccgaccacgaggccgatgacgtgatcggaacgctgtccacccgctcggccatccccgtcgacatcgtgaccggcgaccgggacctcttccagctcgtcgatgacgcccgcgacgtgcgcgtggtctacacggcgaagggcatgagcaatcttgagatcgtgacggatgccgtggtcgtcgccaagtacggcatcctcccctcccagtacgccgacttcgcgaccatgcgcggggatgcctccgacgggctgcccggcgtgaagggagtgggcgagaa

SEQ ID NO: 2135 - DNA, 976 bp, Zea mays
  misc_feature (1)..(202): n is a, c, g, or t
  misc_feature (976)..(976): n is a, c, g, or t
  Peptide Sequence Number=SeqID_8506
  Probeset Number=SeqID_16538
nnnnnnnnnnnnnnnnnnnnnnnnnnnnnnnnnnnnnnnnnnnnnnnnnnnnnnnnnnnnnnnnnnnnnnnnnnnnnnnnnnnnnnnnnnnnnnnnnnnnnnnnnnnnnnnnnnnnnnnnnnnnnnnnnnnnnnnnnnnnnnnnnnnnnnnnnnnnnnnnnnnnnnnnnnnnnnnnnnnnnnnnnnnnnnnnnnnnnnnnnncaagcacgcgcgcgccctgtgctccccctcagtcctcgctggtcctttctccatcacaaacgctagtcttctttccctaaagctcggagaccgccggaagcgagcgacgatggcgtgcaagacgaagagcctgctgttggcgctcagcgtggcggcgctgctcgcggcgcgctcggagtcccacggcctaggcgacttcacgagcggcggcgaggcgacgacgacgccggagatgcagaccttcttcaagccccaggccgcggcggcgctcccggaggccctcgacgcctccatgccagccaagccggaggcggcggcggccacggcgctcccggccacgacggccgccgcgacaacggccggtacggcgccgtcagccacgccgcgcaggtccgtgtccgtggccgccggcgtggcctgcggcgtggcggccgtggccgtggccggcatcgctgccgccgtggcgtacgtggtgcgcggcatgcggcgcgggacggaggtgcagctcggctcctccccgtgagccccgtccgggcccgcgtgataggccatcgtcgtcgttaggatctggttaagcgcgttgtttagcttttgcgattttgtgttttagtcgatctggagactggttgcttttgggtcagcggttgtattctttcgtacgtgtgggggggtgagacggtgaggacgcctgaactctgttccttggtgactggagccagagcctaccatgaacgtccttgaccttgggaaactctgaattatatcgattcatgn

SEQ ID NO: 2136 - DNA, 296 bp, Zea mays
  Probeset Number=SeqID_16539
atgtttgccagctacgacgtgcacttcagcgatcaggattacgctgattatcaggccgtcaacaaaccgctgtgggtcgattaccagaacggcaccatttcagcgttacagcttcagacgcgccgcttcacgctgtggggcgaaaaactgcgcgtggcaccggaagtgcttaacagcgactttcttaatgcgatggccgagatctgcctgccgcttgatggcgcagcccgcctgctggatacgctcaagggcaaggtaaaaattgccatcatcaccaacggttttacggcgctgca

SEQ ID NO: 2137 - DNA, 225 bp, Zea mays
  Peptide Sequence Number=SeqID_8507
  Probeset Number=SeqID_16540
ggagctaggctcaataaattttatcaatcatgggaggacaacccagacattggctttgtcatgatgaagggcagcggccgagcattctgtgctggtggggatgttgttagattacatgaacttatcagtgaaggtgggtgaactgtttgcttttgctttcacaaaacagcagcaagctattacgatgagataattcagcaaaataactctccatttgcttgcttg

SEQ ID NO: 2138 - DNA, 290 bp, Zea mays
  Peptide Sequence Number=SeqID_8508
  Probeset Number=SeqID_16541
ctgcagcggatggcgacagactggagatctatggccagcaaagccacaagatactgcgtcggacatcaaggcctaggtctagggctcgatcaagccctcctggagaagacctacatggagaagaacataaggcctgtctacatatgagttaggctatcaagataccttaggccgctactaggaacaggaacaaggaagctcgtcatggagaggctgaccgtgttattcccactttaaaaccaaagcatttgttttctgggaaacgcactcttggaaagacaagcaggcga

SEQ ID NO: 2139 - DNA, 467 bp, Zea mays
  Peptide Sequence Number=SeqID_8509
  Probeset Number=SeqID_16542
actcattgtaagatgatactacaacttgaaaacagggttcggttccattatggccacccagatatttttgatagactcttccatatcaccagaggaggcataagtaaagcttcaaagactataaatctgagtgaagatatattttcaggttttaattcaaccatgagaggaggaaatgttacacatcacgaatacatgcaagttggtaaggggcgtgatgtggggatgaatcagatttctagcttcgaagctaaggtggccaacggtaacggtgaacaaacattaagtcgtgacatttatcggcttggacatagatttgacttctacagaatgttatctttctattttactacagttgggttctattttagtagcatggtaagaatctaaaataataactcatatctaaaaccttatgatcaaagatgttacagtggcaactagggttgaaagggtgtgaaggggac

SEQ ID NO: 2140 - DNA, 453 bp, Zea mays
  misc_feature (24)..(24): n is a, c, g, or t
  Peptide Sequence Number=SeqID_8510
  Probeset Number=SeqID_16543
ggatcccctatagtcgacttgcanaacgcgaggatcgccgcgaccgtcgccaacggtggcgtcagcatggccccttacctggtcgacgacctcaagggacccgacctttccaacatcgcgggcacctgaccgcaccaacagcggcgggccatctcatcccaggtcgcggctacacttacggatctgatggtcggcgccgagcaggtgacgcagcagaagggagccatagccggcgtgcagatcgcatccaagacgggcacggccgaacacggcaccgatccacgtaacaccccaccacatgcgtggtacatcgcttttgccccggcgaaatccccgaaggtcgccgtcgccgtcctagtggagaatggtggagaccgtttgtccgcgaccggcggtgcgctggccgcacccatcgggcgggccaccatcgccgcggcgctacgggagggatca

SEQ ID NO: 2141 - DNA, 266 bp, Zea mays
  Peptide Sequence Number=SeqID_8511
  Probeset Number=SeqID_16544
tgcaggatgtgatggcggcggaagtgattcacgatcgtctgtgtcagcagcagaaaaaacacttctccttcacccggctggatgcgctggcccagcgcgcgctgaaagaaggctggattgacgagagtgaagcgaaggtgctgacgcgggccgaagccagccggctgaaggccatcaacgtggatgattttgcgcccgaggcgctggcggtggccaaaccggacagcaaacccaaaccgagcgcccgccccagcgaagcggcgtaa

SEQ ID NO: 2142 - DNA, 214 bp, Zea mays
  Peptide Sequence Number=SeqID_8512
  Probeset Number=SeqID_16545
ctgcagacctttccacacttgattgtgtgaaacagcaggcatatgcatcgttcacgtcactttgagttatattgacacctttggtagtctccatccagcttattggcgaacagggcatctgtacgtgaagagcgacgtgtacggtttcggcgtggtgatgctggagatgctgtcggggcagcgagcgctggacccgaaccggccgagcgggcag

SEQ ID NO: 2143 - DNA, 541 bp, Zea mays
  Peptide Sequence Number=SeqID_8513
  Probeset Number=SeqID_16546
tgcagcgcgtggcgtttgtcggccactatcgcggcgggcgcgtcgggcaccggctggcgctcgatcatccggagaaagtcagctgctgcgtgtttgtcgatatcgcaccgactgccaccatgtacgcgctgaccgatcaggcgttcgccacgcgctacttttggtggttctttctgattcatctgacccgctgccggagaccatgattggtcacgatccggcgttctttctgcgtaaacacatagatggccagctgaaaacgccgggcgcgaccgaagcggcgatattcgaagattatctgcgctgctatcgggatccggcgatgatccacgcagtatgtgaagattatcgcgccgccgccagcatcgatttgcaacacgatgccgctgacagcgaccggcgcattgcctgtccgctgtttctgctgtggggcgaaaagggcacggtcggtcagctgtatgatgtggtgcacacctggcaggacaaggcgttgcaggtgcagggcgaggcgttaccgtgcggccattcaccgcaggaagag

SEQ ID NO: 2144 - DNA, 803 bp, Zea mays
  Peptide Sequence Number=SeqID_8514
  Probeset Number=SeqID_16547
gaaagcatcgctgaaacgagatcctcgccgtttcgcgaacaaatcggtgactgtctcctgctatctccccctttccgccacttcgctccgctcccatgcctcctgccccctctcgccgtggaggcaccccaaaccctagcccctgaaaccctagatcctcctcccctgttccgatggcgggggccgcggcgtccccagcggcgggccacgtggtggagcggttccggtcgcgactgcgcgaggaagcgggcggcggcgagccgggcgccgccgcggtcgtgcacgtgtacgcggaggcgctccgtgagctaaccttcaactgcaagccggtcatcaccgagctcaccatcatcgcgggccagcacgccacgctcgccgccgggggaatcgccgacgccatctgcgcccgcgtcgccgaggtcgttctgctacttctgctctcctatcaggggtgttactcttaatatgtcattaagaactttgctggaaatgaagcagagactactgataaactagtcgatctaataataaagctgaagagagccaactctcctcctggcgctgcctctcggcgccatcgttccctcctctgcacccccatcctcggacctcctcgtctgcagcagaccatcttatggtgcgcgtgcgccgccggcgagatgtcgaagcctgtccggcctctgatgtgcaatgctcttcacaatcttggatctgggatgcagaaaatcgtggtgaagctgcacttgcaggacaacaaggacaagcagaaggccatgaaggctgtatcggcgatcaccggcacg

SEQ ID NO: 2145 - DNA, 246 bp, Zea mays
  Peptide Sequence Number=SeqID_8515
  Probeset Number=SeqID_16548
atgggtattctttcatggattatttttggtctgattgccgggattatcgctaaatggatcatgccaggtaaagatggcggcggatttattttgaccgtggtactcgggattgtcggtgcggtggtgggcggctggatcagtaccctgttcggctttggccgggttgacggcttcaactttggcagctttgtggtcgcggtgatcggtgccattgtggtgctgtggatctaccgtaaagtccgcagc

SEQ ID NO: 2146 - DNA, 212 bp, Zea mays
  Peptide Sequence Number=SeqID_8516
  Probeset Number=SeqID_16549
tgcctgcaggatcaactctcgaagatagcagagtaccgagtaacgatgtcttggccgttgaaatacaacgtcccgactggtaaaaccgtgctgttacccagcttaatctccttgcaccacatgcgcctttcatgcagcttgggcgttatacattaacaggccctcaccgacttgctccttcctaacagttgccctgcactgaatggcatagg

SEQ ID NO: 2147 - DNA, 215 bp, Zea mays
  Probeset Number=SeqID_16550
tgcaggcgcgtttcgggctggaggcggaccgtctgcggcggatgcaggcgcatggcgtgctgtatgaccgcgatgccggcggtgaattctggcacgcctacctgccgcatttccaggggcggtttttcttcgagctggtagagcgccagggttatgaaggctatggcgccagtaatgcgccgatccgtctggcggcgatggcgcggcggctggcg

SEQ ID NO: 2148 - DNA, 565 bp, Zea mays
  Peptide Sequence Number=SeqID_8517
  Probeset Number=SeqID_16551
cccgaacgcccggactgggcttacggccggatcgccgccgccattcaccctcccgctctctttccccctgtctttgcgacgactgggctaccgacgccgacgccctcgcaggtgcgcaggtcttcttcgagtccttcgccggcgacgagcaccctctaaaggttgatatcgaggcgtagtgatggtcgttgtcgttgggtccttccatttggtgctaatctgtctgggcaggtggaacccctggacattgttatcgagctcaagtttaaccctatcaatttcaggtttctggtacctactcattctgaatggcggaccttacagacatcggttgctgctgttgctttagctttttaaggaagcccagtgtacctgtatgtgaacatcaggatggtgatggcatgttaactgaagatttactgaagcatcaatcagctgaagatcatgatggaagtttctacactggagatgatcctggggatgatcttgawmagaagcttctacaacggagatgatcatgatagaagcttctacgatagagatgattctgactatcttgacggaa

SEQ ID NO: 2149 - DNA, 342 bp, Zea mays
  Probeset Number=SeqID_16552
acccggcaaaagaccggatgggacgaggtcgggtccgcctatccgtcggggcgacgcggcgccgtgcggcgacgcgactcccgcagcccggcgagtacaccagagcaggtgtgggtgaccgtacacaagtccagaatgggcgtcggctgttcccgccaagcccggggcgacagccgcggaggcttccggtatgcacgctcagcgcggttcagctcgccatcatttttgagagaatcgtcctcaattggagccaccatcggtcagcgcatcgggaactgtcggcatccagatacggtgacggcagtcacagttgctcaggtcgaattggacggcatgattatg

SEQ ID NO: 2150 - DNA, 386 bp, Zea mays
  Peptide Sequence Number=SeqID_8518
  Probeset Number=SeqID_16553
cccacccgcgcgttcccccccccgtccgcggacgcgtgggttcggccgcgtcaccagcttcctgctgggcctgtcgccggagctcggccgctccctccgactcgacgtgctctaccccgacggcggcttcacgcgctgcctcgactccgacaatgggttcagaattcatcgatccatcaaggtgggtcggagaccagacgctgctgtacagacaagccacgaaggcagaatcgcaaagatcgctagacccaccgacactgccaaacggaggatcttcatcaaggcctgggaacatcactgaacctgtggcaagatttggacaccctggatccaatggggagctcaacgtcagtgtcattgcctgcactgtgccacgagactactcg

SEQ ID NO: 2151 - DNA, 219 bp, Zea mays
  Peptide Sequence Number=SeqID_8519
  Probeset Number=SeqID_16554
gggacccgcactgcaccggcacacaaaacgcggcggaagaggtggtgacccccagcgaggcggatacacttgccaacccccaaacgcccgcgcctagcactttcacacgatccattatcgccacgctaggagctgatccccgagaagctgtaaatcggggcctcactggagggagccgaggcagtgctgaaccgcaccaaacaacccaaaaagcatgac

SEQ ID NO: 2152 - DNA, 761 bp, Zea mays
  Probeset Number=SeqID_16555
ccggcggctgttgcatcagctcctgggggggctggggcgcttgccctgtcaaaggtgggggggatgtgcagctctagtttctaggtctcctctaggttgccattgacggtccctgttatgacttagcgcactcctttctctgtatttctccatctctgcaaaagggcctgcttgccagcggtgggggactatgaaccctgtgattgctatggcctactccatgacttttttatcagaaccttttccagggtggatgatgaatgaacccttgtgcagacacagagcacactggcggtttacctgcggagcctatcttcacaacgatggcttctccatgcgatcacccgcgccctcaagggaatgacgatgattctagcataggtgaaggtcatccaataacttcccctaccccacagaaaggccagagctctgatatcccccctgaatgaacgcccccctgataaaacatttcttgcctcagtggtcccaccccattgctgggagcattatcggggcgttcctcccccaattagatttgtccagctgtggcggttgtgctgtgcccatgttcgctcgggtatgcccccccccccatccataaatgtttgtgctaaaaaaaatgctgcggcctgtatatttggccagttgacgccttgtccccggttgtggtcagtagtaaatgatgagtggtaactgtgtttgttcccccgtagtttggaaagaaaaatttgaagggcttcggccgcccccccgttgctttt

SEQ ID NO: 2153 - DNA, 302 bp, Zea mays
  misc_feature (103)..(103): n is a, c, g, or t
  Peptide Sequence Number=SeqID_8520
  Probeset Number=SeqID_16556
tgcgtaccggcccgcgcaggcgcagcaggtgctgtgggatttcctcccggatccgaacttcgtcgccgatctgggccgcgggtcgaaccacagcgcggaccgngctcgacctgacgctcgtcggcgcgaacggcgagccgctcgacatgggcaccggcttcgacgagatggtggccgcgtcgggtcactttcacgccgggctccccgagcacgtgcaacgcaaccggctgctgctgctcggcgtgatgcatgcggccggcttcgcgcacatcgacagcgagtggtggcactacgaagctgcc

SEQ ID NO: 2154 - DNA, 527 bp, Zea mays
  Peptide Sequence Number=SeqID_8521
  Probeset Number=SeqID_16557
cgttagagctatgttagaggtgtggctgttattttgagcatgtgcaaccctctttaacgagtatagggcgggtggaaacatcgccaacctcgtgaaagtagaagacttcacgcgacacagtgcagataatcgaaccagcgcgttccagctggaggtgaaaacctggctggaacgccatccggaaacgcagtatgtcgatattctgttaaacgatctcaacggggtatttcgcggtaaacgcattcccgtctccgcgttagctaagctggaaaaagggtgttactttccggcctcggttttcgccatggacattctcggcaacaccgtcgagaaagccggcctcggacaggcgctcgtcgaacctgataacctctgcataccggtccctgggaccttgattccttccgcctctgacccgcaacgcatcgcccagctgctgctgaccatgtgcgaccaagatggcactccctttgacgttgaaccccgaaacgtgctgaaccggctgtggcaacagctgcgcaatcgcg

SEQ ID NO: 2155 - DNA, 481 bp, Zea mays
  misc_feature (168)..(168): n is a, c, g, or t
  Peptide Sequence Number=SeqID_8522
  Probeset Number=SeqID_16558
atctgaaagctgctcatccccgtgcacgctgagtcagcccaccaggcgtagtaggactaggcgcgtagccagaaacccgagccctgcccaacctagcgggccgaaagccccccaccgcacaccggtgcgcggagcagcagtcctacacgcgcgcgccgatcgctcttntcaagttctgatcccctcctccctctcgtggtctggactcgtcgccgacggacgaccgacgcgcacccgtgacatgctctccagccgaagatgcttcgcggcggaagcgaaccggatcaggccgctcgccagggccttctgcgacgcgccggcctcgcgcgcggatgcgggggccctccggtacgcccagcccgcaggtactcacccccgaacactctgcctcccgttgccgtgtagggatcacgccgagaagggtgctgccctgaaggatccgcccgatgtgctccacgctgctatcgttggtggaggcatg

SEQ ID NO: 2156 - DNA, 230 bp, Zea mays
  Probeset Number=SeqID_16559
atgagcgaaactttgactcaggctgttgcccgtgaaatccgtgcgccgcgcggtaatgaactgcactgcgccaactggctgattgaagcggcataccgcatgattcagaacaacctcgatcctgacgtggccgaacgcccggaggatctggtggtgtatggcggaatcgaaaaagccgagcgtaactgggcgtgctttgaacagattctgcgctcgctgcgcgcgctgca

SEQ ID NO: 2157 - DNA, 266 bp, Zea mays
  Peptide Sequence Number=SeqID_8523
  Probeset Number=SeqID_16560
ccctttcatttagcgtccccatctgttcacagcgatggagaaacgttcatatcagcagatgatctgcgaataaacctttggaatttagaaattagcaatcagagctttaacattgttgatgtgaaacctgcacacatgtaggatctaactggtaaactttcttcagtctgataactaattgcggtgtgcagtgagcttcctgtttcctgtaaacattaatcctaccaactctgtactatcagtcaggtacctctctgcagaaggat

SEQ ID NO: 2158 - DNA, 620 bp, Zea mays
  misc_feature (601)..(620): n is a, c, g, or t
  Peptide Sequence Number=SeqID_8524
  Probeset Number=SeqID_16561
atatataatcctttttcttcttaattaaaagtcagagctcttgacattataaaaaaaactttgacagaatacatggcatatcattctctctccccaccctttcatatacagggacgtaaacacaccacgaaagctataatatcaggacattgcgtatgtaccattcatcgagagggttcagatattctattccaacctaaagaactatgatttcccaagagggcggacccaaccttcagaagttcattgaggaagtggagtgaacaagatcgatgcatatacgcagactaaactggacccagattttttacttgagcagacaaagaagcggcttgggattgcttaaagcttgtgaccaaggatgaatctctcgccagaagtacaagcatagtagattgagactagtttagtcgtttgtgtgcttgaataatgatgaatatcacagttatggttttcagtgaggcatggtcttctatattggttgtgcttctgaaataaattagttgtcactatataaaaggatcatttggtaatgtgttgatgtcactggttgtgcttctgaaaataaactagttgtcactgtataaaaggatcatttggnnnnnnnnnnnnnnnnnnnn

SEQ ID NO: 2159 - DNA, 725 bp, Zea mays
  Peptide Sequence Number=SeqID_8525
  Probeset Number=SeqID_16562
gcacatggcttcgacgagttctttggcaatctttatcacctgaacgccaaagaagaaccgaaaaacccgaactatccgaaagatcctgagtaccgtaaacagttcggtccgcgcggcgtcattaaagccagcgcggatggcaaggttgaagataccgggccactgaacgtgaaacgtatgggcacggtggatgaagagttcctcgccgccaacaacgatttcatggagcgtcaggtcaaagcgggcaaaccgttttttacctggttcaacaccacgcgcatgcacaacaaaacgcacattaaaccgcaggatcagggcgtgaccggcctcggcgactacgcagacggcatggttgagcacgataaaatgatcggcgaggtgctgaagaaaatcaaagatctgggtatcgaagataacaccatagtgatttacaccaccgacaacggtccgatgatcgccacctggcctgattccggcatgacgccattccgtggcgagaaaaataccggctgggagggcgggttccgcgtacccgcgatgatcaaatggccggggcatattaagcctggcacgatgatcaacgatattttcggcagcaacgactggttcccgacgctggttgccgcagcgggagtgccggatatcaaacagcagctgctgaaaggctataagaccagcgccatgaccgacaaagtgcatctgtacggttactgcgcagggaattt

SEQ ID NO: 2160 - DNA, 353 bp, Zea mays
  Peptide Sequence Number=SeqID_8526
  Probeset Number=SeqID_16563
aggagtcctgacatgtctcgcgtcgaaaaactctaccatcgcctgattgtctggctgctgctgatcgtgctcgccgcaccgctgctggcgacgctgctgtacggcatctccagcgagtggagcgataccattctgccgcagggctttaccctgaagtggctgacgcagctgtggagcgatccgcgcttcctcactgcgctcggtcattcgctgctgatctgcttgggtgcgctgctgttctccctgctgctggtgctgcctgcgatgtttgtaatcgcttactactatccaaaactggacgcggtgatgaacgtgctgattctgatgccgtttgccgtgccgacggtggtctc

SEQ ID NO: 2161 - DNA, 242 bp, Zea mays
  Peptide Sequence Number=SeqID_8527
  Probeset Number=SeqID_16564
atgtctggatggctggcgacctggcctcctgggtgtgataggggcagcgctgacttgagcgtgggacaggggcagcgcggcactgccgtgctgactgctggagcggccagcgcccgagcggtggagcagcttgagctggagctggaccgcctggggcctggacgcctggagctggagtgctggacgcctggagtcctggaccgccaggggcctggagcggccgagcgcccgagcggtggccg

SEQ ID NO: 2162 - DNA, 558 bp, Zea mays
  Probeset Number=SeqID_16565
gctcggtacccctgagggctagggacgtggcactgtgctctcgttcacgttagatcggctggcagattcatattctgggctaactgtctatgatcccaatgggaatatgacagacctgaatagtgtgaagatcactagtgaagcacaaattactgacatcaagaaggcgcggctattgatcatgtcagggacacatacaaaccctaaacatccacctggatggattgtcgctgataggctcgaagagattgctggcaagcttcatgatgctcggtagctcatccaccgtgtatgtgaggagtgccccaagaaccaagatgcttggcttgatgcatgccgtgcggccagtccatatgaggcaaatgcttgaattggccgtggcgtgatgtcaatttcaaatattgtgacactatggtttcaggcactgcaactgtaaagtcgtgatctgaataaaaatacggatccgaagaaagggctagagcacattgatgattcattcctgctatggacggctgtagatgaacttgcaaatgaagaggatgcaatgctgttgcttca

SEQ ID NO: 2163 - DNA, 248 bp, Zea mays
  Peptide Sequence Number=SeqID_8528
  Probeset Number=SeqID_16566
ggtcctgcgcatcagtggcgggcctcccgtccctttccccgtctgcctttttccgcctcaccgtggtgggctctggctcgggcctggcgctcttgccctcgctgcttcccgctggttgagggcttccaacatgctcgcccttgtgcccctgctcgggttgtgtacgtgctctatgtcctgccctgtcctgcttgcgcacccggccgggttggcccgggctggctttgtggcgctttctgtggtagtat

SEQ ID NO: 2164 - DNA, 591 bp, Zea mays
  Probeset Number=SeqID_16567
gaaaaatttgcgacctatcactaccttccggtattttttaataatgacgaatggcgatttattttatccgcaacggacctgctgattcctgaagacgaattcggccccggtgcggtgagtgaaggcgtgcccgtttacatcgataagcaaatggaattgccttatggctatggttacctgtggtatatgagcccgccatttcaggaatcgattcctgagatgggataccagactaatctggtgccacgggaaatttaccgccggggaattatcaacctgaacaaatactgccgtgaaaatttccagaataacttcgcagatttaagcaaagaaaatcaggaagcgattttacacgatctggagtcgggaaaaatcgtgcttgatactatttccggcaagttatttttctctcagttactacagaacactaaagaaggttatttagccgatccggtgcatggcggtaatcaaaccatggcatcctggaaattaattggtttcccgggcgcgcgcgcggactttattcaggttatggagaaccccgataaaccttatcctttaggccctgtgagtatttctggcaagtatggt

SEQ ID NO: 2165 - DNA, 526 bp, Zea mays
  Peptide Sequence Number=SeqID_8529
  Probeset Number=SeqID_16568
gcctgcagatcatctctatggacgaaagcacatcaagcactatggttcttacttccgaggaagttgatactgcctttctatccttttacattatttcgggtgattgttccattaagcatgtttgatcactatgccgaaatgactgtgtggatcatttgttatgtgcgcatttgcatgtccttcttgaatattgtgccatccccaggatcattgccgttcattggaccatacgctgtgtccaagaacaccatgtcaggtaccaaatgcaacgcaatgatgcacgtgctgttcaaacttggcagctactactaatggaccggcaccaagacgtctcgccgagcatctgacttgtatctattgacatcggacgaatcgaataggaagtgcaccgcactcgctgagctgcagaatcaatagactgaacacagtgagctcgtcgagatcaatgtacgagtggaacagcgagagaaggtgctcactgacgccaaaagggggaacatgatctgcaccagagaggttgctctgt

SEQ ID NO: 2166 - DNA, 240 bp, Zea mays
  Peptide Sequence Number=SeqID_8530
  Probeset Number=SeqID_16569
acatgccggagtgctcatcatgaaggagcagaagcccgaatccggcggcaaccatatagccgccaccagccagaggggcgaccctatgcatctgaacccgagcggcggcggcgacaacgacctgaaccgcgggacagaaatattctgcctgggcccgcaaaaccgccactgcgggggaggcaaagctcctgtcgtagacgacctgaaccaggtgcagcaggtcctgctgaccgctcacag

SEQ ID NO: 2167 - DNA, 408 bp, Zea mays
  Probeset Number=SeqID_16570
ttaccggctccctgtaggtggaaccgctacctagtgggaggtaggcggcggagacgcctaaacggtgtttattgacggcggcgcgccatccggggacctggcgggcaacctggtcctggggctgaaccttctatggctgccgcttaagctggcggccgtgttccgcgggtttaaccttcgggaccgctttacctcccggttcttgaaggttgttttggggctttttggcaccggccgccccgactttccctaattgttcgttacgtccgtggtggttgttcctcggtttgttggcaaatggggcgaccttgttctcacccctaaggccggcccccaagttgaccttaagagggtttccaaaattccccaggtacccggataattcccgtccaatgcccccctccaagg

SEQ ID NO: 2168 - DNA, 419 bp, Zea mays
  Peptide Sequence Number=SeqID_8531
  Probeset Number=SeqID_16571
atgacgattaaaaaagaacctgtagatgtagttattgttggctttggctgggctggttcgttgatggcgatggaattagcctcaaccggattaaaaattgttgcgcttgaacggggagaacagcgagatacttaccctgactttgcctatccccgtatcattgatgagctgacatatggtgtcaggctaaaactttttcagaacatatccaaagagagcgtgacggtaaggcataccactaaagataccgctttaccttatcgccgcatgggttcttttttacccggcgacggcgtgggcggcgctggcgtacactggaatggtctactgtggcggccactggaagcggatctccgacagaaaaccgtggtgactgaaaaatatggtgccagttttattcctgagggtatgacgctgca

SEQ ID NO: 2169 - DNA, 414 bp, Zea mays
  Peptide Sequence Number=SeqID_8532
  Probeset Number=SeqID_16572
atggtgaccaccggttcgatggtggggagaagcaagacgggctgtggcctctgccccgccctcagcttcaaggatcttcatcatccttgctggggtggggggcgagctgagccggagctctacctcccgtacgggccggcgggccacctcttccttcagcattcaggggagagggcactcaccggcctagcggagcgggcggacttcaacaacgcggggccgatcggccgcaagcgtcgtcggtgcctgcccgtccacgaggacttgagtggggatctgccggtgcaggttggggcggccgccattcgttggcgtagcgccagcgcgcaggtggccgctgtcgttggtgctgaggtggtggtcgctagaggaggtttctccgccaacgagaccgtcggcgccacccgcggatag

SEQ ID NO: 2170 - DNA, 273 bp, Zea mays
  Peptide Sequence Number=SeqID_8545
  Probeset Number=SeqID_16573
gctcggtaccctgaccgttcaatcttctttcgactatgttctattctactttctatgcaggatttagagtttatggaaaagaaacttgaggaccttgataagtcaatgaagaggagcaatgataagcagctcaaaattgagcatgaattatgtgagagggtcatagcccatctagaggaaaggaaagatgtccgtttaggagattggaaagctgctgaggttgagatcttgaatacattccagctactttcagctaagccagttgtctatttg

SEQ ID NO: 2171 - DNA, 362 bp, Zea mays
  Peptide Sequence Number=SeqID_8546
  Probeset Number=SeqID_16574
atgatcgagcgcgatctggtggcgccctcggcgctacaggcgcccatcaacccaggtacaccgcaggcactgagcgaagcgcagattgaacaaaccatcgcggatttcgcgcgctgcgcccggctggcgcagcaggccggttacgacggtgtcgaaatcatgggttccgaaggctacctgattaatcagttcctggtcgcccataccaatcagcgcgacgaccgctggggcggtgatctggcgcggcggcagcgctttgcactggaagtgacgcaggcggtgcgcgccgccgtcggtgatgcctttattattatttttcgcctgtcgatgctcgatctggtgaataacggcagctcgctgca

SEQ ID NO: 2172 - DNA, 2300 bp, Zea mays
  Peptide Sequence Number=SeqID_8547
  Probeset Number=SeqID_16575
ttgggtacctcgacgccggccgggggaaaatccatcccgactaggcaatctcaacctcctcggcagcacgggcgagccaggcggggagagatggggcaggggcgacaccgcccgccccaccatcgtcaactagacactgccatcgacatggacaacgttgacggccacctacacaacaacctacctctcccccttgccactccaattcttggttgccgaccaagcgttccccaaggtgaatgccagggcggtggggcaggcccggtgggagcggcagtggtgtgcgcaacaggagcaagcgggggcgcgccggcgaccagggtgcatgagcttctcgaggaccctatctgcaccgaatccacgtttcccgctcatccatcaagttggtgccttgctcctggtgcaccgattttagattgggtttcgtgcggatttagggttcttgattggaaaggctagaatcttcatagaggaatccaattaaatcgacttattcttggcagattttcctcctacgaacgagtaatttgctcccttttgactagatcatttagctttgaattaattgcaattagaatgtctaaatgggtgtgtttggattactaaacttagaaccatctgcgagttgggccttccttttcaaatgatttggtcagttttgcgttagatttaagatgaattgtgcgtttcactatggatctgagttggacatgttatggtacacagatgtatgcaccctctatcttagcatccagcaaaattctactaccacaacccctacacatgttttctattagtaaaggttgttgatatcgcaatagggtaattaattactgttgcagcgcctcgagaaggtaagaatgatgccccacttggttggaaagctttggtaatggctatttattttcactgtctattctaaaacttgtggttgacaggttgaactacgacgagtaaaaacctcagcaatttcaggttgaaccttgaatctagggtagttgttgcaaaagatattggaaggcagatgttatcttatggttacagctaagtctgcatgctagtgctaggtacttcagtgttaattttgcaggtgtagtaaaatattgatcctttttcctgcgttgtttccataacaacacaaatcctattggctatttcctttaacgtatggaagaattactatagatgatgttgcaacatttgctagtaagatgctagcttggcaatccacaatggttagcttaagagactacatgacacgattcactaatttgtatgtaaaagaagttggtcttggtttgcaaatattatttatggcaattgcctctgcaactccccgctagagaatggtattgtcgcggttgtttatgtaggttctatggttttccccaagaaaggtcatcatcttctccaaagttattactttgttatttgcgatgttcaaggaaatgtaagactttctactttgtgcgtgagatgcaactttttccccacctcttttttaattattttttgctatatacttatttctatgtctatggttcaatctatttttggatgtgttattatacatgatccaattctatcatcctgctcctttaaccaaacatgatagcaggcaaaaaataggctcttggtacacaagtatataaaagagttatagtttaggcgtgcagctaacttccttgaagccaaatgcattgcaaaacctcagatgttatgaagtaaaaaacatttatttagttaccctaatatatttttaaaattttattgttgtgcttgatccaagctacttgtgttatgctgaagagatctataaaattttaagttctgttggcttgcttttagttagttggggctatcattctgagtttctgagcttcaaaatttacgagatgttaatattaagaacaattggatttgatgttgccattttgtttccatcttgttgagccagcattctgcatagatgcttggatgtatgctgatacttatattcttgatttgttacaattatatcacatgcttgcagattgaggttgcctattttttggaatctgtgctgcttaaaggtactctgaataaggcatgctcatttgaagttagcctatcgtgtcactatggagtttccccctgatgtctccaatgccatgatgttgtcctcagtaccaagatgtgttgatagtcttccaaccttgttcagactgaagttcaagttctctaatcatgagtcttttttggtgatggtgttgacactaaaaaaaaaaaaaaaaaaaaaaaaaaaaaaaaaaaaaaaaaag

SEQ ID NO: 2173 - DNA, 485 bp, Zea mays
  Peptide Sequence Number=SeqID_8548
  Probeset Number=SeqID_16576
atgagccgcgacatcgagcgcggcacacgcggcatccagtcgctcatctcgtattcgctgtacagcatcctgccgacgctggtggaagtcggcctcgtcatcacgtatttcttcgtgaagtacgacgtgtggttcgcgctcatcacgttttgcgcgctggtcagctacatcgtgtttacggtgacggtgacgaactggcgcacgcacttccgccgcaagatgaacgagctggattcgcgcgccaaccagaaggcgatcgattcgctgctgaactttgaaacggtcaagtacttcggcaacgaagactacgaagcacgtcgctacgacgagaacctgaagcactaccgcgccgcagccatccgctcgcagaattctttgtcggtgctgaacttcggccagcagctcattgtggccacggcgctcatcctatcctgtatcgcgccacgcaaggtgtggcggcggggcacattacgctgggcgacctc

SEQ ID NO: 2174 - DNA, 745 bp, Zea mays
  misc_feature (1)..(99): n is a, c, g, or t
  misc_feature (734)..(745): n is a, c, g, or t
  Peptide Sequence Number=SeqID_8549
  Probeset Number=SeqID_16577
nnnnnnnnnnnnnnnnnnnnnnnnnnnnnnnnnnnnnnnnnnnnnnnnnnnnnnnnnnnnnnnnnnnnnnnnnnnnnnnnnnnnnnnnnnnnnnnnnnnggctactccacccagctcacacagctccacggcctcggcgcacgtaagttcgtcatcgccggcgtcggcctcatcgggtgcatcccttacgagctcgcaaggatgaacgacgacgacagcaggccgtctgggcctaacaataaccaatccgctgctagccaagaagacattgctatatccattggcataggtggcggaggtggaggaggcggtgtcggcgtcggtggaggaggcggcggcggcgacgactggagatcaccgtccatgccaccgccatacgcagacggtggcagtggcaatggcagtggcaacggcaacgcagacggtggcaatggcaacggaaacagtagtggcagccgcaccggcaccggcaccacgaacccagcgcctgccggcggcgggtcatgcaacgagacgatcaacagcgcgatcgacatctacaacaggggccttctggccatggtgaagcgcctcaacaaccgcggcggcctgcgcggggccaagctcgtcttcctggacaccgtgcagagcggcaaggacctcatggcgaacgcggccgcgcacgggttcgccgtgctcgaccgcggctgctgcggagtgggccggaacaacggccagatcacgtgcctgccccnnnnnnnnnnnn

SEQ ID NO: 2175 - DNA, 476 bp, Zea mays
  Peptide Sequence Number=SeqID_8550
  Probeset Number=SeqID_16578
tactgggcgcgaacaccctatgagggcgtgcaacgctttagcgtggctggagacggttcaccagaacagtggctcatggcaacgatcccgctggccgggctgcaactgcaaaccgctcatgcggcggaaccgcataccgcctgctggcctggcgtaacggtgagctgcacctggtcttttatgcaggcgcgtctttacccgagatcaatcatgactgggttgcgcaggcttttcgccaggcacctgtgaatgcggcggaccggcatgctctgctggcgggacaatcggcacaacgtgccgtggctggccggacgatctgtagctgctttggcgttggggaaaacaccatcttacaggcgattaaacagggctgtcacagcactcaggcactgggtaacgcactcaactgtggtaccaactgcggctcctgcctgccggagctaaaacaccttttgctttccgttgctgtaccggag

SEQ ID NO: 2176 - DNA, 1377 bp, Zea mays
  misc_feature (1)..(260): n is a, c, g, or t
  Peptide Sequence Number=SeqID_8551
  Probeset Number=SeqID_16579
nnnnnnnnnnnnnnnnnnnnnnnnnnnnnnnnnnnnnnnnnnnnnnnnnnnnnnnnnnnnnnnnnnnnnnnnnnnnnnnnnnnnnnnnnnnnnnnnnnnnnnnnnnnnnnnnnnnnnnnnnnnnnnnnnnnnnnnnnnnnnnnnnnnnnnnnnnnnnnnnnnnnnnnnnnnnnnnnnnnnnnnnnnnnnnnnnnnnnnnnnnnnnnnnnnnnnnnnnnnnnnnnnnnnnnnnnnnnnnnnnnnnnnnnnnnnnnnnnnnncccgggcgcgctggccggtttcccaattcaggggcggccatgacccaaggagtttttcggatccacctggcccggggggggaggcggagggcaacggcccgcccaaggtgctcgtgcgcatctacggccgggggcggtggaggtcttcttcgaacgcgccgacgaggtccgcaccttcgagtgcatgtcggcgccacggccagagggccccgcctccctgggccgcttcgccaacggccgggtcgaggagttcatcaacgccaggaccctctccgccgcggatctgcgcgacccggagatgtccgcgctgattgccaggaagctgcgcgagtttcacgatctcgacatgcctggacctagggacgtgtcattgtggcagaggctcaagcggtggcttggggaggctcgtgacaggtgttctgaggaagagtctaaccaatttcagctgaataaactaggtgatgagatttcagtgctggagaagacgctctcggggctccaacagtcagtaggattctgccataacgatctgcagtatggaaatattatgatatatgaagagaccagacaagtcaccttgatagactatgaatatgcgagttttaacccagtcgcattcgacattgctaatcacttctgtgagatggctgctgattacccttacctccaccaccccgtgggggtgggttttaacaaaatatccctgacccctggggaaacaaaaaaaaattcccttgagggaaacccctaacctccgccacggaaaaaacccacccggtattgggaagcttcaacgaacttgctagggttgtaataacaaaatacctctctttgggagccatctcccttgtgggcccttgtgcggaaaaaatctccccgccccccggaaacaaaatatatcccccttcccgaacaaacgattttcgaagcgccgcccctcttcttcccttatctgtgacaccaacaccccccaaatttttggcccccagcgggaagcgccgctccttcttgcgcaggcgacctcacccccatctccccatcaaaatctctgtccgcagaagccgccagcattccggcggatctgtctaccgtgcgattcgcatgccgtccgacctag

SEQ ID NO: 2177 - DNA, 376 bp, Zea mays
  Peptide Sequence Number=SeqID_8552
  Probeset Number=SeqID_16580
cgacctgcagctcggtccgcccacaccttcagcatgttgccgccgaggacctgccggagaatgaattggaaacgacgtcattgtacagtaccttcggacttacgtcaaaaccacagtgtgaagaagcacaaagaatacgaaggatggcgcagagccgaagctatgcgcaggggagcttcggcatcccggcatctcggctccatggttgtcctcgtccctcgctccagcctcctatgcacatttgccttccccctcgcaacccgcctccgtgcgtcataggtgtggcggtgacccgcgtcatgccgacccgcctccgcccctaccacaatagcgtcctgtggtcgtgcatgccatcaaagacgccgacgtcgcaaaa

SEQ ID NO: 2178 - DNA, 351 bp, Zea mays
  Probeset Number=SeqID_16581
gcccagctcaccgagctcaccatgtgcattactgccaaattaggtgcacaatgggttgtcatgtatagctcttcagttcaggctgcccggccggttggtgacgccagtaaatgtgggtgcctctgcctcctagctgctggccaggcagatgtgagccctgagctgtatggcgacagcagcccgaggttcttcacgtattggacgaccgatgcgtaccaggagactgggtgctacaacctgcactgctccggcttcgtccagacgaacagccggatcgccattggagccgccatctcgcctacctcggtctacaacggccggcagttcgacatcagcctgctcatatggaag

SEQ ID NO: 2179 - DNA, 365 bp, Zea mays
  Peptide Sequence Number=SeqID_8553
  Probeset Number=SeqID_16582
tgcaggaggtcaatctgttcgtggcgcgtatcgcctgcgccagctttatggcctatgcgctggggcagatccttgatgtgcacgtgtttaaccgcctgcgtaaactgccgcaatggtggattgcgcctgcctgtgccatgttcctcggcaatatcagcgatacgctggccttcttctttatcgccttttataagagtccggacccgttcatggccagccactgggtggagatcgcgctggtggattacagcttcaaagtgctgatctgcatggttttcttcctgcctgcttacggtgttctgctcaatgcggcacttaagcgtctggcggaacgttcggctcagcgccagatgaatttcggctaa

SEQ ID NO: 2180 - DNA, 246 bp, Zea mays
  Peptide Sequence Number=SeqID_8554
  Probeset Number=SeqID_16583
tgcagtgggtttttactctatacgtagcactatccacatagcgtattgtttaaagctaggggagttggtttcttgaggtacttccaagtgaagcagctgccgaactttctcttggcttcaccagtgctttctctcgcggtttattctattgtccattacgcaaaactgcttccacagctgtacctttggacagggagctctatggctacacagagaaaaccagttgctaccgagatggcttctgca

SEQ ID NO: 2181 - DNA, 235 bp, Zea mays
  Peptide Sequence Number=SeqID_8555
  Probeset Number=SeqID_16584
aaaaacccaactgggggaataggagcccgggccccgccccctggggaagatcacgaaaactcgaacacccattacatgtgccatcctgcgatgggtttatactctgatatacgtgcttgtcgtgagtgccaaatacatggatgggcaggggaggccggtgcgggtgatggtggcgctgtacagcagagtgaagcgcatcttggggctcatctactaaagagacccgcggtgtgct

SEQ ID NO: 2182 - DNA, 201 bp, Zea mays
  Probeset Number=SeqID_16585
ccccatttggaaggctaaagtggaaccgaagtgccgtttttttgcttggacactaatacataagagaattctggctgccgataaccttcataaaagaggttggccatgtaacctaatatgttgtctctgcaactcagccccagaaacaattctccacatatgcaaggattgcccctttagtagagaggtgtggaataaagt

SEQ ID NO: 2183 - DNA, 691 bp, Zea mays
  Peptide Sequence Number=SeqID_8556
  Probeset Number=SeqID_16586
atgaataacctgacgctgctgctgcgcgatccgcagctgaaagcgctggatgctatcgagcgtttgcagcgctggtgggaagagagcgaggtgctgctggccgagccgcgtcaggtggaaattccggtggtgtatggcggcgcgggcggaccggatctggcggaggtcgcccgtgcggcggagctgacctcgcaacaggtggtggagctgcacagcagcgcggattacgtggtctatttcattggctttcagccgggtttcccttatctcggtgggcttgatgagcggctgcacacgccgcgtcgcgccgagccccggctggtagtgcctggcggttcggtgggcattggcggcagccagaccggcatctatccgctggccgcgcccggtggctggcagctgattggccacacgccgcttagcctgttcgatccacaacagcagccgccgacgctgctgcgtcccggcgacagcgtccgcttcgtgccacaacgggagggcgatcgcggccgccacggctggcggcaatacggtatcagcctaagcggcgcactggatgagccttcaatgcgcacggccaatatgctggtcggcaacgcggaaaacagcgcggtgctggaaattgtgctcggccagttcaaagcggagtttcgtcgccacggatggtttgcgctgaccggtgccagctgca

SEQ ID NO: 2184 - DNA, 345 bp, Zea mays
  Peptide Sequence Number=SeqID_8557
  Probeset Number=SeqID_16587
atgaaagcgttaacttatcatggcccacatcgggtgcgtgttgaaactgttcctgacccgattttagagcatccggccgacattattttacgtgtcaccgcggcggcaatttgcggctccgacttacatctttatcgcgggaaaattcccggtaccgatcacggtgatatatttggtctcgaatttatgggtgaagtggtcgaagcgggaagtgaagttaccaacgtaaaaattggcgatcgcgctgtggtgccctttgttattgcctgtggcgacagaataaaaagtcgtgtgcatcagtattcgtgcctgtgaaaatatcaataccgcggggggtggtgtttt

SEQ ID NO: 2185 - DNA, 836 bp, Zea mays
  Peptide Sequence Number=SeqID_8558
  Probeset Number=SeqID_16588
gaagaagaaaaagagaaagcgtcaattggccccttcaaaatctgtttctactcaaataacgacagaaccatcgcctggggcagccccagcagacttatcaagatccacaggcgacgaagcatataatgttgaattgaatggcaaagatgaaactatagtcaaagaatctggctgtcgtctttcatcatcagaacttaatgatgcaaaccaggggggcaaaagtgttcagtttgtgagcgatgctctggcatctatagatctaatctgtaaacaagagaagtttggtcattctctcaagggatgtaaggatccttcaattgcaaatgccatttattctacaagtgaaaatgtagctattgaaggaaaaactacaaaagaaagttgtgtccctttggatagaggggacaagcctgaagaaaaaaaacaacacaatgagggatgtcataatgaagctgtacctgaaataagccacatggagaaaggtggcagaagtacagatgtctctaacaagaggcgcacaaatcaaatgatacttcccaaaagaaaaaaaaagcaactagttatatctgtcagtattagtatcatcgatatgcaacaaaaagaatgcaggtactaaatagatattagtatcatcaacaagcaacaaaaagattttgtgatcagcaacaataaagggtacaaactacagaactcgacttacactagatgttctgtcggatattccatcaacatcaaagaacaaagcaccagggatatgggccacctagaaacaagattgaatcattagaacatccgcattatactttcagttatgcactagggagacaccaacaaca

SEQ ID NO: 2186 - DNA, 359 bp, Zea mays
  Peptide Sequence Number=SeqID_8559
  Probeset Number=SeqID_16589
cgcatggcgaaccacacggtcgcgcttgacgatacaggcatcaccgaggtgatcggcgcatcgttttatccgctcacgtggtactccatcttttgtgagcaggcgcagaagcggctgttcatgggctcaatcaaggattgtggcacccatccgtgcggagtcttggtcaagcaggagatgttagtgcctgcatggagcgcgtcgcggcccggtgcccttcgcgcacaaattgctcctctgcggcggggggacgacaggtcatgtagcctaggcgggggagaggcgctaatgggcgtgcttgtcggcctaggcgtcgccgtgcacacagcgcgcgtcactcagcggtgggcgccgaggag

SEQ ID NO: 2187 - DNA, 622 bp, Zea mays
  Probeset Number=SeqID_16590
atgcctgcagcaagcgctcgccgagcgcggcctcgagttcggtcaggcgccgcgacaggcgcgatttcgagataccgagcacgcgttccgcagccgataagccccaccgaaggcggcggcttcgtggtacaccgaccgtttccgacccggctgctgatggatttcgatccggttcctgctgctcgacgaaaatgggccccgtcgactatgcgcccggcgaagccaagggtgcgccggaccatccgcatcgcggtttcgagaccgtcacctatgtgctcgacggacgctttcgccatcgcgactccgccggccatgccggcacgctcggccccggcgacgtccaatggatgacggccggctcgggcgtcgtgcacaacgagatgccggatcccgagttcgcgcagtccggcggacgctcgcacggcttccagctgtgggtcaacctgccccgccgcgacaaactgatcgcaccgcgctaccaggaggttgcggccgatcgtattccgagcgccacgtcgcccgacggccgcgcgcacgtccgcgtgatcgccggtgaagcgttcggcgttcgcgcggcgatcgagacgcgcacgccgatcctctaccagcatttcacgctgca

SEQ ID NO: 2188 - DNA, 555 bp, Zea mays
  Peptide Sequence Number=SeqID_8560
  Probeset Number=SeqID_16591
gacctgcagcttgtcgccgtcggcaccaaaatgcccgactgggttcagaccggtttcatggagtacctgcgtcgctttcccaaagatatgccgtttgagctgactgaagtgccggccggtaaacgcggcaaaaacgccgacatcaaacgcattctggaaaaagagggtgaagcgatgctggcggcggtgggcaaaggcaaccgcattgtgacgctggatattcccggacagccatgggaaacgccgcagctggcgcagcagttagagcgctggaagctggacgggcgtgatgtcagcctgctgattggtgggccggaaggcctggcaccggcgtgtaaagcggcagccgagcagagctggtcactgtccgcgttaacgctgccgcatccgctggtgcgtgtgctggtggcggaaagcctgtatcgtgcctggacggatgaaattacagagcaacgcttttcgcgattacactgccgaacagaaactgtttgtccgccgcgccctggtggcctttgtaggcatcctgctgctctccagcgtgctggtggtcaatct

SEQ ID NO: 2189 - DNA, 692 bp, Zea mays
  misc_feature (1)..(1): n is a, c, g, or t
  Peptide Sequence Number=SeqID_8561
  Probeset Number=SeqID_16592
ncaggtcagcgcgacgtctggcgaccgccacccccaccccgcgccacgtgccgagggcttcgccgggaccttcgccactcgccggtgacgagcacacaccaggtcagctgatgttgcctgcgcccctctctcccccgacgcccctccttcccgcgcccctccctcccccgccacctcttcctccacctggcttgcaggggctctcgggtacatttcgagacgggtcgttacggctgagcacatcccacgcacgcatagcccagaagccggcgtgcagagattctcaatctccctggacaaatctgcaaaagagcaaggcaggggaaaaccggtggaatagagaagcgggtcggcctggtacgtggaaacctgaagagcatggttgggctgtgaaagcggataacctagggaaggggctgccaaggagtctcggctcgggctccatctccaggggtggattacagcccagaaggccggcaacaagacgaacgaggtagggtttccacctgatcttattggtgctcgttccccaaaacagttgtacgcccttcttgcttcgctgtgggcgctgcctacccacaagcgggagagcttctctgggggtggcgatccatcccactcctcccgcccgactttggtcctcagccaggagggggagggggtgagctcgctggtgaaactgcaggcatgca

SEQ ID NO: 2190 - DNA, 480 bp, Zea mays
  Probeset Number=SeqID_16593
atgccgcccggttttacccgctcgtttgccgagcggctgaacaagctgtgccagatcaccgtaaaagaggcggaagacggcgagcgtattttgcccggccacgcctatatcgcgccgggcgcgatgcacatggagctggcgcgcagcggtgccaactacgtggtgaaactgaacgacggaccgccggtgaaccgccataaaccgtcggtggacgtcctgttccgctcggttgcggtcaacgccgggcgaaatgcagtgggggtcattctgaccggcatgggcaacgacggtgcggccgggatgctggaaatgcaccgcgccggcgcgtggaccatcgcccaggatgaagccagctgtgtggtatttggtatgccgcgcgaagcgatagcgatgggcggcaccagtgaagtggtcgatctgggtcacatcagccagcatatgctggccaaaattagcgccggacaggcattgcgaatttaa

SEQ ID NO: 2191 - DNA, 291 bp, Zea mays
  Peptide Sequence Number=SeqID_8562
  Probeset Number=SeqID_16594
ctgacttcgtgccgtgcgctcttggaaccgagcactataaaaacggagacccatgcacgctttggagttaacggtgccacggcgagcggaggcgacaacaaggccaaggtggtgctggtgatgggcgccacggccaccggcaagtccaagctggccatcgacctcgcgctgcgcttcggcggagaggtcgtcaattcggacaagatccaggtgcacgacggcctcgacgtggtcaccaacaaggtcaccgccgcggagcgccagggcgtgccacaccaccttatcgacggg

SEQ ID NO: 2192 - DNA, 327 bp, Zea mays
  Peptide Sequence Number=SeqID_8563
  Probeset Number=SeqID_16595
gaaaactggcagggacagaaatggcaggacccgcatgcgatgcgcttcttccatgacggcagcgtcagtttcccgtatctgtccgatggcatgtggttcctcacccagcttaagcgctggggaatgctgaccgaggatccggactatctgggcgtcgcaaagcagatcaaccgaattgatatctacaaacaggcagcgatcgccgtcggcaacatcacgttgcccggcagtgagatgcgcagcagcaccctgatcgacggcaaggtgtgggatggcacgaatcctgccgtttacgccgccagctttgccattaaccacaaagagagg

SEQ ID NO: 2193 - DNA, 321 bp, Zea mays
  Peptide Sequence Number=SeqID_8564
  Probeset Number=SeqID_16596
agaggtcgtgatgaaaagccagactcgctccctgacgcagcctgagacgctggccacccgggccacggtggtgccccttcaggtcacgccaaaaaagatgcgctcgcctgcgcgcctgcgtgcgtttttgcagcgtgccattcccgcgctgtgcggtgtgatgcttctgcttctgatctggcagatcgcggccctttccagcaaaggctttgccggcccgtacgccacctgggaagcggcgaaaatcctgttcgccgatccgttctataacaacggccctaacgatcagggcatcggctggaatgtgctggcctcgctgca

SEQ ID NO: 2194 - DNA, 646 bp, Zea mays
  Peptide Sequence Number=SeqID_8565
  Probeset Number=SeqID_16597
atgccgcagagtaaagctaccctgactggtctgctggccattctgctgtggagcacgattgtaggattaataaaaagcgtcagtgaaagttttggtccggtaaccggtgccgcgctgatttacagcgccagcgccctgctgttgctgctcaccgtgggttttcctgacctgcgccagtttccccgccgctatttgctgatcggcagcctgctgtttgtctgctatgagctctgcctgtcgctgtcgctgggttttactcatagcggccatcaggcgattgaagtcggcatggttaattacctgtggccggcgatgaccatcgttttaacggtgatggttaaccggcaaaagaccagcccgttgattattcccggcctcctgctggccgtcgccggtatttgtcgggtactcagcggcgatcggggattttcactgggcgaaatgatcgacaacgtgatggatattccgctcagttatggtctggcatttggcggtgcgatgatttgggcggtttattgtgtcgtgacaaaaaaaagcgcgaaaggcagtaacggcattacgctgtttttcatgttaactgcgctgacgctgtggctgaaatcgctgctatctccgcagccacccgtggtgttttcgctgcaggtcg

SEQ ID NO: 2195 - DNA, 581 bp, Zea mays
  Peptide Sequence Number=SeqID_8566
  Probeset Number=SeqID_16598
ccttttttttttttttttttttttttttttttttttttttttttttttttttttttggggttttttttttttttttttctgttttttttttttttttttttttttgaaggaacaccctttgggtttttttttaaaaaagggccccccttttttggggggcccccaaaaaaaatttcccgggggggggtttccccaattcccaacccggaaaatttttttttaaaaggggacggttaattttttcccccaaaaaaccgccccaggggaattcccctggggccccaccctttttaaaccagggggggggcctcaaaaaccccaattttgggggcccctaaaccgggggggtttccccccaaaaaattttaaactttgtgcgctgcccaacgggaaaaacccctcccaaaattttaccacccccggacattttgggcccttggtgggaataaatcgggaaaacccccatggggggcccttaaaaggaaaatgttttttcccccggggcccgagtggcgatagagcgcgccaaaaaagattaaaacccccccggggcccccccccaaattttctctaaagagggg

SEQ ID NO: 2196 - DNA, 504 bp, Zea mays
  Probeset Number=SeqID_16599
atggcgtgggtcagaagcggtctgtcgatgggcctgcccgcgcgtgccgacctgatgctgccgttcctgaagtcgatcagctatccgctgggcgtctggggcttcatcgtgctgacctatttcgtgatcgtcggcgcgagcaacgcggtgaacctgaccgacgggctcgacggcctcgtgatcatgccggtcgtgctggtcggcgcgtcgctcggcgtgttcgcatacgtgatgggcagctcggtctattcgaaatacctgctgttcccgcatattccgggcgcgggcgaactgctgatcttctgctccgcgatgggcggggcagggctcgcgttcctctggtacaacacgcaccccgcgcaggtgttcatgggtgacgtcggcgcgctggcgctcggcggcgcgctcggcacggtcgcggtgatcgtgcgccaggaaatcgtgctgttcatcatgggcggcatcttcgtcgcggaaacgctgtcggtgatgctgcaggcatgc

SEQ ID NO: 2197 - DNA, 226 bp, Zea mays
  misc_feature (184)..(184): n is a, c, g, or t
  Peptide Sequence Number=SeqID_8567
  Probeset Number=SeqID_16600
ttgagtatggcaagcccgattccagcccactttgcaccgcaaaatatattgctgattaagctgcgtcatcatggcgatatgctgctgaccacgcccgccatcaatgcgttgcgccagcgctatccgcaggccaacattgatgtgctgctgtataaagagacgcggccgatgctggaagcgcatncggcgatccgtcagctgcatatcatcgatcgcaactggaaaa

SEQ ID NO: 2198 - DNA, 221 bp, Zea mays
  Peptide Sequence Number=SeqID_8568
  Probeset Number=SeqID_16601
accagttttaacatcaccaagctgaccctcctcaaaacgctgaggccttgttcgggtacctccccattgccgactgtccggaaagcattaagacgtgtgcccactggcagacgggttcagagaccatcacaagcgcatccctggtgggcgtgggggactctctcataaactatgaggagctgggatgcaacgatgaccggctaggttaggtgcctggaaga

SEQ ID NO: 2199 - DNA, 433 bp, Zea mays
  Probeset Number=SeqID_16602
tgcaggctgaattgaacgacaatacgctggccttgtatgcaccaaatcggtttgtactcgactgggttcgggataaatatctcaatagtatcaatgggctgctgaatgaattctgcggtgcgaacgtgccgctgctgcgttttgaggtcggcacgcgcccggttgcgccggtcgctgctacgcaacccgctatggccagcagcgtcagcgcgcccgcgccggctgagaatcgtccggcaccagcacagccgctgcgcccgagctgggattcggttccggcaccggctgatgtgacctaccgctcgaacgtgaataaccgccacaacttctacaacttcgttgagggtaaatccaaccagctggcgcgcgcggcggcacgtcaggtggcggataattcctggtggcgcttacaacccgctgtatctgtatggcg

SEQ ID NO: 2200 - DNA, 519 bp, Zea mays
  Peptide Sequence Number=SeqID_8569
  Probeset Number=SeqID_16603
atgcagcgcatcgcgacaacggagtgggagcaacgaatggcaatcgaatcggtagggatcgtcggcgcgggcacgatgggcaacggcatcgcgcaggcggtcgccgtcgcgggcctgaaggccgtgatgatcgacgtgagcgacgatgcactgaagcggggcgtcgcgacgcttgcgcacagcatggagcgcctcgtgtcgaagggcaaactcgccaccgcggtgcgcgacgcggcgctcgcccgcattgacacgtcgaccgactaccaacgtcttgcgagcgtcgatctcgtgatcgaggcggcgaccgagaatgcggaactgaagacgcgcatcctgaagcagatcgacgccgtcgcgcacgccggcgcgatcgtcgcgtcgaatacgtcgtcgatctcgatcaccgcgcttgcgacgatgctccaggacccgacgcgcttcatcggcatgcacttcttcaacccggtgccgatgatgccgctcgtcgaggtgaaccgcgggctgcaggcatgcaag

SEQ ID NO: 2201 - DNA, 300 bp, Zea mays
  Peptide Sequence Number=SeqID_8570
  Probeset Number=SeqID_16604
ctgcagcagctgcaaatcatgaaataccatcagaagtggcaagaccatacaagaaaaggcggatttttagaaaagattctagaagaaggaaggatatggcccatgtcagtattctattaagccatcatttggatgatgatgttgtcaagcgtcagaagaagatcttggcacgcttacgaggttctgaagcattttcaatggccgatgcaacacactttgttgcagatagattctgccgcacaaagaacatgctagaagcaataactattggaagccaaatagtacatcgatgtggcttga

SEQ ID NO: 2202 - DNA, 428 bp, Zea mays
  Peptide Sequence Number=SeqID_8571
  Probeset Number=SeqID_16605
gcgagtttgagccagatagatgaagaagtcaagcgcctggcgaaaagcggtcagctgctgtccaccatccagcatgcgctgcatattcttgccgacagcgatgacaccaacctgcaaagcctgctctacagcgcgcgtaatatgctgagtgagctggtctcactggacgataaagtcagcggcgtatttaacctgctggaagaagccgcgattcaactgagtgaagccagcgatgagctgcgccactactgtgaacggctcgacctcgatcctaatcgcctgtacgagctggagcagcgtctgtcgcggcagattgcgctggcgcgtaagcatcatgtttcaccggaagcgctgccggtgctgtatcagcagctgctggatgaagcggaacagctgtcgcagcaagagagcgatcaggaaagcctgca

SEQ ID NO: 2203 - DNA, 244 bp, Zea mays
  Peptide Sequence Number=SeqID_8572
  Probeset Number=SeqID_16606
atgtcggcgaggcaggacggaagccccaataatcccgtgaccgtgaggatcatcgagacggtgtacgtggaggccggcaccgccgccgacttcaagtccgtcgtccagaggctcaccggcaaggacgccaccgctgagctgccggaggaaagcagcagcaggccacagtctgcgcagagcagcagggtgatgggccaagcaggttctcttggcgaccgcaaggctgctgctggcgcctcaacgg

SEQ ID NO: 2204 - DNA, 308 bp, Zea mays
  Peptide Sequence Number=SeqID_8573
  Probeset Number=SeqID_16607
gcaagttgctccatatatagtataagcaaactagtgctctcagcatttttgttttcgttcgtgctgcagactgagaatgagtaccaccatatccaacgtgcttgtacaaaggaaggagaatattatgtgcaatgggccgcaaaaatggcagtgtcactggatatgtcagttccatggtatcatgtgcaagcagacagatgctcctgatccagtgattaatgcatgcaatggaaggccctgtggtgatacctttcaggccccaacataccttacaagcctgccatatggactgaaaactggactgctca

SEQ ID NO: 2205 - DNA, 416 bp, Zea mays
  Peptide Sequence Number=SeqID_8574
  Probeset Number=SeqID_16608
ggaccagcggggacggacgacgccgagcgcgcaagcgaccgcggcagaagacgaaaaacgccgtttgccgaattatacgagccccgggaagcacacacagcggccgcaggggccgaggggaccggccccacgcgcgcaccagaaaggagcggacacccacggcggcacacggagccaggcaaagccacacacggccgcggaccagaggacaacgacagccgaacgacacgggggccggcccacggcgggcgcacgcacgggccaaccaaaccggggaggcaaccaccccaacgggcccaagaagacaccagcgccgaagggagagcccacaacgccaggcacgccaggggaagtagaaaccacgcgggagcgagcgcaggcagacgagcagcaaccaaagacacaggccacacgag

SEQ ID NO: 2206 - DNA, 441 bp, Zea mays
  Probeset Number=SeqID_16609
ctgcagctgaacctgggaaggctgattgggagcttgcccttgtagaaaccgcaagcaacttggccaatcaaaagccaacaatggcaagtggcatggacccccttgttgttaatggtatgtattaacaagggggtgggccccaacattgtcgtgcccaaggtaacaaccggaggggcaagaagggcccgcctgcctgttccggaacagaaaactaaaatccttgctttgcccgaaccgaatggttcaatgcaaactgtggggggggatcctttcggggggtccttggccgccaaccgccgtctatgtccaaatggaaaattggaaaaaaagccaccagttttggccccagaaccaattattgggcaacaataccagaaagaccggatgccagggccattcaaccttaacaagcttgaacgggcccccaaaccgggccttccc

SEQ ID NO: 2207 - DNA, 401 bp, Zea mays
  Peptide Sequence Number=SeqID_8575
  Probeset Number=SeqID_16610
cttggatgtggacatggcctccctggcatttttgcaggtctcaagggtgctgaccttattcatttccaagatttcaatgcggaggtgcttagcatgtccatctcggattgttggtttctttgctggtgattggagtgaaatggacaagctactattttgcggggatgctgagcaaggcaaaacagccggtgctgatacagaaggtaaagtgagtaatggttatgatatcatcctgatggctgagactgtctacgcgctatcttctcttccaaacctctacaggcttatcaagaagtgtgctaaccctggtgggggtggtttaacaatgggagggaaaaaaaccattacttttggaatagggggggggaacaaggcaattttttgcctcttgggttgaaaaa

SEQ ID NO: 2208 - DNA, 334 bp, Zea mays
  Peptide Sequence Number=SeqID_8576
  Probeset Number=SeqID_16611
tgcatgcctgcagataaggagaagtcagcatgcagttattaatccagctattacaatatttcttcgaatgggagctggagggtttggtgttcctccattaggatgtccagatggtaaaatcttcataacatatgagtggttcttaaaccagtggacccctacatgtttttccctgatccactatacacaaaaaccatacatttagagcattgcagcgagctgtgaagaacttccaaatgatgatagaggctgagaaacaggtacaacatactgtggtagactacatctcttgcttttaaattataccatacagtgtctgcatatctgcaggtcg

SEQ ID NO: 2209 - DNA, 574 bp, Zea mays
  Peptide Sequence Number=SeqID_8577
  Probeset Number=SeqID_16612
cccccgaggtttgccggggccaacccgaccgcactgtctctttcctacttgcgggtggactccctgctgcactctgctctactctagcatgcgcagcttcccttgccgcctcgggatcgcggacgacgacgggggtagcgacccagctgggcgcctgccaggggacggaactagcaaggaggcacccgaatcttcagaaccatgcgcacaagtactcgtcccacgagctgacacgcgcatacactctttaaagctcacaaaagaccggcaacagaccctgcaggagctacagaagaggaacatcacggaggaactcgcggaacgcgagcgcacgcactacgtcttccaaggataaggactatgctgaacaaagagaccgggagaaaagctcaagccagctactcctaaaacgttcaaagagagaggcgaaggataagatagctgcacgagaaatccatgcatgagactcccatgtgcagcctaacggtgacgatgagagcgactaacatggagacgacgacgacaccgaagctctaatgacagagcttgcgaggagttacagagagagagcaga

SEQ ID NO: 2210 - DNA, 1945 bp, Zea mays
  misc_feature (1)..(1): n is a, c, g, or t
  misc_feature (20)..(20): n is a, c, g, or t
  misc_feature (1854)..(1945): n is a, c, g, or t
  Probeset Number=SeqID_16613
ngcctaccctggcccctgcngtccggcgtccagcccagccgccagatccgacgccgtccagccgcggtccccgtcgtccgtggtgcttggaggtccccaggcgtccgaggaggaggtccccaggcccgagctcccatccggccacgggccacctcgcttcgctccctgctcaccgtccgtggtgcgctggacggagaccgagcggcgagcgcctgtccgtggtgcgcccgagctcccatccggccacctcgctccctgctcaccgcgccgccgctgggcggagaccgagcagcgagcggccgtcctcagttcgcccgagcttccattagctacctcgaggctggccggggcccacgcgtccgggtaaggcaacatgcgtctgagcgagacagcgagacagcgtaaaggggcggccggcggcggggtcctgtagcacgctacagtgatgtgaggcgccgccaccaagccgggtgaggcaccaccgcttagatccagcagagctccaggcgccgccaacccctgcctccagctctaggcgtcatcgaggcgtcgaccgctgcctccagctggctcgcaggccacactgcgccgacttggcgactcggatccagtcgtcgacgccccctgccacgctgcgccgccgccctctgcctgggcactcgtgacctgcgtccaagaatgcagcagccccaccccggcgtatcaggtcccaacagcgggcactcctctgcgaccaccatcgtcggctcatcatcagcagcaagaggcacctcacgcccgaaccctcgatccgtggccccgtcgtgcagcccctcgccctcttctatgcgccatggatgtcgatgatatttgtgacattgacaacaatgtgtcccatgaagatgaaatacatggtaccggggaggatgctaatggtaacaacagtgaacacatggtggaggaggaccatgttcctgcacctattggtagtgaggtgaatgtcctctgccaacaagttattcgtggaaaaacaagtccatagatggagaccatcgtgtagtgaagcgacaactaacaaccaagtcaaccaataccccaacaagcaagtttatggcaccttcatttaaagcagcaaggtcaaacgacaacatggatttagtgcgagtgcaagtgcaagtgcaagcatagcagcaagtgtccaaataagcactggagacgatggagatgaagaagaagatgacaagaaaaagaagctcacttcatgggtttgggagcattttacaaggtatgaagtaaggccgatggttcaaatggcacaaaggcttttagtaaccatttaaagctgaggcataagcttgtgaagggtcaacaacacctaactcacaatggccatgctagagaactatatatgtatgatgataaacttattgatagattgttatattatgccagcaagaaacatgaaagaagagggcacgtggccaatctcaataatcttgctactccgtccagacgtctaccacggagccggcggtccacggctgctgcccttgccgctaggcgccttgggcgagccggggtcccggacgagcggactgccaaagccgtcgtcgccacagggagccgccggtatgctactcgtcctttctacaggtaagtctacaatcagctaatggcagtaaaccttgttacgaccgctaagcaagcacacgtggaggatgctgtttaagctggtcaagatatggcaaatggaatgcagtatttggtgtatcatatgtacttatattttattgtcatattggaccaagtggaagttttatatgatcatggtttgactttttgttttgagtgctgtgcaaataccggtaacattgnnnnnnnnnnnnnnnnnnnnnnnnnnnnnnnnnnnnnnnnnnnnnnnnnnnnnnnnnnnnnnnnnnnnnnnnnnnnnnnnnnnnnnnnnnnn

SEQ ID NO: 2211 - DNA, 352 bp, Zea mays
  Peptide Sequence Number=SeqID_8578
  Probeset Number=SeqID_16614
cgacctgcagcagccccgggttcttgcagataagtttctgaaatgcaatgaaactgaaacaacaacgtttactgattgtgttaaatgccttatcacattcacaagtagtaaattcagcagtgatgccagtcttaatgccattgcatttcttcggttttgtgctgtcaaactcgctgaggaaggatttattagtcatgagaaggatactgaacagcaaccaagtaaaatagattcatcagatgggaacagcatggtgcataaggacgatcatgtttacttctgggttcctttgcttgctggtctagctagattgacaacggactcaagaccaactatcagaaaaggttctgca

SEQ ID NO: 2212 - DNA, 430 bp, Zea mays
  Peptide Sequence Number=SeqID_8579
  Probeset Number=SeqID_16615
tgcagggcgcggcagtcggcggcgaagtgccgggagcatgggtgttcgtgtccgaacacgtgccgtcgcgccacatcggctacgcgtgcggcacgctgaccgcgggcctcacggccggcatcctgctcggctcgctggtggccgccggcatcaacagccgttactcgggcgccgaagtcaccgcgttcgcgtggcgcatcccgttcctgctcggcggcgtattcgggctgttctccgtgtacctgcgccgctggctgcatgaaacgccggtgttcgccgagatgaaggcgaagaaggcgctcgcggcggagattccgctgaaggccgtgctgcgcgaccacggccgcgcggtgatcgtgtcgatgctgctcacgtggatgctgtcggcggcgatcgtcgtcgtgatcctgatgacgcccgcgctgctgca

SEQ ID NO: 2213 - DNA, 375 bp, Zea mays
  misc_feature (360)..(360): n is a, c, g, or t
  Peptide Sequence Number=SeqID_8580
  Probeset Number=SeqID_16616
ttgcgctcgggtgcagtctgatctacatgggcagactcatctatggcttcaacgtgtcggtcgacggatacatcgccgacgcgcagggcagcatcgactggtccgaaccgagcgaagaactgcaccagtactggaatgacttcgagcgggagacggccctggcgttctacggccggcgactctacgagctgatgtccgcgtactggcccaccgccgacgcggcccctgacgccgagccgatgatcgtcgacttcgcccgcatctggcggaacatgccgaaggtcgtgttctcgcgcaccctggattccgtcgactggaactcccgcctggaacgcggcgaccctgtcgagggtggtcggnaagctgaaagccgag

SEQ ID NO: 2214 - DNA, 438 bp, Zea mays
  Peptide Sequence Number=SeqID_8581
  Probeset Number=SeqID_16617
atgctcaacgttaagcgcgtgcgctacaccgatcgggtgctgtatcgctactacatgcacgatgcgtcgatcagcaaccgcaagcgcaccggccagcacaatgtcgactatcagcgtcactacctgaaaatcgcgcgcatgctggaagagatcaatacgcgctatcgtcacaaggtgaagatttacccgagcttccacgcgcagattacccgcgaagcgctgagcgtgtgccacgctatccggcgcgaaccggacgccgcagcgcgccaggcaatgatcgccgatctgtttagcagccagacgcacaaacgcatgctgcgcaatgcgcgcggcgcgcgtcagtggtatcagctgctgctttggctgagccgcatttatcgctggcgcaataaataagcgcccgccgcggctttaacccctccagggtttgccctacaa

SEQ ID NO: 2215 - DNA, 599 bp, Zea mays
  Peptide Sequence Number=SeqID_8582
  Probeset Number=SeqID_16618
atgctgttcatctcgatcccgctcggcggcatcctcgcgttcatgatggtgcgcaccgacctgcccggccgccgctggctcgagccgctgctgctcacgcccgtgttcgtgtcgccgatggtgctcgcgttcggctacgtggtcgcggccggcccggtcggcttctactccgtgtggttcaaggaattatgcggggtgcagaacgtaccctggaacgtgtattcgatcttcgcgatcacggtgatcgtcggcctcacgcatgtgccgcacgtgtacctgtactcgtcggccgcgctgcgcaacctcggctccgacgtcgaggaagccgctcgcgtgacgggcgcccgtccgttccgcgtcgcgctcgacgtgagcctgccgatgacgatgcccgcgctgctgttcgccggcgtgctcgtgttcttcctcggcttcgaggtgttcgggctgccgctcgtgctcggcgatccggaaggccacctcgtgctcgcgacctacctgtacaagctgaccaacaagctcggtgtgccgtcgtaccacctgatggcggcggtcgcggtgtgcatcgtcgcgatcacgttcccgctcgtgctgctgca

SEQ ID NO: 2216 - DNA, 313 bp, Zea mays
  Peptide Sequence Number=SeqID_8583
  Probeset Number=SeqID_16619
agttatgcggccacggcaaaccgccacggcggaggggggacgctcgcagccgcccccaaggagacggaagaggagcacgcgcacccacggaacagcgccgacgcgacaaggagcgcggcgcaacagcggccgcagagggggagccagaagcgcaccagctccgagtcatcagagcgacacgcacggccgcagaacaaggatgcacacatcacgagaacgccgccgcccgcacggagagaacaacacggcgagcaagggctacaagacccacgcagccgaaccaaggcaagcgaccacggcgcagacaaaccca

SEQ ID NO: 2217 - DNA, 384 bp, Zea mays
  Probeset Number=SeqID_16620
atgccgcgcggcgatctgttccccgatatcggcccgttcgagaccggctatctgcccctctccgaggggcatgtgatgtattgggagcaggtcggcaacccgaatggcaagccggttttgtttctgcatggcggtcccggcgccggggccggggcggtgcatcggcggtttttcgatcccagcatctggcgggtgatcattttcgaccagcgcggcgccgggcgttcgcgcccgctgggggggctggagaacaacaataccccgcagctgatccgcgatatcgaaacgctgcgaaatttcctgaatatcgagcgaatggtgctgtttggcggctcctggggctcgaccctggcgctggcctatgcgcaggcgcatcccgagcat

SEQ ID NO: 2218 - DNA, 372 bp, Zea mays
  Peptide Sequence Number=SeqID_8584
  Probeset Number=SeqID_16621
tgcagaaggagccgtgccactgaccgatccatgggcatttcttcgtttcagcgctgttggtgcatggctcttgtaagtgcgtaccgctactatgatgggccagaagtaaacacatctctggcccattctgaagcctaaatacttcacgagaagatccataagaaggcttacagtgacgaggagatagatcatcaggattctccggttttctgataatcttttcttgctgcacacttctaacaggatctgaaacctgacccccaaggatgagttccttgcaacactgatgagaaaagtcaaactggacgctctgaatgttctgagttcaaccaagcttgccattgtcaagtgtcgtgaccaaaacttgctaca

SEQ ID NO: 2219 - DNA, 472 bp, Zea mays
  Peptide Sequence Number=SeqID_8585
  Probeset Number=SeqID_16622
gagcgcatgatggacagaataattagctcgtcacagcagcagtcgctactcagcacccataaagtgctgcgcaatacttatttcttacttggcctgacgctggcgttttccgccgtcaccgccacgctcagcaccgtttacgctatgccctcgccgggactgattctgatgctggtgggcttttacggattgatgtttctgacctatcgcctggcgaacagtccggcgggtattctggccgcgtttgcctttaccggcttccttggttactgcctcggcccgattctcagctcgttcctcaccgccggtatgggtgatgttatcgccatggcgctgggcggcaccgcgctggtgtcttctgctgttccgcctatgtcctgaccacgcgtcgcgacatgtctttccttggcggcatgatgatggccggctttgtggtgctgctggtggccgtggttgccaatatcttcctgca

SEQ ID NO: 2220 - DNA, 560 bp, Zea mays
  Peptide Sequence Number=SeqID_8586
  Probeset Number=SeqID_16623
atggccgagggcatcgggcgccgcgatgcggtgttcctgcccgccttcacctacaccgccaccgccgaggtgccgctgctgctgggggcaacgccggtgttcgtggatgtcgatccccgcactttccagatggatctggccagcctggaggcgcgcatcgccactgtgaagaaggcgggagcgttgcggccgcgggcgatcatcggggttgatctgttcggccagccggcggactgggccgggattgcaaccattgcggcgcgcgaggggctgttcacgctcgatgattgcgcccagagtttcggcgccgcgcaaggcggcgtgcggctgggcaaggcggcggatgccaccgccaccagctttttcccttccaagccgctcggcgcctatggcgatggcggggcgctgttcacgcaatccgccgagcgcgcggcgctctatcgctcactgcgcacccatggcgagggcacgacccgctatgaggtgctgcgcaccggcatgaatggccggctggatacgatgcaggccgccgtgctgctggccaagctggaggtgttcga

SEQ ID NO: 2221 - DNA, 661 bp, Zea mays
  Peptide Sequence Number=SeqID_8587
  Probeset Number=SeqID_16624
gactctcgaggatcctcctggcgcggtacctgttccatccgaccaaccgcgtctggggcctcttcacgcggttctaccgcgcgtacctcgcgcgggcggagctccggctgggcgtccaggtgcggaacttctatccctgggcgcagcagtcgccggtcgttctccggcagatcacgtcgtgcctgtggagggagaaactgctcccggaggttcttgacacggaagaaaacgccgtgccggcgccgcggccgggcggcgccagaaccacggccgttctggtcacctctctccggtcgtggtactacgagcgcatcaaggggatgtactgggatcaggcgacggcgaccggcgaggacctgagcgtgcaccagccgagccacgagggtcagcagcagtacggcaaaagatcgcactcacgaccgggcatggtcggagatgtaccagctgagcctgtgcaacgtgctggtgaccagcggctggtcacacgttcgggtacgtggcgcaggggctcggcggcatcaccccgtgggtgttgcacaagccctcgaatgccacgtcgccgccggaccccccgtgcttccggcatgtgtccatggagctgtgcttccatgcgccgcacgtctacgactgcaagctctagcgtggagccgactcagggaaa

SEQ ID NO: 2222 - DNA, 373 bp, Zea mays
  Peptide Sequence Number=SeqID_8588
  Probeset Number=SeqID_16625
gtgcatgccgctcgacttttgaggatccccctgcctgatcttccccgtgttccttatcccccttgctcaccttccggttacctcttggagttcagcagcgctggagccatgcggtgcgtcttcagtaccggcgacctccgggtaacccaatcccaatcgacctcacaagctggtcggcttacatctgatcataaacaggctcacaaggtcggccgttacagcgccgaagaacgcagggagaagatcgagcgctaccggacgaagcgtaaccagaggaacttccacaagaagatcaattatgagtgcaggaagacgctgccggacagcaggcccagggtgcagggccgcttcgcgaggaatggcgagacggagg

SEQ ID NO: 2223 - DNA, 327 bp, Zea mays
  Peptide Sequence Number=SeqID_8589
  Probeset Number=SeqID_16626
acaaggcctccaaaataccatatactcccaaagtctacccgtacgacaacttgaaagttgaacttggtgacagaccattttagattattcatctgtttgatgacaaggccctttgatgaatttagctctaaatccccttccatcagagaaaagcagggaaaacttgtttaccagggttgtttttattttgttgtgattgccctgttgtaaaccaccgttgtgtgatttgctgtgaagcatgggtttgccccccaataatgcaaccagccccttatgctacggattcgagtattaacaatccacccggggccagaattttttttgttc

SEQ ID NO: 2224 - DNA, 386 bp, Zea mays
  Probeset Number=SeqID_16627
aaatggttgcaaatcacactctcagacagacccattttgcaatgtttaaaggaacaggaagcagctagagcgagcagccgggcagcatacaaggaaaatacgaaacaaacgcaggaccccaatcaggcgggcaagctacggggcatgcacaaaaataaacatgtgaccgacaggatatctctggatgagggggaacctacaagagacatagcgaaacgctatagaacaggaccgataacatatggatccatgtcatcagaagcacacactgcccaggctatggccaagaacaaactccgaagaaaatctaaaacaggtcaaaataaactacaaaaaacatgggcccatgtcctaatgcgaggtaaacctaacccctctggcaaccc

SEQ ID NO: 2225 - DNA, 311 bp, Zea mays
  Peptide Sequence Number=SeqID_8590
  Probeset Number=SeqID_16628
ccagctccacccagccctttgacttactggcaaaagtcggcggacgttttcgcctgacgccgttttacgacatcctttccatttatcccgtgattggcggtgcgggattacacattcgtgatgcaaagctggcaatgggactgaacgggagcaaaggccggaaagccgccatcgaacacatttttccccgccattttatagaaaccgcaaaaacgacaaaatttgccctgacggcgatggcacatatcctcgatgagttcagagccaggacgccagaagtgatccaacgcgtgcaggagcaaatccctgca

SEQ ID NO: 2226 - DNA, 644 bp, Zea mays
  misc_feature (601)..(644): n is a, c, g, or t
  Peptide Sequence Number=SeqID_8591
  Probeset Number=SeqID_16629
gcagtgagcacaccctcggctcagccaaaggcaagccttgtcgtgcaagcgaccttggccaaatcgccttacaagccgaccgtcgaagtgaccgtagtcacttcgccctttcactgaccgatctgacaagaaaacagcgccgcccgccccgctccagctgctgtgccaaccacccgggtgaaaccgacaacagccaagtccagcctcgagcgcaacaggaagctccgcctcgcccgaccttgggcctcggcctcaggaggaggtctccgcctcgcccgaccctagggctcggccctcgcctcggcctcagaaggtggtctccgcctcgcccgacccgagggctcggtctcaacctcggcctcggaagctggtctccgcctcgcccgaccccaggactcagcctcaacctcgacctcggaaggtggtctccgcctcgcccgaccccagggctcggcctcaacctcgagctcgggaggaatcgtgtcctcgcccgaccccggcctcggcctcaggaggagtctccgcctcgcccgaccttgggctcagaccgaccacgccacagggggtacatcattaccctatccctagctagctcaggctnnnnnnnnnnnnnnnnnnnnnnnnnnnnnnnnnnnnnnnnnnnn

SEQ ID NO: 2227 - DNA, 359 bp, Zea mays
  Peptide Sequence Number=SeqID_8592
  Probeset Number=SeqID_16630
tgcagcatgagcggctgtcgctgcacacgctggcgagccagccgctgtgcctggccgagcccacacgctatttccggcgttaccttgacggacagctgcgtgaaaccggcgtgctgccgcgggtgattgtagaaagcgcctcggtgatgcagctgattcagagtgcgcaggttggcctgggcgtcatggtgtcgccctgcggccatctactaccggaaatgctgcaccatctggcgcgccggccgattgatatcgcgccgatgggacgtcaggcggcgctggtgattgctgagccgggcagggcgtcgccgctgtcacagcacttctttgacgaggcacgacgccacctggcggattag

SEQ ID NO: 2228 - DNA, 323 bp, Zea mays
  Peptide Sequence Number=SeqID_8593
  Probeset Number=SeqID_16631
gtatgcatgacgcaggccaggcctagtggtcggggagcatcgccatcgttgcgctcaagaacttcctcaacgcacagtattttgggcagatcggggtcgtctgcccgccgcagaacttcaccgtcgtcttcgacaccgggagcgccaacctctgggtcccttctgccaagtgctttttctcgctcgcgtgtttattccatcccaagtatgactcccgccagtccagcacttacaaaccgaatggaacaccggcttctattcactacggtacgggagggattgctggtttttacagccaagaccaggtcgcggttggcaatctg

SEQ ID NO: 2229 - DNA, 1125 bp, Zea mays
  misc_feature (1125)..(1125): n is a, c, g, or t
  Peptide Sequence Number=SeqID_8594
  Probeset Number=SeqID_16632
cggtgcgcatcgacgtcccgcccaccagccccggccgtgcggcgctcaaggtgtgggaggagctcgtcaacgtgctccgcaaggacggcgccgaccccgccgccgccttcgtccaccgcaagaaggtccagcacgccgagaagagcatccgcgacgccttcctcgccctctaccgcggcctcgacctcctcaacaagttcagctccctcaatgtgaaggctttcaccaaaatattgaagaaattcgtcaaggtgtcggagcagcagcggaagactgacctgttctcggagaaggtgaagaggtcgccgttcagcagctctgacaaggtgcttcagctggcagacgaggtggagtgcatcttctcgaggcacttcgcgggcaacgacaggaaggtggccatgaagtacctgaagccgcagcagcccaggaacacccacatgatcaccttcctcgtaggcctcttcacaggcacattcgtgtccctgttcatcatatactcggtcctagcccttgtcgccggcatcttctcttcgacaggaaacacagcctacatggagatcgtctaccacgtcttcagcatgtttgcactcatcagcctgcacgtcttcctgtacgggtgcaacctcctggcgtggaagagcagcaggatcagccacaacttcatattcgacttctcccccagcaccgccctgacgcaccgcgacgccttcctcgtgtcggcgtccatcatgtgcaccgtcgtcgcgcggctggtctccgtcctcttgaaactgacggatgaacgcggagctccaactcgttgagcaggaatttaaattccaggaatggatacactgtccctgcaagaactggtgtttaagtggtaataaaacgaatcggagagcataactgcacaagaccgagacgctgcagattttaggatggaataagctcaggcgggtgcgccagggtacaacattaggcgttctggtcaggaaagatgatgtgcatttaactagctactggtcgattgagaaagaattgttgcatgtcaatcgactaacaagatcttaattttttccatgcaaaattttttcagtcaccaattcccagatacattttcccaacttaaaaaatattgcatgn

SEQ ID NO: 2230 - DNA, 379 bp, Zea mays
  misc_feature (321)..(321): n is a, c, g, or t
  Peptide Sequence Number=SeqID_8595
  Probeset Number=SeqID_16633
cactactgatgtgcagcgccattgcgccggtgcacgcggtcactatccatgaaagctatgcctttgcgaagctgggcgaaccgaaatacgcggtcaacttcagccattatgattacgtcaatccggctgcgccaaaaggcggcaagatcaccctcgccgtggtgggcacttacgacaacttcaaccgctatgcgtcgcgcggcaatcccggtatcggcactgacacgctgtacgacggcctgtttaccacctcagacgatgagcccggtagctactatccgctgatcgccgaatcagcacgctatcccagcgattatcacntggatggagggtgtcgatcaatccgcacgcgcagtttcaggacggtacaccgatcacc

SEQ ID NO: 2231 - DNA, 228 bp, Zea mays
  Peptide Sequence Number=SeqID_8596
  Probeset Number=SeqID_16634
atcctccatcctcatgatgcaacgcatgctctcccccttgatcataatgtgaaacgccggcttacatctccaataagggcacatgcacgtaatgaaaagctgtcgatgcccctgcttaccttgatcaagttcatctcgacaacgattgacatgtcgacgctgcccttggcattatggatacaggtgccctaaagagacttatcactcacgaaggtgatcatgtgggta

SEQ ID NO: 2232 - DNA, 247 bp, Zea mays
  Probeset Number=SeqID_16635
gcggccccatcaaccaggccacgctgaaccaggtgctggccaaccgtacccgccgtttcgacaagcagggcgagcagttctacgatcagatctcggcactgcacaaatccgtgcgctcctccaaccccaatgccgccgtgtactggctggcgcgcatgctcgacggcggctgcgacccgctgtacctggcccggcgcatgacccgcatggcggtggaggacgtgggcctggccgagccgcgcgcctg

SEQ ID NO: 2233 - DNA, 882 bp, Zea mays
  Peptide Sequence Number=SeqID_8597
  Probeset Number=SeqID_16636
agcagagcaggccatcaatgaaaaacgtcagcccgcggatttgcagcctgatgagtgggtgatttatcagttttgccagcagttacatcagcaacagaaaatcagtgatgccacctggcagcaagccatcgaattatggggcgagaagggcgtggtggatttgataggcattaacggctattacagttttctctcgatggtcatgaacggcgcacagacgccggttacactagcattggttgcctgttccgccagttttatcgctgcggcacaggataaattaaccgtcggggttgatacggcttttgttccttttgaatttaagcaaggtgataaatacgtcggctttgacattgatttatgggatgccatcgcgaagaaaatgcatgtcagctatgaattacacccaatggactttggtggcctgattccggggctgcaatcacggaatctggatgtcgcgatggcaggtattaccattaccgatgcgcgtaagcaggtggtggatttcagcaacggttattatgacgccgacttattaatggctgtcaaaagcgatgataacagcattaagaaattcagcgatttaaccggcaagaaagtgggactgaaacagggcacggccgcagccagctttatgaaaagtaaatacaaggcaaattatgttgagtttcctaatatcgacaacgcctatctggatttgcaggccggcaaccttgatgcggtggtccatgactcgcccaatgtgctgtactacgtgaaaacggcgggcgatggcaaagtcaaagccagcggtgaaaacgacacgattctgccgcagcagtatggctttgccatgcagaaaaacagcagcctgacgcctaagatcaacgccgcgctgca

SEQ ID NO: 2234 - DNA, 205 bp, Zea mays
  Peptide Sequence Number=SeqID_8598
  Probeset Number=SeqID_16637
tgaaaagccgggatatgccgcatgaatataagtctcgtcgccctagccagttttgtatccctcattaccagactgatttccactggattccatgctctaactccagtgtggccaagtagcgcgtccatgcgcgtgcgtacggcccgccgcatgcaccactagcacctgtcatgtgaagtggacgcatctgtgtgttgtgctctgc

SEQ ID NO: 2235 - DNA, 314 bp, Zea mays
  Probeset Number=SeqID_16638
atgcaggtgcgccatcgcgccgtcgctaatcagggcgatgacggcctcagcgcatggctggcgagccattttccgcacagcgcggcgcactggacgcgctacccctgcgaaacctcgctcaccgttggcgtcacgcactccgatcacgagcgatcgttcctcagcaatctcggtcacattgtgcggctcagcgcgcaggacgtgctgagccagctcccggcgcaagccagcagcggcgatatcgtgctgttgtgcggcacgtttctctgcctgcaactgtatgacgactacccgcagttgctggccgaactgca

SEQ ID NO: 2236 - DNA, 377 bp, Zea mays
  Peptide Sequence Number=SeqID_8599
  Probeset Number=SeqID_16639
gcagctgatcaatccaattgcgcggtggccattttatgccttcttgggaggagccatgatctgcctcctggccagcagcacttggccaccttctctcctgccattctcgccggcatagcatacattatgtttcggcttgattacgcaggcatggcagctgtaatcggccacatccttctaccctccagtatgctaatctttcatgtgctaccccatatgtttgcagacctgtaccacaggtttcataaccagtcctagggagtggcaaattatcgcagttctcttgtacttccgagtcttcctgaaatccggaagttcagaagccatgcagaagcatagcctcttgctttgggcatgaggatgcatattggcggtga

SEQ ID NO: 2237 - DNA, 313 bp, Zea mays
  Peptide Sequence Number=SeqID_8600
  Probeset Number=SeqID_16640
tcgcattcttcgttgttcttatgctggtcaccgtcctggtgattaaccagttcatcgcgccgcagcttagccagaacgaaagccggctggtgcgctatgaggtggatggtctcgccggacgtatcgtcgagcagatgaaccgcgtgcaggcgcagcagcgtgccattaccgaagcggcgggcgtgatggacagcgccgccattgacacgctgctgccggcgctggttaaccagtatcaggacagcaacgtgttcggcggaggtatctggccgttacccaaccggcgcgatccggcgaaagagaaagacagctc

SEQ ID NO: 2238 - DNA, 352 bp, Zea mays
  Peptide Sequence Number=SeqID_8601
  Probeset Number=SeqID_16641
cagtcactttatttatgtttaccaatcaaacccatttcttaaattaaactaaggcctactctggcctgttgactattagtagttcatgaactatcttccttttgcaggcctgaagaatccgattaccttgatgagccatgttacaccagtgatggccatcgccactatgatactatctctattactggatccttggagtgaatttcaaaagaattcatattttgatagcccttggcatgtcatgcgcagttgcttacttatgcttatcggaggatccttagcttttttcatggtaatgagtttaacatgatatgcggcatgttctttcaagcattatcggagttcgcacggt

SEQ ID NO: 2239 - DNA, 365 bp, Zea mays
  Peptide Sequence Number=SeqID_8602
  Probeset Number=SeqID_16642
tgcagcaaacgtcgctgtcgatcgtcggcgagctgaccattcctatcgaacactgcgtgctggtcagcggtaataccgatttgcagcagattgaaaccgtgtatagccatccgcagccgttccagcagtgcagccagttcatcatccgcttcccgcagtggaaaatcgaatataccgagagcacggcggcggcgatggagaaagtagccgcgatgaactcgccgcacgtggccgcgctgggcagtgaagccggcggtgagctgtatggtctgcaagtgctggagcgcaacctggcgaatcagcagcagacccatacccgtttcattgtgctcgcgcgtaaaccgattgaagtctccagccaggtg

SEQ ID NO: 2240 - DNA, 1000 bp, Zea mays
  Peptide Sequence Number=SeqID_8603
  Probeset Number=SeqID_16643
tggcaccggggcgatggtgctgggctgccgcggcattttttcgctgtctcaggatctgactaaagagctgggcctgccggtgattgatggcgtcagtgcggcggtgaaaatggtcgagtcattactggcgctgggctttggaacttgcagaatgagtgatgtatctgaaaagaaagagtacagcttcaacaaaaattatccgcgcgatctgattggctatgcgggccagccgccgcacgcgcagtggccgggtgaggcgcgggtggcggtgcagttcgtgctcaactatgaagagggcgctgaaaacaatgtgctgcacggtgacgcgggctctgagcagtttctctccgacatcatcggtgccgccagctatgccgatcgccacatgtcgatggattccctgtatgagtacggctcgcgtgccggtttctggcgcatccatcaggagtttcagcagcgcggcctgccgctgaccatctttggcgtcgcgatggcgctggcgcggcatccgcagattgtcgaggccatcaaagccgccgattacgatgtggtcagccacggctggcgctggattcactatcaggggatggatgccaaaaccgagcgtcagcacatgcaacaggcagtggacgtgctcaccgagctatttggtaaagcgcccaccggctggtataccgggcgcgacagccccaatacgcggcggctggtggtcgagcagggcggcttcagctacgacagcgattactacggtgacgatctgcccttctggacgcaggtcacctgtcaggacggcacggtgaagccgcatctgatcattccctatacgctggagtgcaacgacatgcgcttcgccacgccgcagggattcaacaccgccgagcagttctatacctatctgcgcgatacctttgatgtactgtatgaagagggcgcgacggcgccgaagatgatgtcgattggcatgcactgccgtctgctggggcgtccgggcaattgccgc

SEQ ID NO: 2241 - DNA, 604 bp, Zea mays
  misc_feature (70)..(70): n is a, c, g, or t
  Peptide Sequence Number=SeqID_8604
  Probeset Number=SeqID_16644
agtgattgtggatggcgcgcagggcgtagtgcactgcccgccggatgtgcaggcgctggatatcgacttntacgccttttccgcgcacaagctgtacggcccgatgggcactggcgtgctgtacggtaaagcggagctgctgtacgcgatccccgtggcaggcggcggccaaatgcttacgcaggtcgaattcaacgggttcaccccgcagccgggtccgtggcggttttaagcaggcaccccggaacttgcgggtgttgtccggcttaattcggcccttggattggttaccccggtccaatccggaaaaaccggaagcttgaagccacaagtggccaaccctgccgaaaaagcaattagccctaattctgggcttccccaggtttccggttccggccaggcgccacgcttgtgtggcggtttgaaaatccgccgggtaattccaccccaacgcgaatattcggtgacggctgcttggcgggaacaggggcatcgcggttgcggcgccgggccacgcacttgtgccccacgccgcttgatgacggcgccttggcgtcagcggcacgctgcgcgtctcatttgccccctataataatctgcaggc

SEQ ID NO: 2242 - DNA, 277 bp, Zea mays
  Peptide Sequence Number=SeqID_8605
  Probeset Number=SeqID_16645
ctagcgtgtgttgggtgtagtccgtcggctgcctcgtgtgtgctgtgctctctttgctcttttcagtcctcgctgttgtttctttctgcatttcttgcacctgttggtcctgtttctccttgccttggcgcacgggctgtgtacggtcctggtgcgtttgtggcggtggccggtgttgatcctgtcggagttttttggtcgcccgccggcgtccgtgctgggctgggtgtcgtggtttgttgcttgcttgcccggtcccttgtgtgtgctcctgccg

SEQ ID NO: 2243 - DNA, 525 bp, Zea mays
  Probeset Number=SeqID_16646
gcccccgccccttttttttttttttttttttttttttttttttttttttttttttttttttttttttttttttttttttttttttttttttttttttttttttttttttttcggacccgggggcgggggccgaaacgggaaacccggaccggaacccgaaggggcacccccaaacccaaaacggaaccgaaaaaggccaaaccaaaaccaaggccaaacccggtcccaaattgaaaaccgaacccgatcccaaacccaaaaaaaaaaggaaccggaaacaaaaaacccaaagccccggaacccaaaagcgaacccaaaccaaaaaaaatgccctaacgcccaccgccccaatcccaaaacggaaaccccaagcgccaacaacaaaaaggaaaccgccaagggacggggagaggccgtatgcggaacgagcgccagggtgcttttaaccataaaaaagggaaagggcaaaatcccattgaccccaaacccctggcccagaggaagcaaccgcaacacgcccacttg

SEQ ID NO: 2244 - DNA, 248 bp, Zea mays
  Peptide Sequence Number=SeqID_8606
  Probeset Number=SeqID_16647
ctatatagtcgacctgcaggtatgtaatatgactggtaaactaacccagaaaagtgacgtatatagctttggaataattcttttggagcttttgacaggtagaaagccaatagaccatacaatgcctatagaccagcacaacctgagagcttgggtgtgtccacttgttgctcctcaaaagtgacttcagcacaatagtagttattccaaaggagtttatccgctgcataggctgcaggcatgcaagc

SEQ ID NO: 2245 - DNA, 286 bp, Zea mays
  Peptide Sequence Number=SeqID_8607
  Probeset Number=SeqID_16648
gatgtgaagcatcccactcccgagcgagacgagctcgatgatctgcgatttgagtttgacgagcaccacgcaagaaaaattgtacagtctgaccatgatgacccgccacagagaatcggaaaggctactttcgtagtgactgaggaaaaccgtgatgcttcccaagaagcaaaaggcaaggctatggaagcaatttctgaaggaaaacttgaagatgctattgaacaccttaccaacgcaatagtgctgaatccactctcagcaatcatgtatggtactagaggga

SEQ ID NO: 2246 - DNA, 224 bp, Zea mays
  Peptide Sequence Number=SeqID_8608
  Probeset Number=SeqID_16649
tgcagtcccagtggcgatgccacagagattactcaaattttatgaaattgaagagagctgcactaacatatcagtgtgcttggcgaagaagtgttgctaggaaggagctgaggaagctcaaaatggctgcaagagatacacaagctctaaaggtggccaaagagaaacttgaggaatatgtggaagagctaaaaagttgcctaggccgagagaagaaactgagg

SEQ ID NO: 2247 - DNA, 427 bp, Zea mays
  Peptide Sequence Number=SeqID_8609
  Probeset Number=SeqID_16650
ccgcatcagttttcgcggaggcggcccccagaaagtcagcttcccggtagagtggggcacctatcgtcttgaagtgcatgccgttgacaacgtcgtcagcagcgtgcgtttccaggcaggctactggtggcaggacaacaccaacggcaccggcgcgctgcgtccagatcaggtcaaactgaagatcgacaaagccgcctatcaacccggcgacaccgcacgtgtcacggtggaatccccggcggccggcaaaggctatctgctggtggagtcgagcagcggcaccttgtggtggcaaccgctggatgtaccggcgggcggcgcaaccattaatgtgccagtcagtgcggagtggaagcgccacgatctgtatctcagcgcgattgtggtgcgcgcccgcgacaaagcgaacggcaccacgccaaaa

SEQ ID NO: 2248 - DNA, 209 bp, Zea mays
  Peptide Sequence Number=SeqID_8610
  Probeset Number=SeqID_16651
ttgtttaaggtcctgaaggtttattcaaaaccttcctacctgggcctccagggggggggtcaggtccacttgtattccaaatggttgttttccttgttaaccaacccattaccttttcctaacaaaaccagtcaaataatgatgacttggaaggcaatcctgaaacaaatggaaatggaacccttgttcaccaaaaacaccagagaagg

SEQ ID NO: 2249 - DNA, 510 bp, Zea mays
  Probeset Number=SeqID_16652
atgaccgacgggcgcggagggaacgtttaccggtggtcgaggccggggcgcaacgagccgcaggccaccaacggccgaaaggaacgccgggacccggcccacaccgcagccgctagcgttgtggcaggggtcgcggctgaagtcgagcacgagcaggacatgccagccgagcacccaggagcggaggagacggcgggggcaagaggagccacccgcaacggggcggagacgccaacctcaaaggcgagcgatcgacgcgggctgccgaaggaaaccgccacagcgaaggccataatggatacacgagaggggacgaaccgggacgcgggcgccgaagcgcaaccgacaaccagggacacgcccaaggagcgggccgcctacggagaaggcacactggcccggaaggagagaaaggagggcgggaagcagaaaccggagcgccagcaggtcgacacgagaggacccccgggggccgagcaggaacacgcaatcacgacaaagcagaacaca

SEQ ID NO: 2250 - DNA, 504 bp, Zea mays
  Peptide Sequence Number=SeqID_8611
  Probeset Number=SeqID_16653
tgcagctcgcccgcaagctcggcgacgcgatccacgacaatcgctgggcggccggcgaggcgctgccgtcggaacgcgtgctgtccgaagcgctcggcgtgtcgcgcatcaccgcacgcaaggcgatcgcgctgctcgtcgagcaagggctgatccgccgcacgcaaggcgccggcaacttcatccagccgcgctacgaggatccgctgtcgcggctgtcgagcttcagcgaaatgctcgagcggcgcggcttcaagccgagttcgcaatggctcgagcgcgagatccagccggcgaatcgcgacgaagtgatccaggctcggcctgtcgccggccgcatcggttacacggctgaaacgcctgcgcctcgcggacggcatcgtgatggccgtcgagaactcgacgttccccgcgacgctgattcccgatccgcaggcgatcggcggttcgctgtacagctatctcgaaggcgcgcggcacgccgatcgtgcggcgcgctggcag

SEQ ID NO: 2251 - DNA, 310 bp, Zea mays
  Peptide Sequence Number=SeqID_8612
  Probeset Number=SeqID_16654
accccggatcctgtatagtcgacctgcagtttactctcgtaatcgttgtttccgtttagttttctcatcaaagtctgggaagaaatcatttcttgtgccgaccaaacgtttcaaatgccaggaactgaatgataaagatgtctttatggagtcacttatttgtagactggatgataactgtgaaaaactgttgatatgcaaactagacttggaatgcaagaaaacattgcattttgactctgaaatcagcatgtctcaactaatacgtccaataaaaggaaacagagggagtatttcaaatcattctgca

SEQ ID NO: 2252 - DNA, 255 bp, Zea mays
  Peptide Sequence Number=SeqID_8613
  Probeset Number=SeqID_16655
gccctgcccaacggaaccccccccgacacgcccaaccccacctactccggcatgaacggcgccgcgccccccacaccagagcccaccgcacgcgctgcacgcgcacaaccacccgacaacacgcccaccagcgcaagccgccccgacaccccccaacacccgagggcgcgcccggaggagcctagcgggaacccggacccccacacaggccagccgagaccctcgccgggagcgccgcgggggaacaggcattaa

SEQ ID NO: 2253 - DNA, 2150 bp, Zea mays
  Probeset Number=SeqID_16656
tgttgtttgcttgttttatagagatttatatttttggcgggggaatattcttcatgagtgttttcatttgtcgctttattctgtgtttagtccttcacatggctatgtagggaactgatgaaaattgactcccctggatgagcagcgtactttcttcctttcccacatatttgctccttcagctggagccagtatagtcactattttgtggctgtttttattctctcagatatatgcctttaaagatgtaagtgtatacatgcacatacatgatttgcttcttttcttcccccattattttcctttaatagtcccttgcagggctctgagtggatctttcctttaatagtcccttgcagggctctgagagtatctaacaaaaatgtcccaccagatccttgccatctgagctaaaggtgtagcactgaggtggggtaaccaatggcaccaggcaggtagcccgtaagatgggagaagacacttggatacggttgagttgtgagagctaatcacatctagtaggtctcaggttgactcacactgaatgaaatggtaggaagggagggacctgttctttggcaattccagagagtcaaaaagacaatacttcaggtgtggttaaatttttttgctgttcatctcccagcggcactcattcaaactcatttgaagacctctgagagtagctcctttctgaggccctggattctgactcagttggctacagttccttcagttacatattcttctgtactcggtagaaatcattttgggttttggagtgaatcttttgagttattgccatcattctagtaaatgacaacgtgggccccaaaactaatccaagaagaattggggtggcaagctctttgactcccaccaccttgcacatggcgggcgtgctggcccttccctccccagagctcttctgcgtggctgcctccgtccgctctcgcttctccactagctgaaccattcctgttcatttctccttgttgtcttcagcgcttgcgctgttagctgttatcttcaagtgtccttggaaatgtgagcccatgttgcctctttggctctctgtctttgcatgcatttcacacatccagacctgtgtgttaactttcagcattcttcagtgatattttacattgactgttcatccaccacatggtaaatgtcacgactccatatttatctgtcgcaaagaaaatgcatgtggaaaatccatccatccctctcttccctcccttctgagcttctgagcactgtttttttttgttctgaaatttataaccaatataatgctgaagatttgccatactgttatttgccatactgttatagaaacattgaacggtaggactcctagaaaatttgcaaagagacattattcaccatatcagactctcaggttctagtgatgaaaactttgcttatactttgctgttacttatacctgctgctgtacggaaaataaaagtttattcatgccacatttaactttgaccataaataaaagggagcatccttttggagttagtcatggtcatatttagtggtatttctcaacagttcttaatttgaaatacttcaaaggaagtaaaggtcagggcttagctgaatgaaatgctccagaacttgaagtgtagaaaacatcagtacagtaacatattcatgtgtataaagtgacaattacagcataattggaacatttgcattaatcaacaaactcacattgagacaaaactgaatcttacagctttcttgattaaagccaagtgttccatgttgctgtgaagaatagtctctcaaacactttgaaaagtagttacttcaaaacttgtgaaggtatcacatttttgtatttaaatacttacagagatctccaatttcttgaatctgagcttgtgggtagaattctaaatttgtatcataatcttgtcttttgtgaaagattttgaaaatagtatatatatatataatattatatatgcaaattgtgttttgtcacttgtaaagggaaaaggcttatttttctttatacttctgataccttgttttgcatatgaccagcactgactgaaaggcatgtgtacctgcaaacactgttgctttttttgtgaaataaaaataaaagtatttaaatataaaaa

SEQ ID NO: 2254 - DNA, 298 bp, Zea mays
  Peptide Sequence Number=SeqID_8614
  Probeset Number=SeqID_16657
ctatgcctggcagtaggcgtcgtgtctcctcaagcacgacggagagcggcccgatgggcctgttccatctgcctctggtgttggctcgtcggtcgtcgacggcggtggtgctgacgtcggcagctcgctccccgtccaggcacagcacgcgccgggccgtgaccggggtctctctccacaagcatggtggtcgtgctggtgcctggacggtggtgggtgcttgcctgctgcatagatgtccaaaacggatcacccggcgccgggcatggcgcaagagggtctccggctgcgcctgcag

SEQ ID NO: 2255 - DNA, 526 bp, Zea mays
  Probeset Number=SeqID_16658
agagctcgggggcaaccgtacgcggctcggcgccgggttgggcatcaccgggctgtttatggttgccgaggtcatcgcaggactggtgtccggttcgctggcgctgatggccgatgccggacatatgctcaccgacgccgacgagctgctgatggcgctgatggccgtgcagaacgcccggcgtagaccgaacgcgcgtgacacctttggcttactgcgccttaccacgctggcaacgtttgtgaacacgaacgcgctgctggagattaccgctcagatcgcctgggaagcactgagccgtatttaccaggctcggcccgttgaaggagaactgatgctcggcatcgccattgccggactgctggcgaatatgctgtcattctggctggagccttggggtagcgagaaagaggaatctgatcgtgcgtgccgccgcgctgcacgagctgggcgacctgctgggttcgtggggcgcaatcgcggcggtggtgaccagcatgctgaccggattgactcccatcgatcc

SEQ ID NO: 2256 - DNA, 206 bp, Zea mays
  Peptide Sequence Number=SeqID_8615
  Probeset Number=SeqID_16659
tcactggactgtgccgagctctcccttgagctctccctctccctcgagatctccattggtgcgtagtagcttattcatggtggcttggtgctgctttatccagctatcctcgcgattcgtggacaccgtcgccacctgcacggccagaggtttctcctcccaaatgctctccaccctcttcttcttcccctcccagtcccctcttc

SEQ ID NO: 2257 - DNA, 250 bp, Zea mays
  Probeset Number=SeqID_16660
ctgcagccggattattatgattttgtctttttcatgccacttgaaacattgcatcctgaaacctgctattgttacccacagagattctacgaacacggtggtgagtcccaagttgcagcagatgcacctctgcaaccatctatggatatattttctcttgggtatgcacattcatgttaattttcacttttgttcatgaccttagaaaccaggcaccacttttaaggtttagactaaagctgaatggtga

SEQ ID NO: 2258 - DNA, 444 bp, Zea mays
  Peptide Sequence Number=SeqID_8616
  Probeset Number=SeqID_16661
atggggagcttttctgccccggaaagcgctcgctgggccggggatcgcactgacgcctacgtgcactgcgcccgggtgaggcgcgcgggcagccggcagccggcccaagcggtcgccgtcgcctgcgctttcttgcaggacctgggcctctccgacgtgcaggtcgaggtgctcacggggtccatgaacctgttcatgctcgtgtccatcctcggcgccggatgggcggccgaccttctgggccgccgtggcacgctcgtgctcgccaatgcattcctcatggccggagcgctcgccatgtcggctggcggcagctacgccgcgctcgtggccgcgcgcttcgtcaccagcgtcggggtcgggttcgcccgcgtcgtcgcgccggtgtacaacgccgagatctcgccggcgtccacgcgcggcgtcctgtcgtctttgctagat

SEQ ID NO: 2259 - DNA, 591 bp, Zea mays
  Peptide Sequence Number=SeqID_8617
  Probeset Number=SeqID_16662
tgcagaacctgcggagtcgagtactgttgcattggccactgtcaacagtgatggccgatggacttaccatccttgataaggacaaaggactatgctatcacctgtagccggggaccggggacccaaatcaagatatgtggcatgtaccttataccttttacctaagggaagagggttttgcactaacactttcatttgcattgagggatacggattcagatccataccctctctccctttggaggaggtggatattcgaactgcttctgcttatacaaaaactgtccaggtcacggtcacggagtccaaagggatagggataacttgtacaggcgccctctacctttatgggcaagtactccaaaaccgagattgtgcttatacgattacaattacgcgtgatctgagtatgtacgccgacgccgtggtcttgcctataccgatgatgacgaaaactcacacccacatacactcttgcgatagagagaccgcttttgttcctgtgccgaatctatctctcaagcccaacccggaactgtgaaatgcatgggctttactcgaatgcgagcgtgggcactcaagcctggccct

SEQ ID NO: 2260 - DNA, 475 bp, Zea mays
  Peptide Sequence Number=SeqID_8618
  Probeset Number=SeqID_16663
accgtaaagctcacaatcgattgcatgggaggcgaccacggcccgtccgtgaccgttcccgcggcagtcaagttcgtccgcgcgcatcccgatgcgcacctgatgctcgtcggcatcgaaagcgcgatccgcgctcagctgaagaagctgaaagccctcgacgatcctgcgctgaccatcgtgcccgccaccgaagtcgtggcgatggacgaccctgtcgaagtcgcgctgcgcaagaagaaggattcttcgatgcgcgtcgcgctcaaccacgtgaaggaaggcgcggcgcaggcctgcatctccgccggcaacaccggcgcgctgatggccgtttcccgttacgtgctcaagacgctgcccggcatcgagcggcccgcgatcgcgttcgcgctgccgaacccgaccggctacaaaatgatgctggacctcggcgcgaacgtcgactgcgagccgcagcacctgctgcgggtcg

SEQ ID NO: 2261 - DNA, 468 bp, Zea mays
  Peptide Sequence Number=SeqID_8619
  Probeset Number=SeqID_16664
agtaaaaccattttttgtaaatacgtgttttgaccaatatggattcttggtaaatacattctttttgctggatttgtttctcgtggttttactctgctggtttagcctgacgaattttcagtaagttttgtactgattccctttttgttttttacaatgctgtggcaggaacttgatcatgtagttgaagagcttgaaaattttgcggtcgttcatctgctccagcgtagatcgatcatctcgctgatagggaatgtacaaagatcatcactgattcttgaaaaggcattcaatgttctacgacggaatggagttaatgtccagatgatctcgcaaggggcgtccaaggtgaacatttccttggttgtcaatgatagcgaggcaaaacagtgtgtacaagccctccattcggccttctttgagaacggcctcttgttgtcggaagtagctcgggagctgatgtttgcg

SEQ ID NO: 2262 - DNA, 399 bp, Zea mays
  Peptide Sequence Number=SeqID_8620
  Probeset Number=SeqID_16665
atgggcggcctgaaagcggtggaggagtatcgcgcggtggcggacgcctgtgcgcaccatgatttctggctggagccgaccggcggtatcgatctcagtaatttcgaagagattgtgcggattgctctggaggccggggtcagtaaagtcatcccgcacgtttacagctcaattattgatagcgccagcggcgacacgcgcattgacgatcgtttagctcaactcttcgcggcgctgcaaagcgaaacgctgccacaggatgagctggcgcggcgtttttccgtttcaacgcgcacggtgcgcaccgacatcaccgcgctcaatgcgctgctggaacagcacggcgctcagttcgtgctggcgcgcggcgcgggctatcagctaaaaatcgacgacgcg

SEQ ID NO: 2263 - DNA, 292 bp, Zea mays
  Peptide Sequence Number=SeqID_8621
  Probeset Number=SeqID_16666
cagttcccgattgcaaccacccttctgaagccggcgaaatcatgaaaaaaatcaattctttgctggcggcattcgccctcacggcggccagccacgcgctggcggatagccaggtaacggtacaccctgcgcacgatcagcgcagtttccagatcgatcatgccagcacgcttagcgaactggtaacgaacccggcgctgcacagctggtggccgggcacggtgattgccgaacgcggtgcgaccgccgtggcgcagcagcagcacgctcagctgctggcggatctgcgcgc

SEQ ID NO: 2264 - DNA, 323 bp, Zea mays
  Probeset Number=SeqID_16667
cgatttcagcggcttcacgccgcagccggtacagtggcgctttgaaccaggcacgcccaacgtggcgggtgtggtcggccttagtcaggcgctggactggctgacacagtgcgatacggaaaaagccgaacgctggagccagcagctggccagccttgccgaagagcaactcagcgctattactggcttccgcagtttccgatgcggcagcagccaagcctataggcgtttgatatgtccggtattcaccacagcgatatcgtatcgctgctggtggaacagggcatcgcgatgcgcgccggccagcactgtgcccactccgc

SEQ ID NO: 2265 - DNA, 346 bp, Zea mays
  Peptide Sequence Number=SeqID_8622
  Probeset Number=SeqID_16668
atggcgtgctccaaagcggagctgctcgccgcgctcctagccgtcgcaggagcgctctcctccgctgcggtgtgggaggactacgaccaccacatgtaccacaggtgctacaggtcctgcatgaggaagtgcgacgacgacgatgccgatgatgccttgaagaatagcatcagccccgttgccacctccgtgtccgatgatcacgatcacgaccacaaccatgacgaccaccacgatgatcatgaccacgaccacgaccatgacgaccaccacgatgatcacgaccacgaccacgactatgacgaccaccacgaccacgaccacgacgaccacaatgacaaccatg

SEQ ID NO: 2266 - DNA, 243 bp, Zea mays
  Peptide Sequence Number=SeqID_8623
  Probeset Number=SeqID_16669
acgcgccctggagcagcgcatcaagcgcagcagatgtggaggtcacgcgcagcagtgaccgacacactagccagcgcccaagcagacgctactagaccatacaacccttccaagatagccacaatcgcagggaatccccgacaagctcaaaaacagaggctgcataaacggatacgaccaaatgctatacacgaactcgaccccaaaaaacgcaatgaaggcgatggctcacgtagagggcca

SEQ ID NO: 2267 - DNA, 510 bp, Zea mays
  Probeset Number=SeqID_16670
cccggctgaataccgggccgacccacgcgtcgatcattctagccagtttttctctctgttcagcctcggatccatctctccaggcagtcaggcacggttctgtataagcaatgcactatacgtgctacttcctcggccaggactagctacaccaggcacgttgtatttggaattattgaacagcgtatttcttatgcaattcaacttatgagtttcttaacatcaatcacacggttcaactatagcttggctagacaaattatgaagaaaagtacgtagctgatctgtgtgatttatctgtcctgccaaatacagctactgtctagctatatatgcatgtttaccattgtttgcatctaacatatacagaggtcttgttaacaggccactttataagttagatagatggaaacggtactaaacttatgtccagatttgtaggataaataaatcaagcaaacctactatacttatcctcataatttgtctcgcacaagttgtagttgagcc

SEQ ID NO: 2268 - DNA, 239 bp, Zea mays
  Peptide Sequence Number=SeqID_8624
  Probeset Number=SeqID_16671
gtcgtgtgactggctccctggtgtgcgtccctcaagattcctgtcctccagtatttgtagtcagtgtgcgtgctggctcgtcctcaccggcttctttgcgatttgctgggagtcgcatggccctcccatccctttcagtagcctgttgggctcctcgtgctggccgcctggtggcccttctgtcctcgtggggcgtctcgtccgcgttctatccttctcgtcttggcggtctatccggc

SEQ ID NO: 2269 - DNA, 729 bp, Zea mays
  Probeset Number=SeqID_16672
atgaaagtaactctgcccgcgtttggcaagcccgctgtgctggctgtcgccgatgtgatgttacaccgctactggtacggccggaccagccggttctcaccggaagcccgggtgccggtggttacagtggataccattgaagagcgtccgggcggcgcggccaacgtgtcgatgaatatcgctgcactcggtgcgaactcgcgccttatcggcctgaccggtgcagatgacgctgcgcgcgtgctgcgcgaaacgctggcgcaggtaaaggttgagtgcgatttcgtcgccctcgatacccatccgaccatcaccaatctgcgcgtgctgtcgcgcaaccagcagctgattcgcctcgactttgaagagggctttgagcaggttgatccgcagccgattcacgatcgcctgcgtcagtcgctggcacaggcgggcgcgctggtgctgtctgattatgccaaaggcgcgctgagcagcgtgcaggccatgattcagctggcgcgtgcggcgcaggtgccggtactgatcgacccgaaaggccccgattttgaacgctatcgcggcgttacgctgctgacgcccaatctgtccgagttgtaagcggtggtcggcaagtgcaaaagcgaagaggaaattgtcagccgcggtaaacagctgaaaggtgattgcgctctctccgcgctgctggtgacgcgttcggagaacggtatgaccctgctgcaggtcgac

SEQ ID NO: 2270 - DNA, 608 bp, Zea mays
  Peptide Sequence Number=SeqID_8625
  Probeset Number=SeqID_16673
accccagaggatgccgttgtgccgattgaccccattggtcccggacgttcctctgttgataggcctataggaatatgtggaacttcaaagaggatgaatgaatcccaggccgtgcacaccatccttatgcatgcatcccacatggttggtgcatccggcgtatacggaggttgcctattcagagatacgcatggtcccttggaaacctatggtctgatcaagaaagccggtaaaaatgcgtacgctcatgagggctactaattagatcacagacaaagaaacttatcacacggaggctgttgacggctttattgaaacattaattataccacaaagctagcctcaacacctgttgaaacatacacttgttcttggccggttggcctgtcttaaggatctggtatactgctttaggaattacctcattcagcattgaaccgaactggaagcactgtcaaccaatcaggaaatgatagaccatgacgcgcgatcaatacctgcatctgaataataaaccgtgctaagattgaatggaggtaatgaacaaacgccttggttacaaactacatatagacctagatggtctcgatgtacgttacctgacagga

SEQ ID NO: 2271 - DNA, 259 bp, Zea mays
  Peptide Sequence Number=SeqID_8626
  Probeset Number=SeqID_16674
gtgctgagcccggagtcttgtggcaagctcaccttgcctgcgtttctttgacagcctggtcctcgagatggaaatacaatggtccagcgttttataaagaggaataagtcaaaatccacttaccatctctacctgtgccttagcaatgctgtgagcatgtccattgtgaatttggtgccattgcttaaacgacaccgtataaccacatgcaccgagtacactatatcacatggattctggcaccatctcaagatcaaaa

SEQ ID NO: 2272 - DNA, 377 bp, Zea mays
  Peptide Sequence Number=SeqID_8627
  Probeset Number=SeqID_16675
tgcagcagcagggccagacggtcaccacgccggtccaggttcagcgctataccggtcagatgctgaatgacatcagcaccggtctggataagatcgataccgccagccaggatgcggctgccggacgtgccagcggacagattgatgtccagagcggcgcggacgacaccggtctgccactgctggtgctgcgctcaccgtttaacgtcacctggcagcgtctgccggcggcgctgaagcgtatgggcatggaagttaccgatgacaaccgctcgcagggcagtctgaaagtgacctacaagcagccgggcagcagcgcgtttgacgccatcggcgcgaaagatccggaactgccaaacggcgactacaagttgcag

SEQ ID NO: 2273 - DNA, 363 bp, Zea mays
  Peptide Sequence Number=SeqID_8628
  Probeset Number=SeqID_16676
caggggtcggaaccgagagggcccggacttctcgtccggttcgcgtgggccaccagaactgccgcttgatctgtagctccaagggtttcaaggacggtggctggtgtgacgaaagcgtggagcacaaagtgtgctgctgctccctttagaaatataaatataatagcgtgtgttatgttcatgcatatatatatgcatcgtccatctacctctgtggtgcgggattctgaataaaacctggctttttcctgattgattaaaaaaaaaaaaaaaaaagaaaaaaaggaaaaaaagaaacaaaaaaaaaaaaaacaacaatcagaagaaatagagctaaatatagagggggctgactttaaaggg

SEQ ID NO: 2274 - DNA, 319 bp, Zea mays
  Peptide Sequence Number=SeqID_8629
  Probeset Number=SeqID_16677
atgttcgatgctcacaacagactggctgctggcgccacagggtcggggtctagacagatggtcgtgatgtcagtggtggagacgacacatgcaaagtctgcgctggaggtttcactggacccgtgggcgcaattctgcgctgctgtggacgggagcggagggatcgccaatgcctctacggctggcggcgtggcggcatctattgcacggcaactgcaggctgctgccttcaccgatcaggtggcgtttggggcgctggtggacatagcgacctcgcagctgcgctccaagagaaaatgtctggaggacaagattgaat

SEQ ID NO: 2275 - DNA, 354 bp, Zea mays
  Probeset Number=SeqID_16678
tgcaggcgatgcagaatgacaagggtgccgcggttgaggtggcgccgggagatggtcatcgcgtctggatcagcgtgccggagggggtcgatctggcctatgcgctgctgctgcgcaattttaccgacggtaacagcacttacgatccgcacggtaaaaatcgcatcatcagggaagcgataatgcaaaataaacccctcactttgctgattttgaatggaaaaggcgcaggcaatgaagagttgcgtgccgccgtgaataccctgcgcgacgaaggctttaacctggcggtgcgtgtgacctgggaaaaaggcgacggtgaccgctacgtgcaggaagcgctgcaggcatgca

SEQ ID NO: 2276 - DNA, 1076 bp, Zea mays
  misc_feature (1076)..(1076): n is a, c, g, or t
  Peptide Sequence Number=SeqID_8630
  Probeset Number=SeqID_16679
cggacccaccccctccccctccgaagaagccctaggcatgccccgcagccgatgaggtcgctccgccgggtcctcatcccgctcgtcctcctcgcaggactcgtcttccgcgtggacgacggcggcggcgcgttcctcccgcccccgccccccgcgctccccgctcccccgccccgcctcgcacttaacggagaagcggctccggaggatgatggggcggcggtttcccgctccacggagatcgtcgcggcggaggcgcgctccaccgagttcgtcgccccagcgaggcccaagaagcagagcttccgggagctccttgtccggccgcagcctgcgcgccacgagccggctagtttggttaccgacgaggcgaaagccgaatccagctctgtgcttcagttttgggataatggcacaattcagcttgtggacaaactgtcgcaatctcctctgtgggagatcaccacagggcctccactatcagaccagattaataccgctgagcacagtattccagctgtgttaaatgaattggaaggaccagggattgaaggaacaccatccaagctaaatgcccctaatgtaattgtcttgaaagaaggtaccccttttatttccatccatggttctgatgccctggaaccagttcaaaccccaaggaagctaccaaacactgctgggaagtcagatatcgtattggatgattctcaaaatcaaacgcaatttgtgattcagcttattaagccattcacgcgcgacaagaaatcggtggacattagaggcaggtcagagggatctcctaaaagaagaaaaacacggaagaaggatggacttgtcaatagccctgagaccttgacagcatctgacaaggagtgcagtgaaactggtgggtcaactgaggcaccaatggaaaattctgcactaaaagatgcccttggtggtcgtcacattgagtctgtttctaacaatgaggccagtttcagcatcaagtcaaagatttcaaatgttaagggaatggatgtggaattgtggacacatgatgggcttccttcagcacaactcctgaagctgatgan

SEQ ID NO: 2277 - DNA, 317 bp, Zea mays
  Peptide Sequence Number=SeqID_8631
  Probeset Number=SeqID_16680
ataaattaaagcgcgagcgttggctagggaaccggaccaagctggagaaacgcgtggccatggataggggcttcagcaggtcgcgcgaggaagaagtcaagggcaaggccaagcagaggaagccggccatggagatgggcgcgggcgagctctgggacagggaggaagagcgcgcgaccagaggggcggctggaagaaatgggaggccactgcgtgtagggagaaatcgtggaggagcagggaggattgccgacgaacagaagctggaagaagcgccgcggaggatagagataaggaggagcggctcaagaagataa

SEQ ID NO: 2278 - DNA, 343 bp, Zea mays
  Probeset Number=SeqID_16681
acagccggggcaacagcgccggcggcgacaaggaccgacggcggggcaggacagggcgaccgccgacccgcgcgcggagggcgccacgggcgagcgccgcgacaggaccaacaccaagatcgggcacaacaacaacgaatggcgcaggcagccgggcaacaaggggagcgcgagcacgcactacgggacgcccgagggcacgcggcggaacatgcccagcgggagcggccggcggaagaacaagcgcaccgacacgggcagcgagcgcgggaggaacggcgccacatggagcagggcggactcgacggcgcagaggcgcccgcccccggccacgacgacgggg

SEQ ID NO: 2279 - DNA, 240 bp, Zea mays
  Peptide Sequence Number=SeqID_8632
  Probeset Number=SeqID_16682
caaaagaacaacagagcaggagggagggcgtccagcaagcagaggagggcgtccagcaagcagcagcagcaaacagaggagggcggcgctcagagcagcagcaaggggagggtggcggcgctcagagcagcagcaaggggagggcggcggcgctcacagcagcagcaaccagcagagggcggcgacgctcagagcagcagcagcaagcagaggagggcggcggcgctcaactccagctag

SEQ ID NO: 2280 - DNA, 472 bp, Zea mays
  Probeset Number=SeqID_16683
agtggcactccatggtgagcacgccggccctgcgccggtagacggccgccgcctcctggatctggcagaagcggggcaacacatggaccagtggctccacgtcatcagggaagctgccggccaggtaccgctgggcgaactcgaccgcgtagctcatctccggcaccaccagcgccggccggccggtccgccggacccaggtgacaatgccgcggcgcagcacctcgaggtcaccgtcgcggtagcccgcactgtaggcggccttgcgcaggtcgtcgaccttcggctcgtaaccgcggatctcgtggtacggcgtgtaacgcaaccggggaacggcacagaggaactggccctcgacgaggccgtactcctccagcaccgaggcaccgtcggcatcgtcgtagaagtcgcacagcacggtcgcatccgggccgaaggcgactgtctcgcagcggattccctgggcctgcag

SEQ ID NO: 2281 - DNA, 321 bp, Zea mays
  Peptide Sequence Number=SeqID_8633
  Probeset Number=SeqID_16684
ctgcgactggggcccggggcgtccgcaactaacgcccacgtccgcagaagggtaacagcggctcatgccctatacaccccaacagtagacacagtgccgcagagtgtagagagatcatcgacctcgcaaaacacgtcagtgttcggcgagagcagtcttccggtgatggctcccacctcgtcgcagacctggtaaggaaagggtcgaccacgaagaggagctattatagcacaaggacgaggactccatcggcgagctcagatgtcaagcggcaacccgaaatgcactatggagcctggcgcccataccctgcggccaaca

SEQ ID NO: 2282 - DNA, 354 bp, Zea mays
  Peptide Sequence Number=SeqID_8634
  Probeset Number=SeqID_16685
atggctctcggaaccgacggcgcagcaaacttgtgcggccctcaccattccctgttttcgctgctcaagaaggactgtccgaatctgcatctcgtcaagtgcatttgccatggcctggacaagtgctccagcaaggccagcgctgcactacccggtaccctcgaggcgctgctcagggactcgagaaattggtttcggaacagtgcatgccgaaagtatgagtaccaacaagagtatcaagctcttactcagtatggcgctgacccccctaaactagtcaaaataggggacacgcggtggctatcgtggcacagcgcggtgcgggcgcacacggagcagtatgactggatctag

SEQ ID NO: 2283 - DNA, 342 bp, Zea mays
  Probeset Number=SeqID_16686
cttgtagagtcgtgctccatccggcgccgcacactttgtgcacgcacgcgacgccgccacactccagaccaccggccgccacgcactcccgtctgtcgtgccccgtcctcccgtggctcatcctcacgtccgccgcaccaccaggccagggcccaggctgccgccgctctaggtccaggtcgtcctcccgtccgcctgcccatcggcccgtccccccgtcctccaggccgccgctgcaccgccgctctagcagtccagcatccgccacgttgggtcactggtgctctggaggacggccagcagtgtctgcatctctgctgctctgcatctgttgagtgttga

SEQ ID NO: 2284 - DNA, 604 bp, Zea mays
  Peptide Sequence Number=SeqID_8635
  Probeset Number=SeqID_16687
tccgccgcggcgaggaggagctcggcctcggcgcgccagctcggcgccagtctctgggagatccacgacgtggcgcgggaggtacgccggagcaggcgacggggtgggagggccatcgccgccggtcgggagcacggcggcggcggagaactggaccagccacagagttcaggtggcattcgtaggcatgttgcagactcgtcgatgaaacatcataagttcgatcaagaaagaagccatagaatacaacctttttctcctgcaagttatacaagctcagttggggattccaatgtgaatctaactagaagtccgactcgttctttgggcatcatgggtagatctatgggggaaggctatagccttaaaacatcaacagaactattgaaggttctaaatcgaatttggagtcttgaagaacagcacactgctaacttgtcagtggttaatggattgaaactggagttacagcaggctcagacacatattcaagaactcctgcaagagagacggcagtacagacacgaagtttcatcactgatgcgacaactctctgaaaacaaacttgttagaaaaaacaaggatcacatgaaggttgacacag

SEQ ID NO: 2285 - DNA, 367 bp, Zea mays
  Peptide Sequence Number=SeqID_8636
  Probeset Number=SeqID_16688
tgcagttgcaggaggaacaacatatttgttattccatgctgttggatatatctggcagacctcaaactgttttctgacagcatcatattcgcttacattgcgtcatgtaatggatggtgctaagcaagccaccaagcctaggaatttgaatgagctttcgatggtattgctgaataatgtttttttttcgctgccatcgggaattattcttgtgcttggtttgaatgaagtggagtaccttttggagacgtaagctattaattcaaccttcacaatttttttttctatcataaacctgtgagactcgtcatttattcttatctgcccttcctggtttgtgaaccatttttaggcatgtaagcatgac

SEQ ID NO: 2286 - DNA, 359 bp, Zea mays
  Peptide Sequence Number=SeqID_8637
  Probeset Number=SeqID_16689
ctgacatctgcagaatgcaaccacacatcagaactgatctggcaaatcttgcagcataagaaaagagtatagaattcttcaacagcactgaacagatgaactgctgctgtgcactttgcacggcagcacactcccgcgcaaacgtctagggcatctagggactagggttgcgctaggggcgctgtctgcagccagggaactgctgcaccaccctcctagctctacggcctcaccggaggccatgaagcagtggcgtgacgatgtcgaccgcctactcggcatggcacactctggctcaatcaggcctagacgtcggtcatcccggcgtcaacacgaggagcgaaccgccgcccgcggta

SEQ ID NO: 2287 - DNA, 228 bp, Zea mays
  Peptide Sequence Number=SeqID_8638
  Probeset Number=SeqID_16690
ctatttctgttcctgctcgcgatgtaaatctcctgcgcgcttctcttcttcctctggctgcgcgcacttcctcccctgcgcgcccttccctgtgctcgatctccttctgctctgcccagccatggcgtccgtttcctcccctccgctgtctccctcctcaagcgcgcgcccctgcttcccggcttcgagctcgcccacctcgtccatggccgtcgtgccgagttcacc

SEQ ID NO: 2288 - DNA, 216 bp, Zea mays
  Probeset Number=SeqID_16691
acgcgccctgtgacagctcatctaacacaccgggtgtggtggttacacgcaacgtgacccatacactggccaacaccctaacacccgctactttctatgacctacattcctttatagacacggctgccagctatgccgctgaagctctaaatggctagctcccttgatgcccaacgacaacatgctgcacggcaccctgacccctaaaaactagac

SEQ ID NO: 2289 - DNA, 326 bp, Zea mays
  Peptide Sequence Number=SeqID_8639
  Probeset Number=SeqID_16692
atggccacccaccgcccgggcgccgcggaggaacgggccgcgaccaggcaaccaaacacgccggcgaacagggacccagcaccacacgcaagaccgccgaaaagccaaaggcggacgcaaacggcaagacaaaggtacggagacgagaggggcccgaaccagggcccgcagaaccgaaggcccgcgagctacccgaccggcgagcagcccggcgactaccggcgggacaccggggcacacggggccgaccaccaaacacccaacgagacccggcagcagaacgcaaggcactgccagcgggccacgcgaacagggcaccggcacgt

SEQ ID NO: 2290 - DNA, 1208 bp, Zea mays
  Probeset Number=SeqID_16693
gtgtcgatgcaatttattaatagctggcagcagacgttgccgggattctacaccgcgctggacccaacgccgcttgccggcgggcggctgtgttatcacaatgccgcgttggcacaggagatgggcctggatgccgcgctgtttgctggcaaaggccacggcgtgtggtatggcgcagcgttacttcccggcatgtcgccgctggcgcaggtctacagcgggcaccagtttggcgtgtgggccggtcaattgggcgacggacgcggtctgctgctgggcgaacagcaactggccgacggccgcaaacttgactggcatctgaaaggcgcgggcctgaccccctattcacgcatgggcgatggccgcgcggtgatccgctccagcgtgcgcgagtttctcgcctcggaagcgctgcaccatcttggcatcccgaccacgcgcgcgctggcgctggccattggcgacgaaccggtccagcgtgaaacccgcgagcgcggcgcgatgctgatgcgcatcgccgacagccatctgcgctttggtcacttcgagcatttctattacggcggcgagcccgagaaagtgcgccagctggcggactacgcgattcatcatcactggccgcagctggagcaggaggccgatcgctacctgttgtggtttaccgatatcgtcaaacgcaccgccagcctgattgcccagtggcagagcgtcggcttcgcgcatggcgtgatgaacaccgataatatgtcgatcctcggcctgacgctcgattacgggccttacggtttccttgatgactacgatgcggatttcatctgtaatcacagcgattatcaggggcgctacgccttcagcaaccagccgatgatcggcttgtggaatctcaaccgcctggcgcatgcgctgtccggtttgctgagcactgagcagttgaaacaggcgctcagccattacgagaacgagctgatgcgggtgtggggcgaaaaaatgcgcgcgaagctcgggttgctgaccgccgatgcgggggataacgccatcctcactgacctgctggcgctgatgaccgcagagcacagcgattacaccctgacgttccgcctgctgagcgagacgcagcaggcagagacgcgttcaccgctgcgcgatgagtttatcgaccgtgacgcctttgaccgctggtatcacggctatcgtcagcgcctgctgca

SEQ ID NO: 2291 - DNA, 427 bp, Zea mays
  Peptide Sequence Number=SeqID_8640
  Probeset Number=SeqID_16694
atgacccgcctggtcgccaggacaccgccggactcttaccctctctgtatatttgttatggtcctttatttagttaaaagctctaggtatctttactactgtccccgtccccatggagaggagcgagaggagcaggagggcgaggcaggacaacaagtggcgctctcgacggggacgaagtcggcatgtacacgcaggagctgctggacacggacgacgctgatgacgccccggactcagcggctcaacgggatagacttcctagagcggctgcacggcaagcggatgctgctcatgggcgactcgatgaactggaaccagtttgagtccatgctctgtgcgaggctttaccgaacaaggccagatgttcgagatgcacgagcacaggatcagcaagggccaaggcttcttcatcttcgagttcacg

SEQ ID NO: 2292 - DNA, 384 bp, Zea mays
  Peptide Sequence Number=SeqID_8641
  Probeset Number=SeqID_16695
catgatggatacgctgatgggctgcctgattgccttggcgggcatgatctggctatggccgcataggcagagcgggctgctgcgcaataacgcgcacgacgcgctgtaggcgtatcaggaggcgctgcgcctgctgctcggtccggagcaggcgccggagaagctggcgtatcagcgcgtcaaggttaaccaggcgctcaacgcgctgtttaactcgctcaaccaggcgtctaccgaaccgggctttaacttccagtatctgcaacatatgcgcctgtgggtgactcacagccagtctattgtccagcacatgatcgccatgaccattctggcgcgcgagcactccatgctgacgccaaatctggcagagcggtatctgcaggg

SEQ ID NO: 2293 - DNA, 690 bp, Zea mays
  Peptide Sequence Number=SeqID_8642
  Probeset Number=SeqID_16696
atgcacggcggagagtggaaggatggagttgacgaaagcaacggcgcgtctggccgagacgtgggcgtatgcgacgctggcggcaatccgcgcgcgcgcgcccatcctgttcctgtccgcgaccgcgaggcgcgagccctgaccatgacgctgcccacgcccgcgcacgtgggagctgggacccgcacgagggagggccaaacagtgtctgggaaggaaggaaggaacggggacacggaccacggttgcgatagacgtgtacgtgtccctcccatagggagaagaatagatcgatgtcgcctttgcctttgccctttgcccatcatattcatcagcgactgcatgctttgggcttgggcttgggcttcgcgggttggtgaaacggaacaaataaaaggaaggcatggcctggagggcagcacaacaagcgataaaaaggacgtacggtggcacacacgtcaccacgtcatgatggcaaaagcacggtgcggtggcgcgctgcctggtgtggagtacggcgaggatgctccgggccgggcgaccgatcgatcgatctatcgagaagaagagatggaaactgcatctgtgcatgcatgtggagcaaaggaaggtacgtacggagttggtgccccaaccaaccaccaccaacaggcaacagtactcgaggtccaagtccaaccatccaggggt

SEQ ID NO: 2294 - DNA, 440 bp, Zea mays
  Probeset Number=SeqID_16697
tgcaggcgttctggctgactaaccttggcctcaaccagcaggcgctcaacgcctgtgagccaatcacgcacgtgtttattgagccgttctggcagtttttcatcgttattggcggctccggttccaccatggggctggtgctgctctacctgcgcagccgctcggcgcatctgcgctcgattggcaagctgagcattgtgcccagcatgttcaacatcaacgagccggtcatcttcggttcgccggtggtgatgaatccgattctgttcattccgtttatctgcgcgccgttagtcaacgccacgctcgcctggacagccaccaaaacccacctgattaaccacgtggtgtcgctggccccctggaccacgccggcaccgatcggagcggcctggtcgaccggctgggactggcgcgtcatcgtgctgattgccgtgctg

SEQ ID NO: 2295 - DNA, 274 bp, Zea mays
  Peptide Sequence Number=SeqID_8643
  Probeset Number=SeqID_16698
ggatccccctgttcaagaacttgtctcattctgcctgcatgctgaatgccaaatgcgatttgaaaatcgaggactttgggttcgcaaggaccacgactcaaactgacttcatgatagactaagtcgtgttgtacagagcacatcaattcgagctcaactcctcagagtatacccaggctattgatatgtgatcggtaggctgcatctttggtgaaatggtcataagagagccctccttttctgggaagaattatgttaatcaggggtaccgagc

SEQ ID NO: 2296 - DNA, 258 bp, Zea mays
  Peptide Sequence Number=SeqID_8644
  Probeset Number=SeqID_16699
accatcaatacagcgcccttgcatcaactcccacaaaaagctctgctcggcgcgcgtacggcggcgctgtcgattgtgccatactccagcggcacggctaaagcgctcgtccgggtgattccggaactggaaggccgattaaccggttattcgctgcgcgtgccggtcccggtggtctaaaaagtggatctgacggtgacactgaaacgccacgtgacggccgaagaggtgaatgacgcctttaaacccactgctgct

SEQ ID NO: 2297 - DNA, 749 bp, Zea mays
  Peptide Sequence Number=SeqID_8645
  Probeset Number=SeqID_16700
tccggatagcagcagcacccataacaggcatgtggtgaagtcttatttgcatcactgcacttgtgaggaatggcagcaaacagttaaaccttgtcaacatgctcttgctttgatcacagcacaacaaacagtagatgtaaacatggaagactttgtgcatgaatattattctgttgagaggtttaggaaagcatactcaagattgattgagccacttcctgacagaacacaatggcctgaagtggacttgccatttgttgttggagcaccactggacaaaaggcttgctggtagacagagaaaacttaggatcaaaagttgtttggagggtggaggtggtggaaaacccaaaaaagatgcaaaggtggctgctgtagaagctgaatgggggacaaagaaacaaatgatccgaggaaaaagaaagtgcaaaagatgtggagagctagggcacggagaaacaagctacaagtgttcgctaaatggaacaaaaaagaggaagaggaaaccacgaaagaataccactaagtatggagagaatgccaaactaccaacaaaaaggagaggccaaaatgtggaagagacaaatgctgctgtagaccaaactgcgcaagagacagctaatgcataccaagatgtgcaagagacaaatgctatcatatcaagtcctatcagaccaaatagagaaacaatattacaggatagccctgttagattgactagaaggccagcactattttgtgaagttatct

SEQ ID NO: 2298 - DNA, 331 bp, Zea mays
  Peptide Sequence Number=SeqID_8646
  Probeset Number=SeqID_16701
gccatggggggagggacaccaagagcccattcccaaacagaaacacacgagaaatctagagcaacacggaagtggtaggaaccgcgttgggactatggacaccagcccagccccaataccagaaaacacagaaacacaggcatataatacactgatatggaaacccactaaaaaggattaaaagatctggcccaccagactagaatatcgattgagagccccgcttggaccctgtggagatatgagacagacatacacaagcacgaagccccacacagatggaggaccattctcttatacataagacaatcacacatacttatatgtctat

SEQ ID NO: 2299 - DNA, 515 bp, Zea mays
  Peptide Sequence Number=SeqID_8647
  Probeset Number=SeqID_16702
atggcggcggtcgcggatgtcattccgcccgccgatcgcggccggtaccagggcctgtttggcggcgtgtttggtctggcgacggtgattgggccgctgctgggcggttttatcgtgcagcacatgtcctggcgctggattttctacattaacctgccgctcggcctgctggcgctgctgatcattaatgcagtgtttaaagcggatagccgacgcaaaccccatgaaatcgattatccgggggcggtgtttctcagcctggcactggtgggcgtgacgctgtttaccagtgaaggcggcacgctgcgcgaatggtcagatccccagctatggtgcattctggccatggggctggttggcgtgttggggtttgtctatgaggagcgacgcgcgtgggaaccgatcattccgctcgatctgttccgtaatcgcagtttttcccttgccagtctgatggcatttattatcggcatggcgctgtttggcagcgtgacgtttttgccgctttatctgca

SEQ ID NO: 2300 - DNA, 342 bp, Zea mays
  Peptide Sequence Number=SeqID_8648
  Probeset Number=SeqID_16703
agaacctgttgctcgatgttgctggaaacctcaagatttcagatttcgggttaagcgctttgtcggaccaagtgaagaatgatggattgctgcatactacatgtggaacacctaactatgttgctccagaggtcattgatgacaaaggctacgatggtgcccttgctgatctttggtcttgtggtgtgatccttttcgtgatgctcgcaggatgtctgcctttcgaggatgacaacatggcttccctttacaaaaaggcatatacatgaaacaactatttcttctttgaccccccccccccccccccaaaaaaaaaaactaacaatttaggatacattttcc

SEQ ID NO: 2301 - DNA, 703 bp, Zea mays
  Peptide Sequence Number=SeqID_8649
  Probeset Number=SeqID_16704
aaaaaaaaaaaaaaaaaaaaaaaaaaaaaaaaaaccagggtatcggggtcctggaacaaggcccgtcctgcccgccgccgccgccgccgccgcttgaaaggccgttcccaccaacggggggcccgcttccgcaaccagaccggcggcttcggggggggccctaaaaaccgggacccggaccttggcaagggccacccagcccacctttttgaccctattttgggtggaaaccttttgaaccttaaggggtttcctgacccggcccggcaaaacggtggtggcctggacaagggccagaactccaaaaaaattccgaagaaccttaacattaaaaatggattcattccttgggggggaaaagaaaacccgaaggaaaacccaggggcccttcaagaaggggggggcggatccaatggagcccaaagttccggggggccaccaccaaggccaccttaaggtggcccaaagggtggaaggattttgggaagcaatttggttggcaatggcttggggtaaaactaagggggcaaagggccggtttttacctattaccctggaaggcctttggttggtggccttaaaaggttaagcccctttggctttatacccaatcaatccctgggggtgaattggggggatcccttgggaatcctaagggaaaatattttcaatggtggggggaaaaaaaaaaaaaaaagggggc

SEQ ID NO: 2302 - DNA, 527 bp, Zea mays
  Probeset Number=SeqID_16705
tgcagcatttcgccgcgcagtttcatatcaatatctccaccagcgcactggcggcacgactcgatcccaatgtgattatgaatatggccaccacgctgctggcgcagttctccggtgccatgaccaatgtggtgctgttgattctgaccgtggtgttcatgctgtttgaggtgcaccatctgccgtacaaattgcgcaatgcgatgatgaatccgcagatccgcatcgccggattgcacaaagcgctgaagggcgtcacgcactacctggcactgaaaacgctggtcagcctgattaccgggctggcggtgtggctggtgctgatgctgctggacgtcaaatttgcgctgttctggggcgttgtcgcctttatcctcaattttatccccaatatcggtccgattatcgccggtagtgccgccgtttattcaggcactggtgctgaatgatgtgtatgacgccgtgctggtggcggcgctgttcagtgccattcacatggtgtttgacaatatgctggaaccgcgcct

SEQ ID NO: 2303 - DNA, 476 bp, Zea mays
  Peptide Sequence Number=SeqID_8650
  Probeset Number=SeqID_16706
catggaacacactactgattacacaattctgcaatttatgtaaccaaattgctgtttaacaatctattttgtttttgctcctgaggtagcaatattatcaaagcatagtaaatgcatgaatctcaatcatattctgcaactttgactttgatagacaaaaaagcaaaaagataataaccaacaatcatgaaatccgtagaatgtagagtagaaatggaaactgcacgcagtgttagttggcattagtagagatgaagacaaaatggagtacttctatttgctttatgaaataaaatcaagttatgtgtacatatgtaccttactgaaagaaaattgtggaagacagcagttggcaaaaacccactgcgttcacatcaggccaacggaaacgaacttacgttctcaagggctgatgtgtgtgattgtatctgtgaatttaatctctcaaatgttgtccgcgagttcatgtcgatttc

SEQ ID NO: 2304 - DNA, 345 bp, Zea mays
  Probeset Number=SeqID_16707
ctcgtttcctgcgatgggtcggatcggactgttggtgtcggggagtcagcgtccgaccgatggatccgcgccgcgtgcgcgggctacataggaggttcgccagtgcctccgccctctcgaggagtcgagggcgaccacttcccagttcccacttccgttccaccaccaccacggacgtacgacgcgctgcagcccgcccggcccagcgttgcagcgacgacgacgccctgctgcggcctgcggtcccggccatccgtccgtcggtatgcgccagcgccacacgcacctaagcacagcaacgtcgtcagtccgatccgtcctgcggcggtctccgggccggcctaa

SEQ ID NO: 2305 - DNA, 431 bp, Zea mays
  Peptide Sequence Number=SeqID_8651
  Probeset Number=SeqID_16708
tgcaggcggcgattgtgcgcgcccgcgccgacgaatttatcccgctgctctccgatccgcagggccgtaccgggctggatgcgcacgtcggcgagcgcggcgtcaaactctctggcggccagcgccagcgtattgccatcgcccgcgtgctgctgaaagatgcgccggttctgatcatggatgaagccacatcggcactggactcggaagtggaagcggcgattcaggagagcctggagacgctgatgcagggcaaaacggtgatcgccatcgcccatcgcctgtcgaccatcgcgaaaatggaccggctggtggtgctggaaaatggcggcattgttgagatgggtaaccatcgcgaactgctggcgcacggcgggctgtacgcgcgcctgtggcagcatcagaccggcggatttgtcggcgtcgattaa

SEQ ID NO: 2306 - DNA, 618 bp, Zea mays
  Peptide Sequence Number=SeqID_8652
  Probeset Number=SeqID_16709
atcgccttgggcgacacgatgctgcaccgcaccgcggtgacgaactggatcaccgcggccgcccgtgtccagcagttgctggcccgcagggccgccctggtcggggcggccctgaccaggcgggtggcggccggggagatcgtctcggtgtccaccggtgacgtcgagaagatcggctggctggtcgagtccgtgtcccggttcaccgcggcggcggtgaccgtcgtcgcggtgtgcgtggccctcctcgtctaccagccggcgctcggggtgatcgtcgcgctcggcgtgcccgtgctggcgctcgccgtgctgccgctgctgccgcgcgccacccggcgcgccgacgttcagcgcgagaaggcgggtcgcgccaccgagctggcctccgacaccgtcgccgggttgcgggtgctgcgcggcatcggcggtgaggcgctcttcctggaccgctaccgcaaggcctcccaggaagtgcgcagggcggcggtccacaacgcccgcatgtggtcgctgatctccgccattcaggtgctgctgcccggtctgctgctcatcggggtggtctggcggggcgtggtcctggcacgggaggggcggatcgacgtcggcgagctg

SEQ ID NO: 2307 - DNA, 325 bp, Zea mays
  Peptide Sequence Number=SeqID_8653
  Probeset Number=SeqID_16710
gaaggcgtgaagggcttgaacggcggcgtcgtggccgacggcgcgtccggtgggttgacgcagaacggcgagttgatgtcgctcgcggcttcctcatcgccggcggtcggaatgcggcgcgctggctccaccgtccggatgaagttgagcttgtacagcgcgttgagcagcgggctgctgctgctcagtcgcctcgccgtcgccgccatggccctcgcttcgcaccgagtggcgcaaagcaggagcagcaggagcgacgccaccgcgagcccggcactgacgagaggcgctctgtccttgggcgccatggctgtgcggctgtgca

SEQ ID NO: 2308 - DNA, 277 bp, Zea mays
  Peptide Sequence Number=SeqID_8654
  Probeset Number=SeqID_16711
gcaaactgcgcgaacgcatggagtgctaagcagggctatcctcatgagtaaacctgccggcatccagacaatgaactgaccggagttctacaacgtctcgactaggaaaaccctgacgttacccaactcaatcaacttgcagacatcacactttcatcagctggtgaaagagcgcttatgctcataccgatcgtacttactgacccctgctcatactgaatggccaatggctcatgaagcgatatcttcttcttacgcatatgcgcggtatcctaca

SEQ ID NO: 2309 - DNA, 409 bp, Zea mays
  Probeset Number=SeqID_16712
atgcaggagcgcagatccgcaagctggaggagcacagatccgatcgagctggaagaggggatcctggctggaggagcgcagacctgggtgcagatccggcgcaggctcccagagctggagcaggtgcagcactggagagggcgcgaccaggctggaagagcgcagatccggcgcgggggcacagacaccatggtggcggcccgacatcgtggacggtgcaggaggtccgcagcggcccgacggcgcgcggcccaacggcgcggaagatccgcggtggcccgacggtgcgttggcgcaggagaagagggctacgacggcggcagggaagagagccgcgagggcggacggcacgacggtggcaaggaaaggccgcgacgacgcggcaggggaaggccgcgacggcggctag

SEQ ID NO: 2310 - DNA, 355 bp, Zea mays
  Peptide Sequence Number=SeqID_8655
  Probeset Number=SeqID_16713
atgcgtaacttagtgaaatatgcgggcatcggcctgctggtgttaggcctggcggcgtgtgatcagaagaaagacgacacggcggcaaacagcaacggcaccagcgccagtcagtcagcacagacagtaaacctgatggacggtaagctgagtttcagcctgccagcaggcatgtcggataagagcggcaagctgggttcggaatccaccaatatgcacgtgtatgccgatgaaaccggccagcgcgcaattatcgtgattgcgggcgatccgaccagtgaaggactggatgcgctggctcagcgtctggagcagcagcagcgcaaccgcgaaccgcagctgcaggcatgcaagc

SEQ ID NO: 2311 - DNA, 954 bp, Zea mays
  misc_feature (513)..(513): n is a, c, g, or t
  Peptide Sequence Number=SeqID_8656
  Probeset Number=SeqID_16714
atcgcagccacgcggactcgaattgtgcgagacctagccccaagaaacggaaagatacccagtgggatcacgaatccacgcccagagatgatggcggacgccgggatcagcggccgccacctgacgcggctccgcacgctcggccgcggcgcgtcgggcgccgtcgtgtcgctgttcgcggcgggcgagggcgagctcgtggccgtcaagtcggccggcggcgcggcggcggcggcgcagctgcggcgcgagggcgggatcatggcctcgctcagctccccgcacgtgctcccctgcctgggcttccgcgccgccgcgggaggggagttccagctgctcctcgagttcgcgcccggcggctcgctggtcgacgcggtgggccggaacgggggccgcctggaggagcccgccgtgcgggcgtacgcggcggacgtggcccgggggatcgcctacctccacggggaggagggcgtggtgcacggcgacgtcaaggcgaggaacgtggtgatcggngccgacggccgcgccatgctcgcggacttcgggtgcgcgaggagggcggggtccgggggcccgatcggcggcaccccggcgttcatggcgcccgaggtggcgcgcggggaggaccagggccccgccgccgacgtctgggcgctggggtgcaccgtcatcgagatggccaccgggcgcgccccgtggacgcacgtggacgacgtgcccgccgcggtgcgcctgatcgggtacacggacgtcgtgtcggaggcgccggagtggctgtcggccgagaccaaggagagccgccgccacaggaacgagggagagccgccgccacagccgagaaggcgctgccctaaccataaatcgtgccaggctggcccgagcacggcccatgatggcgtgccgggctacttgggccgtcgggccgccagccgaagcacggcacagcccgtctaa

SEQ ID NO: 2312 - DNA, 514 bp, Zea mays
  Peptide Sequence Number=SeqID_8657
  Probeset Number=SeqID_16715
caagcacgtcgggatgctggccggcgcgcgggcgatcggcgccgcgatcgccgactaccatctgccggatcatccgatgcaggtgcgcgtgaagcacgtggtcgccgatgcctgcgggctgcgcgacgacgaagtcgactgggcgatcgacggctgcaacctgccgacgccggcgttctcgctggatcgcctcgcgcgcctgtatgcctcgctcgccgacggcgcggatgcggtcgacgcccgcggcgccgacacggcgagcgcgcgcgtgcgcgcgctggcgcgcatccatcacgcgatgacggcccatccggagctggtcgccggagaaggccgctactgcacggtgctgatggacgcgttcgacgggcaggtcgtcggcaagctcggcgcggatgcgtgctacgggatcggcgtgcgcacgtccgcgcgcacgcgcgcactcggcgccgacggcgcgctcggcatctcggtgaagatcggcgacggcaacatcgacgtgctgtacatgatg

SEQ ID NO: 2313 - DNA, 564 bp, Zea mays
  Peptide Sequence Number=SeqID_8658
  Probeset Number=SeqID_16716
ccgagctcggccggcgtgacgatgtgcaagacgctgaacgtgctcgaaggatatgacctgcgcaagatgggctaccagtccgcgtcggtggtccattacatgaccgaggagatgcgccacgcgtacgaagaccgcaacacgctgctcggcgacccgaacttcatcgacaacccggtcgtgaagctgacgagcaagcaatatgcggccgagatccgcaagcagatcagcggcgacacggcgacggcatcggtccacgtgcagccgggcgtcggcgtgcacgaaaagccggagacgacgcactattcgatcgtcgaccgcgacggcaacgcggtgtcgacgacctacacggtcaacggccgcttcggcgccgtggtgatcgcaccgggcacgggcttcttcctgaacgacgagatggacgacttcaccgtgaaggtcggcgcgcagaacctgttcggtctcgtgcagggcacgcgcaactcgatcgcgccggacaagcgtccactgtcgtcgatggcgccgacgatcgtgaagaaggacggcaaggtggtcatggtggtcggctag

SEQ ID NO: 2314 - DNA, 657 bp, Zea mays
  misc_feature (601)..(657): n is a, c, g, or t
  Peptide Sequence Number=SeqID_8659
  Probeset Number=SeqID_16717
cggggaaggatttttccccgtttacatccccgcgggggggagaacctttcccccaccccatcccctaatggaggaattccccgcggggattcggggatcggggccccattgccatctctaatcccttgtgttcacgcgttgcaggcgttgaacgagagccgcgccagctgcacctgcccggcgagcaagcagcagcagcggttctccggctgaagcaccggccgggccggcagtccccatcggtccccggcggctgggtagcacgctcccctacacagctagtgcagcaaagatggaccccccccaaggcctggacatggacctgactgagaccgagatagagaggaacaccgccatcgtctgcagtgcatgcgcgcgagcagcatgtacagcgccggagcgatcgagggaggctcgctggactgctggatcgagcagtgtggcatcatcaagtattcaagcgactggaggaaggaaggaagaatcgagtcatggggccgaggaggaagaacgaatgaattggacagggctgtttcccttctttttttcttttttttttgcgggaacacttttgctacatctgtgctgctgctgctgcagnnnnnnnnnnnnnnnnnnnnnnnnnnnnnnnnnnnnnnnnnnnnnnnnnnnnnnnnn

SEQ ID NO: 2315 - DNA, 797 bp, Zea mays
  Probeset Number=SeqID_16718
ctgcagctgggccatcaggtgaatgtggtaacgcgtgacgtggcggccgcttttttttacttgatgcgcgcgtgatgctgtggtcgggcattaaccagcagtccgatctcaatgctattgacggcgtcatcaatctggcgggagaaccgattgccgacaagcgctggaccgagcagcagaagcagcgcctgtgcgaaagccgctggcaaatcactgaacagatcgtctcgctgatccacgccagcagcaatccgccgcgcctgttgatttccggctcggccaccggcttttatggtgataccggcgatgtggtggtgaccgaggacgatccgggccacgaggagtttacccacaccctgtgcgcccgctgggagcagctggcgctgaaggcgcaaagcgagcgcacccgcgtgtgcctgctgcgcaccggcgtggtgctggcgcgcgaaggtggcgcgctgagcaaaatgaagctgccgttcaaacttggcgtcggcggaccgattggcagcggcaaacagtacctgccgtggatccacgtggacgatctggtcaacgccatcctgtggttgatcgataacgatcagttgcagggcccgtttaacatggtggcgccttacgcggtgcgcaacgagcagttcgccgccacgctgggccaggtgatgcaccgtccggcctttatgcgcaccccggccagcgccatcaaactgatgatgggagaatccgccgtgctggtgctgggcgggcagcacgtgctgccgaagcggctggaggagtccggctttggtttaccgctg

SEQ ID NO: 2316 - DNA, 319 bp, Zea mays
  Peptide Sequence Number=SeqID_8660
  Probeset Number=SeqID_16719
ccaacaaaaaagagaaacccacccccaaacgagagaacgcacaggggcacacccagtaacgcccacaagaggagcaagaacaaggcgcaagaaacaaggagggacgcacaaaggcccacccgaaagaggaaccaagcaaggaagagcacaggcacaccgtgagacatgagaaccagcccaaaaccgaccggagcaaagaaaggctaaggcccacacaaacgagcaacccgaggcagacaaagggagcgggcgggcgatacgccaaccggaggccactaaaagaagggcaaaagcaaatcacgcaggtggacaaaaccgc

SEQ ID NO: 2317 - DNA, 333 bp, Zea mays
  Peptide Sequence Number=SeqID_8661
  Probeset Number=SeqID_16720
atggtgatcgttacacacgagatcggttttgcgcgcgaggtggccgataacattgtgttttatgaaggcgggcggattgtggcggcggggccgacgcagcaggtgctcgacgatccggaaaacggacggggcgatcgactgaccatcgaaccgtttcacggcgatcccgatcccagcccgctgctgcaaaacttacacaatgtcctgcatcacccggcgcgcgtggcgcaaccgatggtgcgccgtggctggctggaaaacgggcccggcgcgaatccacgtcgcggtaatgacgactatgtggcggtgagctgggagcaggcttacacgctg

SEQ ID NO: 2318 - DNA, 244 bp, Zea mays
  Peptide Sequence Number=SeqID_8662
  Probeset Number=SeqID_16721
atggggcgcgcagggctttacaacttggtgaccgacgttacctcctccgcggcggcgaggtcgccagagacgaggcagatgcgaccaccggggagtctaaggtcgtcggggagggctagaacgggtcaagagggtctggcgaactcactggcagactaccggctgcaagaacgggaccagaaacgggagaatgatgaagggaagacgctccgagcgggtcgggcaactccggcgaggaattccg

SEQ ID NO: 2319 - DNA, 248 bp, Zea mays
  Probeset Number=SeqID_16722
acacaccttctagtcccgcatttgactcctcggtgtgtgcgtttacacacatattgagccatacactagccagcctgctactgtccacttctttcacttgtttaactttctttctgatcacgttcgccggttttccccatcaagctctaaatcgcgggctatctttacggttccgatgtagtgctttacggaccctctactcccctaaactagattagggggatggttcacgtcactgatcatcgacc

SEQ ID NO: 2320 - DNA, 445 bp, Zea mays
  Peptide Sequence Number=SeqID_8663
  Probeset Number=SeqID_16723
tccacgtgccattacgcccttgaggtgaacggcgcgactcaccccatcagcagctaccgcgatacctcgctgctgctggtgctgcgtaatcacctccagcttaacggccccaaatatggctgcggcctgggcgaatgcggcgcctgcaccgtgctgatcgatggcgttgccgcgcgcgcctgcgtgatcccggcgtatggcgtgcgtcagcgcgctatcaccacgctggaagggctgggcaaccgcgaagcactgcacccggtgcagcaggcgtttatcgaggcgcaggccgcacaatgcggttactgccttaacggcatgatcatgaccaccgccgcgctgctgcgcgctcagccctgccctgatgaccggcagatacgtgcggcgctgagcggtaacctgtgccgctgtggcacccatcaggagattctgtgcgcggtgaagc

SEQ ID NO: 2321 - DNA, 242 bp, Zea mays
  Peptide Sequence Number=SeqID_8664
  Probeset Number=SeqID_16724
gcctttcgaactaatggtaatgggtgccggtgagttgcggcagtttggtttgtgggatgcaacgccatcttctgtttagccatctgcggcttcaacatcaaaacgccaggccgcgaagcagaaaccagccgcgttgagcagcaggtcagccgcgccggcgtgggcaaatccggctacaacacgccagcgattctcgcggcgctgggtggcgttgtcttcatcaccgggctggataactgcct

SEQ ID NO: 2322 - DNA, 310 bp, Zea mays
  Peptide Sequence Number=SeqID_8665
  Probeset Number=SeqID_16725
gcgcaaccgcaaggctcatggcaaagtacatcccaacaatccagtgataactgttgtgttcccagaaataaagacgggtaataattttaactggacttgcagcaatgagcatcctgccagacacaacatgatattgagggacatgatcccaatgcttagtgccgctacaacgaagccatttgatattgaggaagccattagctttgccatagaccatgcgaagaagctcaagatctgcaagtcaggggatttagtcgtcgctttgcatcatattggtgcatcttctgtcatcaagatcttgacagtcaat

SEQ ID NO: 2323 - DNA, 617 bp, Zea mays
  Peptide Sequence Number=SeqID_8666
  Probeset Number=SeqID_16726
ttttttttttttttttttttttttttttttttttttttttttttttttttttttttttttttttttttttttttaaggaggaccgttttttttttttttgaccccaaggggggcccccattgggaaaggcatttgcccggccaaaaaaacatcccggggggggggcccacaataggatggacaaaaggccccccggcgggaaatggccaacctttttttaacaaaaaaggcccttacccccggggtaaaacccccaaaaatcatgggggcattttgcttcaaaggcttaccggaaaaaaagggacccctttttttttttggcacccaaaaattaattcttggatttcaggggccctttcccaaaaccaattggggggaattggtttgcaaatccccctacctcagggggaagctttgcaatcccaactggggggctttcaaatggcaaaggggcaacaaagcccttcagctttggccccccgggcggggcacccttaattttcaaggccaaattcactggtgcatcgaaaaagccaccacctttagcgaaatttttttcaacaaatcctctcgacggaggggcgtgggggtcccatcctgaggcccccgggccccat

SEQ ID NO: 2324 - DNA, 357 bp, Zea mays
  Probeset Number=SeqID_16727
atgacgatgaggattctgcgagcagtgatactcacgtcgtctacatctgttacccttccccacgtcctctacatctgttacccttccccggagcgggattacaacctgccccagagcggccggcgctggaggctggccgtcccgtccgccgccggcgcgtccagtctcgcctcgtcgctctcgcgctccctcaggtggaagcgccggctcccgggtctctcctccctcaccctgcgcagcggctccgcggcggcggcagtggacgccgtcgcgttccgcgtcatgtacgtcgtcgaggccgtcgtgctgggcctcgcgctctcctgcttcttcctctgctgcggctgccacctctaa

SEQ ID NO: 2325 - DNA, 382 bp, Zea mays
  Peptide Sequence Number=SeqID_8667
  Probeset Number=SeqID_16728
gccccatggtaacataaaaggtctgcaagagaagagagtccatcaacaggtaatcataaagttcacaggtctgcaaacgcaacaggggaatggtacgcgctgtcagccggcgggagcttcacgcctcacgtcatcatcgtgggtactggggaggtaagacatgcactccatctccatctcattgcagcgtctgatgtggcggcgcgcgtcatgtcgttttcgcagaaaggtccacgctcggtctgcatgctctccgccaacgggacaatctctaacgtgacgctgaggcagccgggctcatctggtagcaccttcacctacgaggtacatactgtcaaattgtcgatgaccggtgtgtttgtgtgtgggtcttcagggcccg

SEQ ID NO: 2326 - DNA, 353 bp, Zea mays
  Peptide Sequence Number=SeqID_8668
  Probeset Number=SeqID_16729
cccctgatcaaatcgatgctgaaagcatgattgaaataaggcatggctcatggtttgaacctctggaagatttgaaaggaaaacttatgggtgtgattagtaaccctccgtaccataccaaccgacgacctacctgggctgcaacctggagttggttggcatgaaccaaaattggcgcttgacgggggcaaggatggccttgaacatctgcttcatttcttggaaaggttattcttaaatcttaaacctggaggcttttttgttttgaggtaatttccaaatccttttacatactggtgcaatttgatggataagccgcttttttttttagaaacctaattttttttaaaatt

SEQ ID NO: 2327 - DNA, 549 bp, Zea mays
  Peptide Sequence Number=SeqID_8669
  Probeset Number=SeqID_16730
tgcagccggccaccagcaataccgtggagctcggcagcaaaaaacgcctcggcaacggtctgctgaccgttgcgctgtttcagaccgataccaaaaacgagatcgtgtcagacagcagttacgaaggccgcaccagctacaaaaacgccggtgagacgcgccgccgaggcctggaactcggactcgatcagcagtttggctatgactggcacctgaaagccgcgtggacgctgctcgacgtgcgctaccgcagtaacgcctgcggcagcgacagctgtgacggcaagcgcatccccggtattgcacgcaatatggtttacgccggactggcctacgcgccggagcaaggctggtatgccggcggcgacctgcgctacctgagcgacattgcggccaacgaccagaatgatgtcaaagcgccggcgtatacggtggtgggactgaacagcggctataaatggctggtgcagaactggacgctggatctgtttggccgtgtggataatctgctcgaccgccactatatcggctcggtcattgttaatgaga

SEQ ID NO: 2328 - DNA, 635 bp, Zea mays
  Peptide Sequence Number=SeqID_8670
  Probeset Number=SeqID_16731
tgcagcccagccaccgcggtgctccacggcaaatccgccagcgtcaaagccaattccgccgccgccgatcccaccggcagccaacaacagctcatcagcctggggcaacgtgttcgacgtgagggcgttcggggcgtcgggcagcggctcaggcaacgacacgcgcgcgttccgcgcggcgtggaaggcggcgtgctcgtccaactccaccacgcccacgctgctggtgccgtcggacggcgtgttcaccatcagctccaccatcttcgccgggccgtgcaagtccgctgtcaccttccaaatcgatggcgtcctgatgccgccggacggcccggcgagctggccggcgacggacagccggaaacagtggatagtcttctacaaggccgatcgcttgacgctggcgggggaaggcaccatcgaaggcaacggtgaggagtggtgggatctgccgtgcaagcctcacaggggtccaaacggatcgacgctgcgcggaccatgtgacagccccgcggtaaagctcgctcgccggcaaacttggatctctccccatcatcatgttgtgtgtgtgttttttttttggtcgaaatccttgacggtctcactctgctcgtggaatctgtgtggtgtctgca

SEQ ID NO: 2329 - DNA, 681 bp, Zea mays
  Peptide Sequence Number=SeqID_8671
  Probeset Number=SeqID_16732
tgtcgcccggcgcggcgtggattgtgcgccgcattctcgccggtgaggcgcagcctgccgccagcggggcggtcgccgatatcgtgccgctggcgtggaaaaccggcaccagctacggctatcgcgatgcctggagcgtcggtatcacgccgcgctatctgattggcgtctgggtaggcaggccggatgccacgccggttgccggccagttcggttacgcgtcggcggtgccggtgatgcagcaggttaatcacctgctggcgggacacctgccggcgcgcggcgtgcccggcgatccgcgcccggcgacggtcagccccgtcagtatctgctggcccggcggccagccgttgcccgccggcgacgagaactgccggcagcggcgttacagctgggtgctgaatcagaccgtgccgccaacgctgctggcgccggggcaggagggcgtcaatggcttacgccagcgcttctggcaaaacagcaaagggctgcgcgtggcggcggattgtccggatgcgcaaagccgggaacgcgtgatgtggccgctgccgcttgagccgtggctgccaccgggcgaacggcgggcgcagcgcctgccgccagtggatgcgacctgcccgccgctgaatcagggggacagcgcgccgcttgctgtgaccggcgtgatcaatggccagcgcg

SEQ ID NO: 2330 - DNA, 580 bp, Zea mays
  Peptide Sequence Number=SeqID_8686
  Probeset Number=SeqID_16733
cccctgcaaaaagtgaaagaggtccagaagctgacgggccgtttcacagctttgaacatgttcattttgaagtcagtcaaacgttgtctaccatttctaaaggtgctacgagggggcaggggctttgcttgggcccagagcaaggaactgcattcgaagacatcaaatcatactcgacagacctcgccaccttgtctagcccaaccctaggagccaacctattgctctatttagtggcctcccgtcacacgatgagcgcagtcctcatacaagaaaagctagccgaaggtagactaatctagtccttgatgtatttcatctacgaagtcctcaccgagtctaaaaggccacatgcccgaaattgagaaaatcacatatgtcgtggtaatggtatcaaggaacctaaggcactacttcgaagctcacaaaatcaaggtgctaacagagcaaagtctatcagacatatacaacaaccctgaggcctccgttcggataggaaaatgggccatggagttataagaatatcatctggtttttgtgcacaaggtgagtattaaacttagagcaataatggggtacc

SEQ ID NO: 2331 - DNA, 469 bp, Zea mays
  Peptide Sequence Number=SeqID_8687
  Probeset Number=SeqID_16734
tcgccggacaaccgcgacagtcagcggctcgtgtaccagctcgtgcggcagagcgcggcgctgatcgaggacggctatttcgtgcacagcaccgcgcagcactggatattgttcggtcatccgaaccgtcactacgtcgaggcgcagcccgaatggctgatcgcgttcgacgaatgcggcaatatcgtcgccgcgaaccggcacgcgcgcgacgcgctgcccgcgctgcgcgagccgcgccatatcgacgaaatcttcgatgcgaccgagatgccgctgcgcgatgccgcgcggctcgatgcgatcgtcgcgctgcggctgcgcgcgaccggcgcgccgctctatgcgcggttgcgcgcgccgctacggcgcgcgggccgcgaaaccggcaccgcagcgcgccggcccggcaccgcgcagcgtcacgtgggcgcgctgactgccgttttgcagagcagcgatgcgcgcg

SEQ ID NO: 2332 - DNA, 398 bp, Zea mays
  Peptide Sequence Number=SeqID_8688
  Probeset Number=SeqID_16735
gcgcttccagccgttgccgtaatggcacaaagcgttccgcgaccacggtatccagcagtgactcgcgcgactgaaaatagtaattcagcaattcgcctgctgatgggcgcgctgatgctggtgatgctgctgtccgcgcttgatcagaccatcgtctcaaccgcgctgccgactatcgtcggcgaactgggcgggctggatcgcctgtcgtggattgtcaccgcttacatgctggcctcaaccctggttgtgccgctgtacggcaaatttggcgatctgtttggccgccgaacggtgctgcaaatctcggtggtgctgtttttactgggctcggcgctgtgcgggctggcgcaaaacatgccgcagctgattttacccgcgcgctgcaggcatgcaag

SEQ ID NO: 2333 - DNA, 318 bp, Zea mays
  Peptide Sequence Number=SeqID_8689
  Probeset Number=SeqID_16736
cccctggacttttccctcttagttgatggccaagatccggtctcgtcttctggagctttgcttgaagcttttgatactattgctaagcagttacgtctcttagatgatattcctcttaaaatatctaccgtgcaacccctagactcagcttttaggcacacttctgtgtttcctcctgaacctcatccactggcatacggaaggaattctcagaggctaccgaaattcgcaacaacttgcataagatctttagaagttatgattcagctagagggatctggtaactggcctttggatcccgtggccatggagaagggg

SEQ ID NO: 2334 - DNA, 686 bp, Zea mays
  Peptide Sequence Number=SeqID_8690
  Probeset Number=SeqID_16737
ctgattgccgatgagccgaccaaagggctggatgtggcgcgccgcgacgaagtcagccagctgttacagcgcgaagtggccgatggcggcatgctgttgaccatcacccacgacatcgccctggcacgccagctgggcggcgacgtgctggtgatacataaaggcagcgtgattgaacagggcccggcgcagcaggtgttgcagtcaccgcagcagccttacacgcgcgcgctgctggctgccgatccggccgtctggcccgcccgacagcaaacggtgatcggtgccaggccggtgatcagcacccaggacattgtgctggcgcgcgggggcaaaaggctgggtgtgccacgcgatttcacgctgcacgccggtgaaatcgttggcctgcacggtgccagcggcagcggcaaaagcagcttcggcgacgtgctgttggggttgctcgcgccgcagcagggccgcgtaacgcaccacgctgatgcggatgcgctgaaatatcagaaaatctatcaggatccttccgcgctgtttccgccccagcgcacgctggggcaaagcatcaacgatgtgctgcggcgtcacgctctcccgccggcacagcgcgatgcgctcatggcgcggctggccttgcatcccgcgttgctgacgcggcgaccagaggcgctctccggtggcgaactgca

SEQ ID NO: 2335 - DNA, 322 bp, Zea mays
  misc_feature (56)..(56): n is a, c, g, or t
  misc_feature (117)..(117): n is a, c, g, or t
  misc_feature (120)..(120): n is a, c, g, or t
  misc_feature (188)..(188): n is a, c, g, or t
  misc_feature (216)..(216): n is a, c, g, or t
  misc_feature (228)..(228): n is a, c, g, or t
  misc_feature (252)..(253): n is a, c, g, or t
  misc_feature (296)..(296): n is a, c, g, or t
  misc_feature (300)..(300): n is a, c, g, or t
  Peptide Sequence Number=SeqID_8691
  Probeset Number=SeqID_16738
gccaccgagacacagaacgacgggccacagcaccgacgcaacgcgaaaagcaccgnaccccaacggacccccggaaacaccgcagccgagggagccagagagaggggcggaaacccnggnggcaaccccaggacgccagaaggacccgccggagagggccagagacccaccgcaaacgacaaagaaancagcgcccgacgaacccgaccggaggcnagacacggggcnagagccacagacaccgaaaacggnngagggcacggacacgccccaacgcggggagaggcagacaaagnaggncagggcaacacacccaaaagag

SEQ ID NO: 2336 - DNA, 325 bp, Zea mays
  Peptide Sequence Number=SeqID_8692
  Probeset Number=SeqID_16739
atggtgtcgcaggctcccatggcaggggcgggcgcgggcgcgggcgccaacctcaccgcggcgctgtgcaggaagagcaaccgcgtcgcgcgggtgctcgcgtacgcgctgctcgagtgggtcctcatcgcgctgcttctcgccgacggcgtcttctcctacctcatatcccggttcgccgccttcttcgggctcgcgccgccgtgcgcgctctgctcccgcctcggcgtcgacagcctcttcgagacccacccccgccatcgaggcgtcggcgccgagcccctgcgccgcttgctgtgcgacgtacacgccgcagagctgtcgc

SEQ ID NO: 2337 - DNA, 236 bp, Zea mays
  Peptide Sequence Number=SeqID_8693
  Probeset Number=SeqID_16740
tctcggtctggtggcgctgctggcgtcgcggcttcggcgctggtcgcccttggggctccggcgcctgcttcggtgctcgtgcgcctccgccgccgggcgctggtgccgcgccgtgtgccctggagctgtgcgtccgccggggcccgctctggcgtcgcccttcgcgcctgtgctcgttcgtgggcctccttggcagggccccaacggcgtggttcagcgctggctggctctggtcc

SEQ ID NO: 2338 - DNA, 770 bp, Zea mays
  Probeset Number=SeqID_16741
atctgccggagtgggcacaaacctggctggcggatcacgatctgaacaatgccgcacagattcagcaaaaactctccggctttgcgctgaagggcggacaatacatggcgggcagcgtgttcctgatcggtaaagggactttcaccttcaccgtgggctttggcgtgatgctttatctgctgtttttcctgttgaaagacggcgcctggctggtcgggctgattctcgaagcgctgccgctctccacctatgttaagcaccatctgctgatgaaattcgccgccgtatcgcgcgcgacggtcaagggcacggtggtggtggccgtggttcagggggtgcttggtggcttcgccttctggatcaccgacatcgacggcaccctgctgtggggcgcgctgatggcgttcctgtcgctgattccggcagtcggctcggccatcgtctgggtgccagcggccatcttcttcttcgccaccggtgcgctgtggaaaggcctgttcctggtgggcttcttcgttatcgtggtcgggctggtggacaacatcctgcgtccgctgctggttggcaaagataccaaaatgccggattacctgatcctgattgccacgctgggcggcatggaagtgtacggcatcaacggcttcgtgattggtcccttgatcgctgccctgttcatcgcctgctggaatctgctctccggccgcgacaaccgggaaaatgtcgaagagatcgacgaagagtttatcgaaaagggtaaaacccgcgagtag

SEQ ID NO: 2339 - DNA, 449 bp, Zea mays
  Peptide Sequence Number=SeqID_8694
  Probeset Number=SeqID_16742
cgatcgaaagcccaagctgaatccgtggccatttcggctggccacatggtgtgcggagtggccttggcactagccaccgtccttctgggctcctcttgcatcaccgcagtcaccgcctcgccggaagcgcagaggtacagcttcaggttcgtgcggcacacgcgggacgcgccgctggtgtcctactacaactacatcgtggtgggcggcggcacggcgggctgcccgctggccgcgacgctgtcggagcgctcgcgcgtgctcctgctggagcgcggcggccagccctacggcagccgcaacgtgtcgagcgagtaccacttggcggacgaaaaccgctgtcccccgcgcaacggtttgtctccgaggacggcgttgtgaacgcccggggggggggtctttgcggctggcagggtacgagctgaattggctcagaccccccccccccc

SEQ ID NO: 2340 - DNA, 1196 bp, Zea mays
  Peptide Sequence Number=SeqID_8695
  Probeset Number=SeqID_16743
tgcacccaagagttgctacgccaccctcctagctccacggcctcgccgggggccatgaagcagtggcgtgacgatgtcgtccgtcttctcggcatggcgcattctggctcagctaggcccaggcctcggtcatcccagcgtcaacatgaggcgtcggcgtcagtgcactcaccctcggtgaaggcctcaccgactgaggacctacgggtggagctcaaccgcaggcgtgcgggcgaggatgcccgactctctctagagagggcgcctgagcgccagcaaaacatcgagggtcgcaacctcgacctagacttcaccgtggtcgcgctgcaaactccaaggggtgcctgaattcaggcgagtgtcccgttggccggcgtgggctgtgccgcactggcggatcatctccgcgcagcgacttggccatccaagttccggccacacctgccggaaaagtacgacggtacgtcaaacccgtcggaattcttgctggtatacgtcaccgctattacagcagcaggtggagacactgctataatggcaacatacttccatgtagccttgtctgggccgatacggacctggctcatgaacctcaccccaggatcgatctactactgggaacagctctgtgcgtggttaacagcgaacttcaccagcgcttatcagcagtggcgtggaggctcacctccatgcagtgaggcaggaatccggggaaactcacagagctttcatctcccgcttcactaaggtacggcggactatacctcgtatctctgatgcttccatctgcaccgctttccgacagggggtacgtgatgagaagatgctatagaagttggccacacatgacgtggaaactgtcaccacactcttcactctggctgacaagtgtgccagagctgccaagggccgtgcatggcactcggcgccacaaatcggagtcgaccagacgggaggcaccggagccgtctcccaggatggcaaaaagaagaagaagaagaaccgcggccatgagaagccgcagtctgtcgctccgattgtcgcagccgcaactgggggccagggcgagcgcaataagtccccgaccatagggagtcaacagcggctcatgcccagtacatcccaacgctcgccatagcgcctcggaatgccacgagatcatcaagctcacgaaacgcgtcagcgagcgaagcgag

SEQ ID NO: 2341 - DNA, 336 bp, Zea mays
  Peptide Sequence Number=SeqID_8696
  Probeset Number=SeqID_16744
ttggattataatttaaaggcttgcacacttgcacctgggaattatgcaatttctggtggtgtaaaaggtattgaagtagttgaagccaaagcaaagttcttcaaggccagaatgacggttcggctagctcttgctggtgctttgcatactagcttcatgcaaccagctgtttcaagactggaacctgcgttagctgctactgaaattagaacacctagaatcccggtcatctccaacgttgatgcgcagccccattcagatcctgacaccatcaaaaaaaaaacagattttagcgcagcaaataagttgtatgccaaacttgaactcttactgcag

SEQ ID NO: 2342 - DNA, 1714 bp, Zea mays
  misc_feature (1)..(99): n is a, c, g, or t
  Peptide Sequence Number=SeqID_8697
  Probeset Number=SeqID_16745
nnnnnnnnnnnnnnnnnnnnnnnnnnnnnnnnnnnnnnnnnnnnnnnnnnnnnnnnnnnnnnnnnnnnnnnnnnnnnnnnnnnnnnnnnnnnnnnnnnngaccgtttagtcatgatgcattgctaccgacgaaagagacagggcagagagagaacaagtgaggaagtggctgcggcgtcgtggccagctgctgggcggcgattatcctgggcgcttggtagcgctctctgggaacttctcgtgcctgcggctggtgagaactgtggacacgagtgccggaatcggctgcacccgaagctcgccattgtctggccatcgcgcgtcgcagggagtgcgttccccagcgagatttgagcagcgaggtcacgagtcatcttgaagatcatcctggtacttggaatctcaaatcccaggtcaagagcaggtaccacaagatgaggcgcttggaggatgctgtgacgagttcgtgagaggtctaggtcgtcgtctcccagtcaactttgggttgctggaccgttgtctctttataatgtaattacttatttattttgtatagaactcctgttatatagtaaagatgtgacattcgatcctgtgccatgaatcatcatatgtgtgagacttggtcccagcacacctggtgattatgttcgcgcccgggttttggacccctaaaatccggggtgtgacagctttgcctaagggtcgtcaatggggactggggcatagtgctcactctgccaaggggggtgcagaggttcattcgatttgattttgttagtcacccaccttggggaggtgtactacgtttgtacgactggcgaaacctaacgagcagctatgcaccaggggagtctttgtaaaggctacgtagtgaaaccttaccgactcaccttggtagtgtttgagggtttgatcgacccgaggcagaaagggatcatgactcgtgggtaaagtgtgcaacctctgcagagtgttagaaactggtatatcagccgagctcacggttaagagcagccttgggatcctctttgattagaagaactttggatacttttatggtgatgtttaatgatgatggttatagttatgatctatggtatttcctcttggagggagtacatttgtgtcacacccgggcttttagggacaaagtcgggtgcatctcatacatgcgccaaagaagacaacatatataataacagagtgtatagagataaatgtcacaataatcagagtatttgttacatagcggaagtcttacaaaataaaagataaatataaaaggatctaaaatccatcgttggcgccagaaagtcaactgggagacgccacctagatcgaatcgaactcctcgatgtgtggctcctcttgaaccacctgttcttctcctagcacttgagattccagttaccagggtgatcttcagatcctcgtgacctcacgaattcgtggtgcagatgcactgaccgcgcggcacaacggcccgcggcggtgcccaaaccaacaacgaggaattaggggtgattccgtccatccctagctcctgtgactccgcgccaaggatcaccacagccccgtgaacgaccatagccccactccggccacagaccggcagcacgggcagcagacatcggcggcggccacaactttctctctctttcatgcgacgaggctttctgctcctcgaggtatccgcgatcccacgcgtccg

SEQ ID NO: 2343 - DNA, 541 bp, Zea mays
  Probeset Number=SeqID_16746
ctttctgaaagcggtgcgagtccttgataatcaggttcggttcgacggccacgaaagtctgttccggtatgaatggggcgccagcggcatccatatccctgccagcattattggagtcagcggcgtactcacagtgatcgatcagggcggggatgtctccaccatcacggtctctatgggtcgattgttcctgccagtcaagggggcggcaacctgttaagccactacattccccactgctgatccataagcggcaccgcattcagtattcgcctcttcaagaggatcaggtacttcttttccaggtacagatcgtaaagcctttgcgctttattcatccgcgtcaatccaagtccccctccatgcacccgatgcatgagtacgtcgtcatacaggtcaagctgtataaaaattttgttcgtttcggtcatctggccaccgcttaagcctatccggtggtcgtttgcgatcgtcacgtgatgtaactgtatccgtttccccagttgtccatgccgcagatgcacatgacgccggcgctgca

SEQ ID NO: 2344 - DNA, 730 bp, Zea mays
  Peptide Sequence Number=SeqID_8698
  Probeset Number=SeqID_16747
cgtttcggcgtcgaggccgggcaatgccgcaccgagaacggcgtagtcatcgctggcgaccagcgcgccacctacggcgaactggccgacgacgcggccaagctcgaaacgccgaagaacgtcgcgctcaaggaccccaaggactggaagatcatcggccgcgccaccaagcgtctcgacagcagcgaaaaaaccgacggcaccgccaagttcggccaggatgtgcagttcgacggcctgctgaccgccgtcgtcgctcgctcgccggtattcggcggcaaactcaagtcgttcgacgccagcgctgccaagcaggtgcctggcgtgcgccaggtggtcgaagtgccgaccggcgtcgccgtggtcgccgacaatttctgggcggcaaagaaaggccgcgacgtgctcaaggccgaatgggatctcggtcccaatgctgggatgagcacccaggccctggtcgaggaataccgccaggccgcgggcagcgagggcgctgtggcggcgcaagcaggcaacgtacagcaggcgctgggccaggccgcaaaaaccgtggaagccgaatacgtgctgccctacctcgcacatgcgccgatggagccgctcaactgcacggtcaagatcggcgacaatggctgcgacatctggaccggcacgcaaatgccccgcgtcgaccaggcgtcggcggccgaaatcctcggtcttaaacccgagcaggtcaacgtgcaca

SEQ ID NO: 2345 - DNA, 427 bp, Zea mays
  Peptide Sequence Number=SeqID_8699
  Probeset Number=SeqID_16748
aattcgccgctctgcgcatcgcgttttcccatgccggtatccaccagaatcacgcgtccctgaccgcgaatcagataacaaaacacatggatgtcgcccggctgtgctatgcctgcctgacgttgcagatcgaccgcatcgtcgtggtgaccagtgtcatttttgacagagttgagacccggattgtcatggacataaaaattttgcgcgcctttgccactgtcgcggcgctggagcatattggtcaggctgcggaacggttacatatttcgccgtctccgcttagccggcaaattcagcagctggaaagcgaactgggcatggtgctgtttcaccgtgaaaagaaacgtctgcgcctgacggacgagggtaagcgctttctcaccgaggtaacgccctttttgcagcatcacgaacggctaaaaga

SEQ ID NO: 2346 - DNA, 651 bp, Zea mays
  Peptide Sequence Number=SeqID_8700
  Probeset Number=SeqID_16749
aagggggttaaatccttttttctccaaatgtgtataaaaaggattggatcccccccatccccccccattgagaagcccccgaacatggccttaaccggctcaagggcatggatttaaaaaggagtcccccttatttttatctctggattaaaatggaatggggctagaaaaccccctttatatctagtggccactgttgccattttccggttatgcaatatgggcctcctctccaaggtcccacaggtggtttgctttgcgttccatgacagcaaactgttgatggaaacatgcccgggggcccagaacctttggaagatcgtgacccttttttacttgggttagctccttcgccaggggtctattttcccttttttttgttcggggggtaggctaatgttggggggataaaaaaccaactgggcggtttagttagtttccaaaaaaactggatagggggggggatgaccctcccttggaggagaaagtccttttgtttcgccccttgtttttatttttgtcccaaaaaaacccataatcttgtcgatatgcctagtcgaagggggttttatcccaaaaaaaaaaaaaaaaaaaaaaaaaaaaaaaaaaaaaaaaaaaaaaaaaaaaaaaaaccgagaggggcgcccggta

SEQ ID NO: 2347 - DNA, 457 bp, Zea mays
  Peptide Sequence Number=SeqID_8701
  Probeset Number=SeqID_16750
ctgcagaatcggaatttaaatctttctgcccacgagctttatcaagctctaactaattttcttcaatgatatctgtagcctttggtacctgtagtaaatgccaaagatggtaaatggttaatcagcaaatcacttttccctgttggtaaacctggtggtcatggtgctatttggaaacttgcatatgatagaggtgtactccaatggttacaaaattgtggcaggaaaggtgcaactgtacgccaagtcagcaatgtggttgctgcaactgatttgaccatgatggcattggcaggaataggccttcgaagacctgcggctactgaaggagtgaatgtccttattgagaaacaaaatcttgatgggctatggtcatatggcatcacttgtatcgagtacactgagtttgaaaagtatggtattccagacctacactaaccaacaggtaatatttctt

SEQ ID NO: 2348 - DNA, 560 bp, Zea mays
  Peptide Sequence Number=SeqID_8702
  Probeset Number=SeqID_16751
ccagccagggccccaaaaaccacaacagaaccttccacctccaccaaaaagcggccaaccaacccaaaggggcgggcgacgcggcgacaacaaccggcacccaacaaccaaacccatgaaccagccaacagcccaacaccgacaggagcagcccccaaccagcacgccgcccacagagcccacccccaacgcgaaccaccccaaccacgagcaccaggccgagaacaggcgcagcccccaccaacaggacccaccgacaccaccaggacagcccaagcaccaccaaaagccaccccggaaggccgcaaacccgggcaaccagacaacaccaccaaagccagcccatacagccagaacacccgcccagcccagccagggcacaaccacaagccccgacccggagcagcacccgcggcagccaaagaaacgccaacaaacacccacccgctacgaaaaacaggtgccaaaaacaaccgctacggcggcaaccacgaaccagcggacagccccaaaacccaccgccagcccaaccaaaaaagaacgccgccaccacccaacag

SEQ ID NO: 2349 - DNA, 275 bp, Zea mays
  Probeset Number=SeqID_16752
gatttgaagttctggttgcgcgagtgccggctatgggagcgaccacggcgacgtggcggcgaacgcgacggctggaccttctactcgccggagccatcaccgatctgcggctgcttggaacgtggctgcgatgccatagcgacggcgagaatttggctctgggaaccaggaatgactggcttcgggcacgccaacctggacatcaagaaccgcacacacgcatactacacgtggcactacaaccaatacgggagattggtggccgcagactccat

SEQ ID NO: 2350 - DNA, 495 bp, Zea mays
  Peptide Sequence Number=SeqID_8703
  Probeset Number=SeqID_16753
aaccgagccctaccccctcataccaaggatcccgccaaaggtccccctggaggtgacccctccggcggtgcccgtggtccccggagcatcccgaaaaataactgtgaccctaccggcgaggtccgtgaccggcccctacagtttgggtgagattcccatgaaaggtggccccggtccccttgtcagaatcccagttgtagttatgggattcaagtaggtaaaagccgcctgtgccttttcttagggagtaaaggataggaaaagcgagttgtgcctctgtaatttgaggtcttgagctgcaaaggaacgttgtataattttttcataggttgtaaaaaataaaagttggcccaatcctgtaagtgttatgcatgccccccccaggttgtaaaaaatatttgggggccctaaatcctctgacatggggactaaaggccctcttgtatggtagtccacccctgttttgattttttaaggcatgaaggtttggttttt

SEQ ID NO: 2351 - DNA, 268 bp, Zea mays
  Peptide Sequence Number=SeqID_8704
  Probeset Number=SeqID_16754
tcgaagaagagtaggcgttctctccacgccttcagggccaccgtgcctgcccctaggccttgcacttctcggcactgatacatcgttttacaccggagagaccttgaaaaccctgacttaatccaacttactcgccttgctcctattcccactttcgtcagttgccatagtttcgaaaacgcccccacttacagcccttgcccacacttgctcagcctgaatgcctaatgccgccttatgcgctttcacatccttacgcatttgtgcg

SEQ ID NO: 2352 - DNA, 429 bp, Zea mays
  Probeset Number=SeqID_16755
cgcacaaatgcgtaaggatgtgaaagcgcataaggcggcattaggcattcaggctgagcaagtgtgggcaagggctgtaagtgggggcgttttcgaaactatggcaactgacgaaagtgggaataggagcaaggcgatgccgagaagtgcaaggctcgacatacggaaggccttctacgagatgctcccccaccaggagcgaagtgccgacctaggcgtccagctcagcgctcagagtgaccagggagggtggggggttgatgaccagttcagggcccaccaggatgtccatcaggtcctaggggcaggcacggtggccctgaaggcgtggagagaacgcctactcttcttcgaggctgtggtcctgataaccgaaaaggctgcggacgtgccgtggacccagggcagcgagaggaggagggcctgcag

SEQ ID NO: 2353 - DNA, 863 bp, Zea mays
  misc_feature (804)..(804): n is a, c, g, or t
  Peptide Sequence Number=SeqID_8705
  Probeset Number=SeqID_16756
tatatatatatatatatacacttgagagaatcgggggcccggtgctgaacggcgtgttgctagactgaaagtgaaaggtttggattttgaagcgattttggatggctgggctacctgaacgaacggacaaggatttcaggggaagcgtgcgtagcattcttgaaggcgtcgcccccacctcgcattcccaagtgattccacggtggacccaggaacaaccttaaaaatcaatagctaaaaatcctaattcttttttaaaagaaacttgccgattgagtatattagagcatctccaataattatataaatttagcaccctaaattatagatttaaaaagttgctaaatcactttaaggagtacaaaaatgataattatggaaatttagcgctctaaattatagatttaagaagtctgctaaatcacctttaaagatagtagaaaaatgtgtgtgctccaacagttctttatttattggttgctgacttttaaaattatctacgtcaacaaaaaaagtgtgcatgctctctattttcaattgagctagcacatcaacaaccctccatattactttggaaggtcgaacttatcgatggaagttgccttggcaacgggcacatttttacccacgtgcccgcgggtaaaacccctatccactgccggtttccggtgtgaagtttgtacctgtgggtacgagtacgggttttgattctcaaccccgacgggttttttctcgtgggtatgaaaatgttgtacccgtgcccgcaacccacatacccgcatatgtgtctgtgtagaactgtanactgtagagcacatgcatctcaatttagtgccaccctgaaagctttgagctagcgaagc

SEQ ID NO: 2354 - DNA, 211 bp, Zea mays
  Probeset Number=SeqID_16757
atgcggtcgctgcgcaacaaactgctggccacgctggtgctgctgcatctggcgatgatcggcggtgtcacctggtatttctaccactgctatggcgacatgatgggcaccatgaaggacgaccagctcgccaaaattgccgatgcctggtcaagcagccagcgcatgccggcactgatgccgatggtgatgcagcaggagaagctcaaaa

SEQ ID NO: 2355 - DNA, 517 bp, Zea mays
  Peptide Sequence Number=SeqID_8706
  Probeset Number=SeqID_16758
catcatcgtactgcaccagatgggcagccacggtccggcttactttaagcgctattcggccgcgttccagcgctttacgcccacctgcgatagcaatcagatacaggattgcgatcaccaggcgctggttaacacctacgataactcgctgctgtataccgacgatatgctgagtcgcaccatcgataagctgaaaggcatgagcgatcgctttaacgtggcgctggtgtacctgtccgaccatggcgaatcgctgggcgaacacggcatgtacctgcacggtgcgccgtacctgtttgcgccgtcgcagcagacgcacatcccgctgctgctgtggatgtcgccgggctacgccgcggcgtatcacattgatcaggcctgtctgcgccagcaggcggcagagacagcggtgtcgcaggataatctgttccacacggtgctcggcctgttcaatatccagacgcagcagtatcagccgcagctggatatgatcaaatcgtgccagaatcgcgcctga

SEQ ID NO: 2356 - DNA, 220 bp, Zea mays
  Peptide Sequence Number=SeqID_8707
  Probeset Number=SeqID_16759
gattttatatgggttctgaaaatgtttagagggacagtagggtattttgaccaggagtggatgagaggggttttgattatgatcaaggtggaggtctatagattaggtatggtggtactggagattgtgtccgggaagaggaagaagttgaagtaggtttttagtaggaggggttattattatgtcgaggagtatttgtccggtggaggtttgaagaagt

SEQ ID NO: 2357 - DNA, 591 bp, Zea mays
  Peptide Sequence Number=SeqID_8708
  Probeset Number=SeqID_16760
ggcggggaaaattgcgggggggcttaccggccaagccttgttgtggagcgcccccccagcagggtgatttgtttcggccgatgcgctgcttatgcagctggagtcgccgctggacagcgtgctggccgcggcccgcatcgcgcgcgccagtcacactcaggtgatcctcaatccggcgccggcgacccagctctctgatgagctgctggcgctgatcgacattattacgccgaatgagaccgaagcggaaatcctcaccggcatcgccgtcaacgacgacgacgacgcggcgcgggcagctcaggcgctgcacgccaaaggcatcgataccgtattgattacgctgggccggcgcggcgtatggctcagcgagcagggtcagggacagcgtattcccggcttcagcgtgcaggcggtggataccatcgctgccggtgataccttcaacggggccttcattaccgcgcggctggaaggcgtggcgatgcaggatgcggtccgttttgcccatgcggcggcagccattgccgtgacgcgcccgggcgcacagccctcagtgccgtggcgcactgagattgacgcattcctgca

SEQ ID NO: 2358 - DNA, 750 bp, Zea mays
  Peptide Sequence Number=SeqID_8709
  Probeset Number=SeqID_16761
tacgtgcgctcttccaccgtgcagggcccgcgcggctcggccgacaccgggcgcgacgtgctctgcttcgttttgaagttctacacggaagaaggcaactacgatctggtcggcaacaacatgccggtgttcttcatccaggacgcgatcaagttgcccgacttcgtgcacgcggtgaagcccgaggcgccgaacgagatgccgaccggcgcagtgcgcgcacgacacgttctgggacttcgtgtcgctcgtgccggagaccacccacaccgagctgtggctgatgtccgaccgtgcgctgcccgcgagctaccgcgcgatggacagtttgggcgtgcacacctaccgattcgtcaacgcggccggcgccgagcatttcgtcagttccactggcggcccgagagcggagcctattcgctgctgtgggacgaagcgcaatgcatagcccgccacgatcccgactttgaccagctcgatttgtggatggcgatcgagcgcggcggctatcaggagttagaacacggcgagcagctgatcgatccgtccgacgcgagcaagttcgacttcgacatgctcgacccgtccaagctcgtgccgccagaactcgtgccggtgtaaccgatcgggcgcatgatgttatgccgcaaccccggcatcttgtttgcgcaaaccgagcaggtcgcgtttcatccggcgcacgtggtgcccggcctcgacgtcccgaacgatccgcggctgcaggtagagcta

SEQ ID NO: 2359 - DNA, 249 bp, Zea mays
  Peptide Sequence Number=SeqID_8710
  Probeset Number=SeqID_16762
aaagaggggaccgtgacgtgcccgtgtgagcacacgatcgccgggtacgactcagcctatcgcacatcggtgactagcagggggttcggtagcaggctagactcgctggacggggacaaccgcacggcactactcgtgaagacctcttgcttcgacaagagctatgagaggctgacactatggccctactggatcgacacgcctccagcctgctgggacgcaattcaccgggagaccaggacggagtag

SEQ ID NO: 2360 - DNA, 209 bp, Zea mays
  Probeset Number=SeqID_16763
atgggggctcgccacgcgtgcatggttgccgcactggctggccgtgccgccgtgttggcaggccgctggctagctgcgggccgccgcgccggtgctggggaggggcgctcggccgatggcctcgatgctggtctgcaggccgcgcgagttcgcgtcgtgagaggccaagcgagcaccagacaagagcaccaatgcgccatggccagtgg

SEQ ID NO: 2361 - DNA, 363 bp, Zea mays
  Peptide Sequence Number=SeqID_8711
  Probeset Number=SeqID_16764
actcaaaccctttatttgcaagaggttctggcgcgtattcgagccatcaccggacgccgccacggtgcggcggactccctgctgggcaacggcgacgtgcagctcgatatgatgacgcgtgaagtgctgtacaaaggccagcgcgagcagctaaccgcacgtgaatacgccctgctctatgcgctgctggaacgcccgggggcgatcctgtcgcgtgagcagttagaaaaccgcatctacggctggggcgaagaggtcaccagcaacgccgtggacgtgctgattcacggcatgcggcgcaaactcgataacgaagtgattcgcaacgtacgcggtctgggctggcgggtaccggcaatatga

SEQ ID NO: 2362 - DNA, 375 bp, Zea mays
  Peptide Sequence Number=SeqID_8712
  Probeset Number=SeqID_16765
atgcaggcagatgaacaaagcggtcagggttgcatcacagttccgtcagtcgagcatagagcactccgcgccctccaggtccaaggttgcagcaagtgtccgaacccgtccgccagcgggcagacgcccagatgctttccggggagccggcaatggccaggtccccgggcaaggctctgagcgttctcagcattgttagccttagtatcccacaagtgcttgatggaggagaaacggcaccaggctgctggagctccggagggtctcgtcctccttctcagacaagatatcggaggagatcgccatctccgcatcgaagatggggatcctgatcgcatggcgtacttctgggggagcatgatccagattccgatg

SEQ ID NO: 2363 - DNA, 523 bp, Zea mays
  Peptide Sequence Number=SeqID_8713
  Probeset Number=SeqID_16766
tttaacacgggaataaggtggtcgattctttaggtccccaacgacgggagagaaaaatcggactggttgggggggcaggaataagtaaaacaggacttctcaaggaattaatccaaaaccatggtaaaggttaaggaaggggaaccggaattggcggaataagggaacggaattgttaaagaaaagatttttaaaaggaaaataaggaattcggaggtaataaataaaaaaataattaggaatccaaagtaagtttaatttaaggcccaaataaataacccccgggaagttggaataaaagtgggttaactgccccaactaaggcaaaaaaatttccaaaaggttattaaccaaaaggggctttaattcatgaaaaaaatctttggtttggtccaaccaggatggaaggaaccgccctaataagccagaaggccccccccagtgggtaaccacccacccttaagtccagaaaggggttcttggcaagaaaaaataacttctaccaaaaagggatcaataactt

SEQ ID NO: 2364 - DNA, 487 bp, Zea mays
  Peptide Sequence Number=SeqID_8714
  Probeset Number=SeqID_16767
gaccctagagatccttctgctgcaagcatttcatacttggagcgaggaagggagatacatgcttatgcacttcgtttaggatttttttggaagatagttatgcaatccaatgcgctagtggacatgtatgttaaatgtggagcgccactggtagctcgagattcgtttgaccggctgactaacaagaccctcatattatggaccattatgatcgctggctatggcatgcatggttttgggaaacatgccatctccctctttgagcaaatgagaggccgtgctatctgagccagaagccgcctctctcagtgccatattgaatgctagatgccattcaggccttgctgctgagggacaaaaattcttcaatgctatgcaaaaggtatacaaaatagtgcccatgctgtagtcctacacctgcattgttgacctgcttagtcgtaccggcgacctgtaggtagatcttgtattcatcgagtcaatgccg

SEQ ID NO: 2365 - DNA, 276 bp, Zea mays
  Peptide Sequence Number=SeqID_8715
  Probeset Number=SeqID_16768
ctgaatctgtccatgctcgtggctttctttacatttgttcttaaggtgagccacaagattcaggaatatcattgtagattgtttttgaattaggccacctatcctaatttttcgagtttgcatgggcctgcgatgcattacggaggcatttggaggaaaggttattcgtgcaccttctggaatgacgcatgagaaaatctctccagttcattatgatgaggaattaggaaattccttattcaatggcttgccaaacagcagttctgcaggcatgca

SEQ ID NO: 2366 - DNA, 212 bp, Zea mays
  Peptide Sequence Number=SeqID_8716
  Probeset Number=SeqID_16769
gtgaattgcaccctgctcgcccataatgaccaactgtcccctgtacgccagcaggtccgtcagcatcgctccttggccatggatacataattagtgcgcacccgcacgtactatccgcagcttggcctgatccagctattcgatgacaagcaactggttctgatcgatccgttaaccatcaccgcctgggccccgtttactgcgctgctgca

SEQ ID NO: 2367 - DNA, 376 bp, Zea mays
  Peptide Sequence Number=SeqID_8717
  Probeset Number=SeqID_16770
atgccggaaatcagcatcggcctgtacccggacgtgggcgccagctggttccttgcccgcctgccgggcaagctggggttgttcctcggcctgacaggcgcgccgatcaatgcccacgacgccttggacctgggcctggccgaccgctttctgggtgagtaccagcaagaggcgctgatcgaggaactgctgcaactgaactggcaggaacagaccgccctgcaactgaacagcctgctaaaggccgaacagcaccgcgcctgcgccgagttgcccgaggcccagtggctgccacggcgacagatgatcgatcagttgctcgacgtggccgacgcagccgccgcctggcgtgcgctggaggggctcaagcaccacg

SEQ ID NO: 2368 - DNA, 255 bp, Zea mays
  Peptide Sequence Number=SeqID_8718
  Probeset Number=SeqID_16771
atgccgccgtcgcggtcgttgttcctgctgctcatgctggcgctggcgccgctcgcgtcgctgaccgcgcaggcgccggcgccggtggcgaggacagccggggtgcaggcggagatcgacgcgctgctcgcgttccgccgcggcctgcgcgacccctacggcgccatgtccgggtgggacgcggcctccccctccgcgccctgctcctggcgcggcgtcgcgtgcgcgcagggcggccgcgtcgtcgagctgcag

SEQ ID NO: 2369 - DNA, 299 bp, Zea mays
  Peptide Sequence Number=SeqID_8719
  Probeset Number=SeqID_16772
atgaacgcgctgccgcgcggcaccggtaatctttgtcagtggtatgtcgatcaggccgaaaacgccacgctgcgtgatgttgagggcaatagctggattgatttcgctggcggcatcgcggtgctcaacaccggccaccgtcatccgcgcatcgtgcaggccattgccgatcagttagcaaaattcacccataccgcgttccaggtcacgccgtatgagagctatgtggcgctggcggaacgcatcaatcagcgggtgccaattgccggtaaagccaaaaccgcttttttcaccaccgg

SEQ ID NO: 2370 - DNA, 375 bp, Zea mays
  Peptide Sequence Number=SeqID_8720
  Probeset Number=SeqID_16773
ggtaatatagttaccgtgtacgcttaaggttttatccgcatcgtcgatcgatagaaagacatgactctggtgtccgactttaacgtgtatcctatagtaatcaaagatgtgctgatgcagcacgccaaggtgcccttataggatactattagcgtgccgaacgatctgtccgcttaatcggtgaaagtgtgcatcatgaagaaagctctatcgctgtcgaaatagcaattgctgtatcattgtcgccgtcagctctccgactatatagtactgatgattatccagtttcgtaatgaactgctgtagtccaacgtcggtataattttacgtcgcgtattgcgcgacgagcccaagcgtatagagtagtactggctt

SEQ ID NO: 2371 - DNA, 570 bp, Zea mays
  Peptide Sequence Number=SeqID_8721
  Probeset Number=SeqID_16774
gagacgaccgcgccggacggacagggcagcgggggttcacgcgcgcggggccaacgcgcagcccgacgaggcgcacttcgctcacctagccaccgcgcaccgcatacgccaccggggctaccagctggcactggataagcacgagcagcccgatgcgcacgcccggccgctggcggagaggcagcagcgcggctatctcaccacgctcgaacaggagacgcgcgccggcgagaaacaggcgcaggtgaagccggcactgcgctggctcgacgatctggtgaggaacgaactggaagcgcaggcgctcaccggcagcgagctgcgcagcagaggcacgcaggcgtcaccggcggcgtacgctgcggcggcacgcaggctgctggcgcagggcgagcgccagcgcgagggaacccatgcaccggaaggcgcctggggccagcagtcagcgggcgacggcccgtggcagaccgcctggcgctcaacggcagaggagaaagtcggcagcgaccgggcgggcgatgcctactgcgccggcgtgctctacgccagccatcaaaactacaacctgca

SEQ ID NO: 2372 - DNA, 296 bp, Zea mays
  Peptide Sequence Number=SeqID_8722
  Probeset Number=SeqID_16775
cgtccggttgcgtgtgtcgacgcggctcgcggcgttttgtgccccgcaacggtgtgcggcgcgttggcgttccagccctcgcgccggttgtcgtgggagatggctgggtcgcccttcgtgattgcgctaccgggcgggctggggttgtgccccgcggtggttatggtcgttcggggccgtgtcttctgagctatcagtgttgtctgggttcgcccagtccgctgctttgtttgggggcaactgcggatggcgcgtgtcgagcgcgcgcgggcctagccttggttccggggtaacca

SEQ ID NO: 2373 - DNA, 427 bp, Zea mays
  Probeset Number=SeqID_16776
gtttatctagagatccccctgcggtgcaggagcacgcacacccagctccctccctcccttgttcccaatcatatggttttgtcatgccatcgtggtttgttgtccacgagcttcccatgagcgctggtgagccgcaagatgagactggggttctcaaggctatgcaagatgtgcacgccatgatacagggaagtagccgatggtatctatccaccctgataacatatttgtttgtggattcagtcaaagaggtgctctgacattagctagtgttttgctttatccgaagaagttaggtggaggagcagtgttcagcaggtgggtgcctttcggttcatcagtgagaggatttcacctgaagcgaggaaggtatatataattatagtacacgcagtggacccttccccccttttgtttcctgaaagcc

SEQ ID NO: 2374 - DNA, 520 bp, Zea mays
  Peptide Sequence Number=SeqID_8723
  Probeset Number=SeqID_16777
gacgggcagaggggcgtgagccctccgccgccaccatcttcagatcacataccaccaccgccgccgcttgtgccagaccgaccgccatcaccacgggggcagtggcagcagcaggggtagcagcagcagcaacgacaacgtgtgcctcgcttccaaggccactggaaggttcatggtcccaagttttaatccaccctttgcctgtcagggcctcctcttcttcggcatccatggacgttccttccccaccggccgcaatgcccgccggggggtctggttcccatcggcatacgcctactggggacgtcgccgacgatccatcagcggctaccatggatgctccttcctcgtcggccgccatgcccgccggcgggtctggttcccatcagcatacatctgctgggaatgtcgctggcgatccgtcaatggctaccgcaaccccatcagcgtcggcgccaagcccaccatcggcggcagccgaggaggtttccgttgcgtttgcccccaccgtgcaggatga

SEQ ID NO: 2375 - DNA, 720 bp, Zea mays
  Probeset Number=SeqID_16778
ccagatcacggtatgcctccgcgagctgcgcgtgcgtccgcacgacttctgagcgcaccgaggtctcggccttgtccacgcgactatgcagggcgttgaacctcgcctcccactcctcggcgcgctggctagcgaggctaccctttgccaatgccaccttagcctccgcttgcgcagcctgcgctacagcgacggcctggttagcctccctcctctcctccgccagccggcgtcggaggtcagtcttcttggcctccagggcggccaccttctccgccagcctgcggttcttgctctccacagccgacttatcccggacagcatccgcgtgctgtgcccgaagattctcgacttcggtggcgacgtccgcagtcaggatgcccgacgcaacacggtcggcgaagtcgaccgcttgcttcagctgctgcgtcagctgctgcgacaactgctgagacacttccctcaaccgctgggacatggtgcccgccacgtccctagcggcagcggccgtcagaatctcgccgctcatgcagaaggcgacccacgggtcctgcgtggccccaagataatcctcgacattgatattcgtgccaaagtcagcaacacgtctccccggcgaaggcagctcctgccctttcgtaggttcgcccaggggaggcctgcctccgcaagaggcgacagccttcgcgcttgctgacgccttgctgggtccgggagcag

SEQ ID NO: 2376 - DNA, 241 bp, Zea mays
  Peptide Sequence Number=SeqID_8724
  Probeset Number=SeqID_16779
ctgcagttccaagtaacccttgataaaaattaaagaaggttgctgcctttctttcatgggcagtccagatttgcccatcctctgagtgtattgctgcaatgaaattataatggcaattggaacatgtgctctttgctacaataacgtgcatgtctttagaggagttgtgaagatgagacgtggcctcagattcataatcgttaatcttactagtagtataaactgcaagctgcaggtcgac

SEQ ID NO: 2377 - DNA, 973 bp, Zea mays
  Peptide Sequence Number=SeqID_8725
  Probeset Number=SeqID_16780
gcccggtacacgcgcaacgagacgtacgcccagtgggccgaaaagacgttccagtggctctgggacgtgcagtacattgaccacgaggactggcgagtctacgacggcgcccacatccagagcaactgcaccgatatccacaaggcccagttcagctacaacgccggcctgctgctgcacggcgccgccttcatgtacaattacaccgagtcggacgtgtggaagtcgcgcatcgacaacctcatcatcggcatgaagcgggactttttcgagctcaacatcgcctacgagctcccttgcgagggccgccacggcgcctgcagcgccgacatgttgagcttcaagggctatgtgcatcgctggctgtcggtcgtcacacaactcgctccgcacaccaagccagccctcctcccaatgctgcgcacatcggcagaagccgccgtccggcagtgcaccggcggcgagacggggcggagatgcggattttactggacagaaggcgtctatgtggatgtcgcggtggacaagaccagtggcgcgggggagcagatgaacgtgctggcggctgtgtcgagcctgctgatcgaggaagcggatcccccggcgacgatgctcgatggcggcatcagcaagggtgatgtcaacgccggagagcgcggtggcttcatctccgatcccctgccgcccatcacggcggccgaccgggccggggcgggtatcttgacgttcatcactctggcgggcgggtcggcgttgtggtatgtgatgaacacgggtctgtaggagggaaggtcagcgagcatggggcagcatttttgcattggcgatgttacaaaacaatgggctggtgttcgaggcgtcgtgatatcgggcggggtgaattttgtcgatcattttacaggtacctaggatacctttcctattcgtagtctaaagatactgcttcgcagtttgcatcaaccgaaaaaaaaaa

SEQ ID NO: 2378 - DNA, 450 bp, Zea mays
  Peptide Sequence Number=SeqID_8726
  Probeset Number=SeqID_16781
ggggtgacgacccttggcaagaaaaagggagcacggtgtcctgcaaaaaaatcctctcggggcacaaggtgcaacagatggggaaacacggcctggagctcctgagctcggcccccgcgcggagggttggtagcaactgtgccgtctccgtcagcaggcaggagttgagaagccttagccccggggtcggggccgtcggttcgagtgggggggggattagccgcaagatagggcgcccgcagcagcggcagcagcaggctaggggtcttcagccccagggtaggtagggggctgaagggtcggttttcgccctgatgacccccgagatcctcgttgggcgcttcgttcgcctccattcgatggatagaagttcagggccgaaccaagccttagctttgcgagctatgaaacaaaaaaaaaaaaagaaaaaaaagaaacaaaacaacacat

SEQ ID NO: 2379 - DNA, 577 bp, Zea mays
  Peptide Sequence Number=SeqID_8727
  Probeset Number=SeqID_16782
cctcatcccttccctagcctgtaccgccaccatggaaccgaggagagagaatttggtgctgcctctagcaatctacgcttgtgcggtggctcgagggttagggaggagtcctagggatgcgtccggggttgtaactcgcacacgtggtggatttcggggcacgggagcttggggccatggtggattgctcaccgaagtccctatggcgccgtgaatccactggtcgttgtgggccagcttccctagagctttattccgcggaagagggatccgatcctccggaactcttagctccggaagaagggcaggaacccgacccctccgagattaaccttttgtgccaggaaagcttcgacgaagagagaatctgactgtaagaaaaatccaagaatcatggaaattacatgtgaagaaagatgaagtcactactacagtaaacctctgtacaggcggtccggttagcctctacataggcggttccaggaaccgcttgtggtgcaccgactatgatgtaaaacaacatcactggcggtcaatcaaaaacctctattgatattgatgtgtaccttcttatttt

SEQ ID NO: 2380 - DNA, 636 bp, Zea mays
  misc_feature (1)..(31): n is a, c, g, or t
  misc_feature (632)..(636): n is a, c, g, or t
  Probeset Number=SeqID_16783
nnnnnnnnnnnnnnnnnnnnnnnnnnnnnnnaaaggaagctgacggccgccgccatggatctcgtccatgggcaactcgtcgacccctgccggtgttcagggcacatcgcgggatgccaccacgcgtatgtaccccggtcggcgtttctcgtcgacgatggggctgcggcgtcccgtgtgtgtgctgccgccattgtagggccgtgcccatcactcctcatcctcgacgccgtacccggggatttttctcgacgcctcggggagactcctcgacctcaccgtatgagtgccgcgtccaccgcccccatgctttgtgtcgcagggaagatgagggtgcgccgcggtccgcgctcgccgtaggcaaggaagacaccaattcctgtgaggtcacgtgtcacctgaagagcaagttggtacctgaaatctcaagtctcaggtcaagaacaggtaccgtaggatgaggcgcatggaggatgctgcgatgagttcgtgagagagatctaggccgtcgtctcccagtcaactttgggttgctggatcgtttcctcatatgatgtaattatctaattattttgtatagaactcctgttatatagtaaagatgtgaccattcgatccaaaaaaaaaaaaannnnn

SEQ ID NO: 2381 - DNA, 292 bp, Zea mays
  Peptide Sequence Number=SeqID_8728
  Probeset Number=SeqID_16784
cgtcagggccgagatcgtcaggcacagctgccgtccggcggccgcggcggtggccacggtgctcccctcgtcgcacgcctcccatctcctcgcggcctcggccgccgccagccgcgggctgcacgctggcagcaccaagtcggtaggggcaagagcggcaactttggcggcggccgctgccgtggggcctgcggcctcctcgtcgtcgtcatcggcggtgtacgccgccgccgcgtcgagctcaacggactatagctccgtcaccaatgagaacattccttattttggttga

SEQ ID NO: 2382 - DNA, 237 bp, Zea mays
  Probeset Number=SeqID_16785
atgcagaccgaggcgcaggagctccccgcgcccaagcgaaagacgcccatcccatacttgtttatctaccaacccaccaacaataccaagtgccgctccggcaagctagccctcacggccaacggccctcccctgctgccacggaagacaaccgcgctcgcaccggcgccggagcgggcgccatccaaagccagccaatcgaccgaaccactggtgccaaaaccagatgacggctaa

SEQ ID NO: 2383 - DNA, 502 bp, Zea mays
  Peptide Sequence Number=SeqID_8729
  Probeset Number=SeqID_16786
atgacgtcccaactgcacaaaaagggcgaggcctggtcggcccgcttctcggaaccgatgtcggagctggtcaagcgctacacgtcgtcggtgtttttcgacaagcgcctcgcgctcgtcgacatcgccggctcgctcgcgcacgcgagcatgctcgcggcgcagcagatcatcagcgccgacgacctcgccgcgatcgagcgcgggatgacgcagatcaagggcgagatcgagcgcggcgaattcgaatggcagctggatctcgaggacgtccacctgaacatcgaggcgcgcctgaccgcgctgatcggcgacgccggcaagcgcctgcacacgggccgctcgcgcaacgaccaggtcgcgaccgacatccgcctgtggctgcgcggcgaaatcgaccgcatcggcgggctgctgaacgacctgcgcggcgcgctgatcgacctcgctgaacagaacgcggacacgatcatgccgggctacacgcacctgcaggcatgca

SEQ ID NO: 2384 - DNA, 434 bp, Zea mays
  Peptide Sequence Number=SeqID_8730
  Probeset Number=SeqID_16787
agcgattacaagtcgttactcgagcgcgagccgaccccttccacggaggacttcagcgattctgagtacttggaggaggaattctccttcgagtccgaggggtcgccggttcacgcctctccccggcgtcgtccgatgattcggacgattcccaggggatcgctgccgagatgtggacatacatccgggccgtcgagcgctctgggctcgagggctcggatgagtcggaggtctcctcggacgaggagaactcctctgactcgtccgaggaggggagcggcggtggcgatgacgacgagggcgacggcgatggtgacggcgacggtggcaagggcgacggcaagggcgatggcggcaagggcgatggcaagggtggcagcaaggccaattcatataatggatgaacttcagcttgttctgtgcgcatttcttgc

SEQ ID NO: 2385 - DNA, 311 bp, Zea mays
  Probeset Number=SeqID_16788
atgggcccggagtgctccgaggggaactggctcaaacggggccgaggccccacccggcgcgggccacaggaatcttggcccggcccgggcggccacacggacaataggccctgggaggcagcataccaccccatggggtgggaaaacgggaacctggcacggaaaaggcggatttggccaacaatgcaccgagggggcagagacagcaccccaaccgcggaggagaagctgctaccgccagacatgaggcacgtggggaccacggacacgttaactgaaggcagcgagagcgacgcgatacaagacaggaa

SEQ ID NO: 2386 - DNA, 386 bp, Zea mays
  Peptide Sequence Number=SeqID_8731
  Probeset Number=SeqID_16789
ggatgtactgtggtgtggagctcggagtcaacattgttggtgatgcatgcagcagcggactcggacttgcggtgtcgacgtatatccttgttcgctgcggcttgctgcggctgcaatccggctgcggctgcggcttctacagcatctgtcgtatgggtccacacagcgtgcacgacgtgtcagcacgcgtgccggtgcacatatcactggtagggccagacaaggtgcgagtgtcgtggatcaccgcggccgacgcgccggcgactgtcgactacggcacggcctccggccagtacccattctccgcgacggggaacactacgtcctactcctacgtgctctaccactcgggcagcatccacgacgccgtcatcgggccgctgcag

SEQ ID NO: 2387 - DNA, 716 bp, Zea mays
  Peptide Sequence Number=SeqID_8732
  Probeset Number=SeqID_16790
ctgcagcaccgccgcgcccgcgctggggctcgccacgcaccagctcccgccgccggcgccggtggccagcggcagcgaaggcgccgccggcgtcgcggtgggcaacggcatcgtcgccgtcgggttcaccaccgggaccgtggccaggggcgacgtgacgtcgcgctccagcctctttgtcgcgcctgctccccgctcgcttcctccccctgctgccagagccagaagtatgcaacaactcaccgtggcagtggcagttgcaggacaggaggacgaggagcagaagaagaagggacgccaagccatggactggccgcagaggcagagccatgacaagcttgcgagctctgggtgggcctctggctcccagcgaagcagcagccggcaccgtgacacgaacaaacggaatcacaagtctggccgccggggaataacaggaaacttggccgggcaggcaggcaggcaggctgcctggtcagcacacattgagatatcaaaggagtccacacattgcctcacgggccgtgaaggccggtttggccatctatacataggagcaaggctcccgacacggcgacacccgttccatctggaagtttggaacagaggtatcccagaatgcccacaaccacaaggtgccatagagatctgtttccgcgcgaggctcgtctacaacttcgcttgtgtccagaagctgtacaagattctgggccaat

SEQ ID NO: 2388 - DNA, 587 bp, Zea mays
  Probeset Number=SeqID_16791
ctgataagcaagaagtcgacaggtaggatcgctccgacaaatgaagctactaaacccatttgttatatatttgatccgaacaaccctggcacacatgccggccacgtgaggccggcgcgcggtggacgtcgtacccatcccaaccccgccgcccgccgcggcatgccggcgtcgacgcgtcgtcgaagcggccagggcccttggatcgtgccgagatgctgtgcagtgccaacacccaaggtcaccaacgatattggcctttcaccacgggctcagcccgacagagagtcgcctaggaacctacggtgggagccagaagaaggcggtgctgggcaggagggcgattcagagagggcgtctgaggtgttcctggaagcatcaccaagacaggatccaccggtcccgagcccgactgcacacaaggaacaaccacacttcaagagaatgaacagcagcttgaagcatgagatcaagacatcatggaactacatcggtagagctcgtttacctagcaatgtcgggaagctgaaggcaaaggcgaagaacacgccccatgcttatcttgctcatatagaactatgtcacag

SEQ ID NO: 2389 - DNA, 296 bp, Zea mays
  Peptide Sequence Number=SeqID_8733
  Probeset Number=SeqID_16792
tgcagccggagctgcgtcacggcaggctggtgatggctcccggcagccacagcgtgatgttggatggcgaaccgctcagcctgaaaagccgtgagctggcgctgctggagctgttcctgcgcaatcccggtcgcgtgctgacgcgcgcccagctggaggagaagctgtacagctgggatgacgacgtctccagtaacgcggtcgaggtgcatattcatcatctgcgtaaaaaactcggcagccagttcatccgcaccgtgcacggcattggctacacgctgggagcggcagaatga

SEQ ID NO: 2390 - DNA, 2606 bp, Zea mays
  Peptide Sequence Number=SeqID_8734
  Probeset Number=SeqID_16793
aaaggggggtggttctctcattttaccttttagaggggtgggcccaattttttttgaaaaagcgcgtaaagggtgggggcccctttttcatatataaccacaaatggggaaaaaagggggtattttttgcacagaccattttaatttggggaacccccggggtttttcccactccacccgctttttaaaacaccgcccccgtaatttaaattttggggccctaaaaaaaaaattttactctccaaacaccggggataaaaatgtggttccttaaaagggcccccccctttttttttttttttttttttttttttttttttttttttttttttttttttttttttttttttttttttttttttttttttttttttttttttttttttttttttttttttttttttttttttttttggagccaaagaccagccatggagcatgactgtcaagttgcatggcatataaaaatggtggtggtccagatgacccccttgcacacggcagtccagtcagttatatattgcatttgcacccacggcccacccatcgaccggtgctcgcacctgcacatgagcgaccatagataataccaccagcacgaaggcagccatgcatcacccccggcttccagccatctgctccttgcccgccatggcggtggcggcggtggtcttggtcttcaccagcacgacggccgttgccgcttccttggccgttgtccgcagcagctgcgtccccgccgagagagctgcgctgctgtccttcaaggcgagcataaccagcgacccggcgggccggctgcgctcgtggcgcggccacgactgctgccagtggcgtggcgtgagttgcggcaacaggagccacgccgtcgtcgggctcgacctccgcaacgactactggcagcatgacagcttcttcagcgaccacgacagtggcaaccactggctgcgtgggcagataagcccctccataaccgccctgcggcgcctgaggcgcctggacctcagcggaaacctcctaggaggtccaggcgtcaccatacccggcttcctcggctccctcagcagcttggtgtacctcaacctctccgccatggacttcgacggcatggtgccgcctcagctcggcaacctctccaggctggtgcgccttgacctcaacaatccgctcctcggtaaccagtactcaccagatctgtcgtggctatcacggctctctttgctggagcacctcaacctgaacatagtgaacctgagcacagtggctgatccgacccaggctatcaacgcccttgctaacctgagagtgctgcacctagatgaatgcagcatcagtatctattccttgctctcgcgcctgaccaaccttacagccgtcgaggagcttgacctctcgaacaatttcctgttcagcggcccattctcgtcccgctggtggttctgggacctgggcagccgcctcaggagtctccagctcgatgcgtgcggactgtttggatcgtttcctcgcgagctgggatacatgacctcacttgaagtgcttgatcttggcaacaacgatctgaatgggatgttgccagagacgttcagaaacatgtgcagtctcaacacactgacccttgcctacaccaacattggcctggacatagcgcgtctgctggacaggctaccaagctgcccagagaggaagctgagggagttagacctgagccaagccaacttgacagggaccatgttgaactggctgccgaaccaaaccagcctgaccctacttgatgtttctggcaatcaccttactggccctgtgcctgtggagataggcgagcttgcagccttgagttccctagatgtgtctggcaacaacctgaatggcgtcatgtcagaagagcacttcagcaagctaacaagtttgacatctctcgatctgtccgacaacaatctacagatcagagtggatccggactgggtgccaccgtttcaactgaatgtagcagagttttcatcctgtcagctgggttcccgattccctgcctggctacgctggcagaaccaagttaacgtccttgacatttcgtactcgaaccttaccggtacgattccagaatggttttgggctgtgtttgctaacgcatcaagcttggacctctcttacaataagattactggtgagctgccccgtgatttggagttcatgtcagtgggaatccttcagctcaggtcaaaccagctcactggctcggtaccacggctgccaagaagcattgtgacgtttgacatctcaaggaactctttgaatggaccactgtcactgaattttgaagccccactactacagctggtggttctctactccaaccgaattactgggcttattcctaatcagatttgtcagtggaagcagctgcgagttcttgatctatcagacaatctacttgcaggggagcttcctgattgtggcaccaaagttgcaaaacaaggcaattcttctagcacctccatgcctcattctagtcccgcgagtcctccaagcttgaatatccgtacacttcttttaagtagcaacagcctttcaggagaattcccacggacgcgtggatcggcccacga

SEQ ID NO: 2391 - DNA, 417 bp, Zea mays
  Peptide Sequence Number=SeqID_8735
  Probeset Number=SeqID_16794
ctgccggacgctgataaggccgtcggccttgattcccggcacgaggcaaacgctcgggatcgtgaatcggccgggcatccgtatgtcaccgatcttggtgacgggcatcgcgttgccatacaccgcctccaccctcgcccctccggcgcgtcacggaggtcggagaggaggctggggtggggtcacgcaccacgtggacaccggcgcctgaatccaactggagctttagccacggcggcggtcgcggcgaagagcttccaccgtcaccgggtgctggcggctgtgctgatgcggatgcagttgccggcgttcctcttccacccaccagcgccggattcggcggcggcggcggctagggcgcgggacggattcagagccggccgttgtgtgcacgagcagggacggattgatgcgtga

SEQ ID NO: 2392 - DNA, 1350 bp, Zea mays
  misc_feature (1)..(123): n is a, c, g, or t
  misc_feature (1341)..(1350): n is a, c, g, or t
  Probeset Number=SeqID_16795
nnnnnnnnnnnnnnnnnnnnnnnnnnnnnnnnnnnnnnnnnnnnnnnnnnnnnnnnnnnnnnnnnnnnnnnnnnnnnnnnnnnnnnnnnnnnnnnnnnnnnnnnnnnnnnnnnnnnnnnnnnnatcttcagcttcggcgactcgttcgccgacaccggcaacgacatcgtcgtcttcgccgccaactcgctggccaaccccgcggcacggctcccctacggcatgacgttcttcggccgccccacgggccgcaactccaacggacgcctcatcatcgacttcatcggtaagcagcagatcgagccagagaaaactcagaagctggggctcccgctcccgccgccgttcctgcagccgcagcagaagcacgacggcagacaacaaggctccaacttcgcggtggccggcgccttcgcccgcgacgccagcttctacagggacatccccgtcgtgggcgcgttcgctctcaacaccagctctagcgtgcagctgcggtggttccagtcgctgtgcggccgccaccacccttaccaagctgatgagtgccggggccagttccgcgacgcgctcttcttcatgggcgagttcggggtcaacgactacagcctctccttgttcggcaagaacctgtcgcagatcaggtccttcgttccggacgtggtcaaaaccatctccacagcaacggaggtaatgctggctgctcgttttttcgcgctgcatgtgcatgcatggcatgtccatggccatgggctgcttgctgctgacagctgccgcgcgtgtcgccaggaggtgatcaggcagggggcgacgacggtggtggtgcccgggatcccgccgatgggatgctcgccgccgaacctagccatgttcgcaagcgccgacccggcggactacgaccccaggaccggctgcctcaagggcctgaacgtcctggccgtctaccacaattcgctgctgcaggaggccgtcagggacgtggggacgaagcacaggaacgtcagagtcatctacgccgacttctttactccggtcatcgacatcgttgagtccccggcaaagctaggtcgtgcttgttgtgttgtggaaggagatgaatacaacttgcagaattattctaagaggaaggtattgattataattgttgcagggtttaccagggatatcctgaggtgttgctgcggcggcggtggcaagtacaacttcaacctcagcgccggctgtggcatgccgggctccacggtgtgccaggatccgacggcctatctgtactgggatggccacttcacggaagcagcccaccgctacatcgccgacggctggcttaacagtataaaccaatgnnnnnnnnnn

SEQ ID NO: 2393 - DNA, 308 bp, Zea mays
  Peptide Sequence Number=SeqID_8736
  Probeset Number=SeqID_16796
agcttgcatgcctgcagttcatcttcagcagctggcagtacaccaccaggggcgggctggcgaccaccacgaccaccaccaaccccaccaacgtgtaccggagcaaggagttcattcccaccatgcgcaccatcgagtcgcaggcgtgcagcccggaggcggtcatcttcgggctgtaccggtgccatctagaggacgtggtgaaggtggccgggttctacaactcgacgccgaagctcaagttcgtgtgccggctcaacctgatgttgagcatcaacgtcgacaagaacagcgagcaggacctgcag

SEQ ID NO: 2394 - DNA, 704 bp, Zea mays
  misc_feature (41)..(41): n is a, c, g, or t
  Peptide Sequence Number=SeqID_8737
  Probeset Number=SeqID_16797
cccctccccccccccccccccccccaccccccccccccccnccctcccctccccgcccccccgcccccccccccccactgccccccccccccccccacccccccccccccccacacccccgacccgggccccacccccccagttcctcccccagggcccaaggccggagctttttgttccgtttttccccccaaaaaaacttcttgcgcagcccttcccccaaatccgagagatcaccaaccttttttcctaaaaaagggagtaaaagggaaccctcgcgtagcaaatcctttggcaaaagtcgtccttcaagggaaagcccctctcataccccccagttcgttctccaggtctgtgtccagggagcgctcagctggatctgcgaggtgtggtcgtcctaggtgggttataagatatgccctgtatttgcctctatcagaacttgtgttcttcgtttatttcgaacttgtagaaccgtatggatgtgtgccttgtcccccattatgttcattctgtgctatctttctgatgctatcttgctattgtgggtttgaacttggtaatttagtttacaaaatcattcgaaaaaaaaaaaaataatggtccacaacgtcgtatggggcaggattggtccttggaaaaaaaaaaaaaaaagaggttgttttttaaaggggatccaaaaattaccttaaaaaaaagggggg

SEQ ID NO: 2395 - DNA, 318 bp, Zea mays
  Probeset Number=SeqID_16798
gctcggtacccctgccatagaaggggttgagcgccagttaggtggcaacttctcagctccacacaatctcttagagactctcagagaacgaatgtttaaaccttctttgtcaaccattatcatagagaacacaaaagtagcaactgtttccctttcagatcctgtttgtgtagcaacccgaaaaatgcgcggcttacgtgttaattcagtaattattatggctggaaattcgcttcatgggatctttacctccaaggatgtgcttaagcgtggtgtgggcccaaatccttctcctgaggtaactttaggaagaaaggt

SEQ ID NO: 2396 - DNA, 391 bp, Zea mays
  Peptide Sequence Number=SeqID_8738
  Probeset Number=SeqID_16799
cattcatgagtatatacgtcggtggcatagcaacaaccaacatgggcgtgctagtacagaggacagacgccgccaactggggacgacggtcgccggccgagagggatagggagcggaggagatcgctcagagcgatcgaggcagctaatatggcagacgtacgtacgtacgtaccggtctctcggcggaggctcgtagtgcgcgcggctgatgccgagccaggccctcttcgccggcacggcagctcggtccatgcagttgcacatctttctcgacgtactgctgctgcctaatatctagccggcggctggaagatctcctcgcacgcgtgggtcggctccttggcagcactcactctcccccccacgggccacggccaagtcactctccc

SEQ ID NO: 2397 - DNA, 797 bp, Zea mays
  misc_feature (601)..(797): n is a, c, g, or t
  Probeset Number=SeqID_16800
gggatctacctactacaaatactccgcaattatgtgcggattctaaaattagtggaggaaaataatagaaaagagggtaaactgttggggctctgcgtggtacatgagtttacctactcatggagaagaggagtcaccctaagacccattcattttggctcgaaagagcaaaagtgcggagtaaacgaagtgttaattcgaggacgaatgtccttaaaaatatgtgaatgaaataacatcaattgagataataatgagtaatgaaatgtggaactcatctcatacgtcttagcataatccattttatcctctatcatattacaagaatttacaaacataccttcggcttcttgacacaagatagctcgaaagtacttcgaaggctaagcaagattaagcttgggcccttcaaaaggtgaatttatgcagggcactgtttacctatttataggggagaagtacaagtttgtataaaattacaagcatgccctcaaagtttacacacatgatttacaatgatataagggtattgttgtcctttctttttcttccttattgcgtaagtctcagacctcatttgcttcgtcacttctcacccgannnnnnnnnnnnnnnnnnnnnnnnnnnnnnnnnnnnnnnnnnnnnnnnnnnnnnnnnnnnnnnnnnnnnnnnnnnnnnnnnnnnnnnnnnnnnnnnnnnnnnnnnnnnnnnnnnnnnnnnnnnnnnnnnnnnnnnnnnnnnnnnnnnnnnnnnnnnnnnnnnnnnnnnnnnnnnnnnnnnnnnnnnnnnnnnnnnnn

SEQ ID NO: 2398 - DNA, 201 bp, Zea mays
  Peptide Sequence Number=SeqID_8739
  Probeset Number=SeqID_16801
ctgcttcttgtcagacaacttaaacttatatgttcagtcacgttcttatcgatctcctgaggtcatcctgggtttgccatatgatcagaaaattgacatttggtctcttggctgcatcttagctgaactgtacactggggaagtaagtttcaagctagagacggtgtcctgacggctggcgatgacgattggggtgggcag

SEQ ID NO: 2399 - DNA, 571 bp, Zea mays
  Peptide Sequence Number=SeqID_8740
  Probeset Number=SeqID_16802
cccccccctcggtggacggcttcaatgtcaggggcaagatcgtgctctgtttttgtgacgatttctgcgggagggttgacagaggtgccgtcgtgaaacgagcaggaggcttcggcatggtattggccaaccaattctgtaacggatacagcacattcgccgacgcccacgtcctcccggcttcgcacgtcagctacgtcgccggagtcgcgatcaagaagtacatcagctccgctgcgaacccgacggcgcagatctcctttcggggcacggttctgggcacgtcgccggccccggccatcacttccttctcctcgcgcggtccgagccagcgcaatccgggcatcttgaaacccgacgttacgggccccggcgtgagcgtgctcgcggcgtggccgacccaggtcggcccttcatcctcgtcggtgagtaccgggccgacctttaacttcgaattcggcacgtccatgtcggcaccacacctcgccggcgtcgcggcactgatgaagagccagcacccgtcctggacgccggcggctatcaagttcgctatcgtgacaacccgcccgac

SEQ ID NO: 2400 - DNA, 237 bp, Zea mays
  Peptide Sequence Number=SeqID_8741
  Probeset Number=SeqID_16803
tcccccagagacaactgaatacagtcctcactgagccaaagaatgccctgagaaagcaactcaagaaatcgtttaacactgaagatgctaagctgcactatacagatggtgcactcagaataatagcccaaaaggcgatggcaaaaaatacaggggcacggcgtttaagaaccatcgccgagaataacctcatggatcatatgtatgagataccggatgcaaaaaacaggggagaaa

SEQ ID NO: 2401 - DNA, 234 bp, Zea mays
  Peptide Sequence Number=SeqID_8742
  Probeset Number=SeqID_16804
ctgctgtatctgctcttggcatctacaacaaagacgggatagtagctgatgatggaaaggggctgttcagtgctgctcgtgtctggtggatgttccgtgtctttggacatgataatgcatgggtgatggatggaggtttgaccctatggcgcgctgctgggtatgatgctggatcaagtgcctctaacgatgccatcctaaaggccagtgcggctggtgaagcaattgagaaag

SEQ ID NO: 2402 - DNA, 431 bp, Zea mays
  Peptide Sequence Number=SeqID_8743
  Probeset Number=SeqID_16805
ccgagaagtctgcacacccggcgctgggttattacctgcgacaggtgcgctccggacttcaggacgcggccaatcgatccatggggccccaggacgcagcggagcttgccaagctcaacggccaatacaacagcctaaaggtgctccagcaggctgtcaccaaacgtgccgcaggcgcgggcggagatgtcgcgccgtccaatctctggtctctggtgaatgggcggcatggctcgacgtctgacatgcgcgacttggccaaactagggcagacggttctgaaagaccccatccccgattcggggaccgctcagcggctcatttcctacggcgcgctgacaggcggagcggcgatgcctcacacggcattggctctcgcagttgcaggcgccacgatcggtaggatcctcaatagttcactggctgcttga

SEQ ID NO: 2403 - DNA, 1004 bp, Zea mays
  Peptide Sequence Number=SeqID_8744
  Probeset Number=SeqID_16806
gttcctttcagaagatatcgttgttatttaaacattaaaacttgtttaaaattttatttcatgtctaaacatttagaagtaaattaaatctaatcatgttgcgaaccgctgtcaactcaataaacacaattgtttttcgttctaataaattaggacttttgagttgtcgatcgaaacatactttaccagacttgccatatgattacaatgctttagaacccttcatttcggctgaaataatgcaattgcaccattcaaaacatcatgcagcctatgtaaacaatttaaacatagcagaagaaaaattagctgaagcacaacataaaaaagctatttcagaaaccattgctttagctcctgctttgcgttttaatggaggaggccatataaatcattcgattttttggcaaaatttaagcccaaatggtggtgagccaagtgctgaattgttacattgcattgaacgctgttttggttctcttgaaaatttgcaaacacaattatctggagctgcagtcgctgttcaaggttctgggtgggcatggcttggctataacaaagaccgcaaacatcttcaaatcgcggcatgtgctaatcaagacccccttcaagcaacaacaagattaattccattgcttggtattgacgtatgggagcatgcttactatctgcagtacaaaaatgtgcgcccagattatgtaaagcaaatttggaatgttgttaactggaaagatgttagtgaacgttttaacaatgctaaaaactaaaccttaatttagtgtttacttatttcttacactaatcattcgtgtaatttgatctaattattttaatagtctaattaaataaatgattatttttgtttaatattaaatttgtagttatggtgatttaaaacttaattaatcacaaaatatttatgttactttaatattgtttgttttaaataaaaagtttgaataagaaaaaaaaaaaaaaaaaaaaaaaaaaaaaaaaaaaaaaaa

SEQ ID NO: 2404 - DNA, 735 bp, Zea mays
  Peptide Sequence Number=SeqID_8745
  Probeset Number=SeqID_16807
ccccggttcctctttagtcgacctgcagccgtttgacgaagccattctggcgctgtcgaccaccgagaagcctttctgcatttttgaggattttcagctgcgcggtaatctgatcgacctgcgcgatcccacgctgtttgagcgcgagccgcaggcgattctgcgcatgttttacgtgatggtgcgtaacgaaaccatcaccggcatctattccaccacgctacgccagctgcgctacgcccgccgtcatctgcaacagccgctgtgtcagatccccgaagcgcgccgcacctttatggcgattctgcgccatccaggcgcggtaaagcgcgcgctgctgccgatgcatcgccacagcgtactgtgggcctatacgccgctgtggggcaacattgtcggccagatgcagttcgacctgtttcacgcctacaccgtggatgagcacaccatccgcgtgttgcagaagctggaaagttttgccgacgaagccacgcgcccgatgcacccgctgtgcgtcgagctgtggccgcgtatgccgcagccggagctgctgctgatggccgcgctgctgcacgatatcgccacagggcgcggtggtgaccactcgattctcggcgcgcaggacgcgctggactttgctgagctgcacggcctcaattcacgcgaaatgcaactggtggcgtggctggtgcgtcatcacctgctgaagtcggggactgctcagcgtcgcgacat

SEQ ID NO: 2405 - DNA, 616 bp, Zea mays
  Peptide Sequence Number=SeqID_8746
  Probeset Number=SeqID_16808
acctctccatcaccatcctcctgttcgtcatctacttgtacgaggagatgtgggagttcttcgtcttcctgctctccaactggttcatggtgtccctgctctacaactacatctccaagccacggtggctgaggcacaactccttccggggcaccatgttctcggtgggtttcagcgtcatcatgtggctgaggagcaagatgacccagccgagcctaaccctcaagcagttcaccgtcctcaacgtccgtttgccgctcaagctgccgttcttccccgcgttcaccggcctggcggtggagaaaaagccagtgccgaacagtgtgatgagatccgtcatcgactacctggcgaaacgtggacatggtgccccgaactacgactacgacctcgaccgtggcaggtctgcgctgcggatgaacggcgtcttctacaagctgtcgtgggcgtgcgagagcgacagcgtcgccgagaccatcctcacgtggcacatcgacaccagcatcatggaggtgaaatgccgcccgctgacgacggcggtcagcagcgccacggatgaaacaacctcctccagcagggtggcccgtcatgctgtccaagtactgtgcctacctgg

SEQ ID NO: 2406 - DNA, 511 bp, Zea mays
  Peptide Sequence Number=SeqID_8747
  Probeset Number=SeqID_16809
cggtgatcacgctggccgccagttccgacacgctgccgctgactgaggtgcaggatctggtgaacacgcgcgtggcgctgaagctgtcgcaaatcaacggcgtggggatggtgaccctggcgggcggtaatcagccggcgattcgcgtgcagatggatccaaaagcgctggcggcgcacaagctgtcgctggaagacgtcaatacgctgatcgccaacagcaacgtcaacggttcgaaaggcggcttcgacggcaaatatcactcggtgaccatcgacgccaacgaccagctgcgcactgcggccgaatacggcaatctgattctcacctggcagaatggtgcggcgctgcggctgaaagatatcgcccatatcgagcaagggccggaaaatcgctttcagtcggcgtgggccaataaccgtccggcgattgtcatcagcgtgcagcgccagcccggcgccaacgtcattcaggtggtggatagcattaaaaagcagctgcccgtactgca

SEQ ID NO: 2407 - DNA, 297 bp, Zea mays
  Peptide Sequence Number=SeqID_8748
  Probeset Number=SeqID_16810
atggcaaggatgacgactccgcccgcgatcgtgattctcggcgcgggcgcgctcgacaccgcacgccgcatccaggcgcgctatccgggtgccgtcgtgcacgggctcgcatcacgcgtggacgccgacgtgccgttcgacgaactcggcacgcacctgcgcgaactctatgcgcgcgggctgccgatcgtcgcgctgtgcgcggccggcatcgtgatccgttgcgtcgcgcccgcactcgccgacaagggtgtcgagccgccggtgctcgcagtcgaggaagagggctcgaccgtc

SEQ ID NO: 2408 - DNA, 1102 bp, Zea mays
  misc_feature (1)..(70): n is a, c, g, or t
  misc_feature (715)..(1102): n is a, c, g, or t
  Peptide Sequence Number=SeqID_8749
  Probeset Number=SeqID_16811
nnnnnnnnnnnnnnnnnnnnnnnnnnnnnnnnnnnnnnnnnnnnnnnnnnnnnnnnnnnnnnnnnnnnnnaggaggcccctcgaagttcaggcggagaccgatggactcgaagcagtggagcccgtcgaactcgggcgcgaaccgcggccgcgcctcccgccggcgctcggccgccggggcccgctggtcggccgccttctcctgcctcggcgttggcgccgcgtcggccgcagccgcctggggccgaggccgccacgagagccgggcggacgaggaggaggagaggccggccgcggagatgtccgccggcgacgagctcaggatggagaaggccaggatcttgtccatggtctggtcggtcacagacgacgccccggcggatggaaatcggcagaggtgggggtccccttttcttgcttcgtgtggaactgttggtttctgctgtggcgtgctcttgcacctgcagttgcagttgcgtttggtgtgtgcgcgcgcttgccgcttgctggttggtggttgctgctctccgaccccgagctccgaaggccgcagcatcaggcgcgccccccctcgcgtgtgaccgagatggcgctgccgaatcaggggaccgttgattaccccagcttcaagctcgtcatcgtcggcgatggtggacctggtgaaacgacggatgcgaagaagtatatcccttgagagtttgagaagaaatatgannnnnnnnnnnnnnnnnnnnnnnnnnnnnnnnnnnnnnnnnnnnnnnnnnnnnnnnnnnnnnnnnnnnnnnnnnnnnnnnnnnnnnnnnnnnnnnnnnnnnnnnnnnnnnnnnnnnnnnnnnnnnnnnnnnnnnnnnnnnnnnnnnnnnnnnnnnnnnnnnnnnnnnnnnnnnnnnnnnnnnnnnnnnnnnnnnnnnnnnnnnnnnnnnnnnnnnnnnnnnnnnnnnnnnnnnnnnnnnnnnnnnnnnnnnnnnnnnnnnnnnnnnnnnnnnnnnnnnnnnnnnnnnnnnnnnnnnnnnnnnnnnnnnnnnnnnnnnnnnnnnnnnnnnnnnnnnnnnnnnnnnnnnnnnnnnnnnnnnnnnnnnnnnnnnnnnnnnnnnnnnnnnnn

SEQ ID NO: 2409 - DNA, 545 bp, Zea mays
  Peptide Sequence Number=SeqID_8750
  Probeset Number=SeqID_16812
tgcagcacagcgtcagcagcagcagcgagggcgcggcgacgtcgcacggagcgagcccaaacgagggcagagtgatgagttctcaccggaggcacgccatgatgagttctcaccgccgctcgttttgcccggctagtcgatccctgcgcgcgcgctcggctcggctcgggcgcgtcaccgttacgttgcatgacgcgcacatggcttcctcagggcgcgtgccatgcaaatgcagcggcaacctgaacccgattcgatcgatgcgtgcgtggcttcctccgtgtctccgtccgccaggcgtacgaaacgcaatcacgaaggcgcggggaggagaaggacgcgctatctggggggcgtggggtgtgcaaggaacgggactgctccacttgtcggcccctcgctcgccggcccggggcgagcggagcgggcggcacagcagcatgatcgtgtcgtcgacgacgcgcgcgcgtcgcggcagggcgggggcgcatcatggcggcgccggcatgcaggggccggccgtgccgttggggggatctttctga

SEQ ID NO: 2410 - DNA, 211 bp, Zea mays
  Peptide Sequence Number=SeqID_8751
  Probeset Number=SeqID_16813
tgcagctaaacacgcccttctatctacaagggacacttggtcacggtcttcttttgcactcgtcgacgacctctgatctgtttgtatcacatatgctgattgggttggttgtctagacactagcaagtctacttcaggctatgttgtcttccttcgtgacaacttagtctcttggtcctccaagtggcaaaacattgtgtcctgctcaagt

SEQ ID NO: 2411 - DNA, 413 bp, Zea mays
  Peptide Sequence Number=SeqID_8752
  Probeset Number=SeqID_16814
cttcgtctgttgggtttcgtccgttccccctgtgtttgggctcggcggttggcattgcattccggttcgcgtccgtctccttcgtcttgatcgcagggccccctggggttgtccttcccggtcgcttttgggtccttcggccggttcccgcctttgtggcccctttaggcgcctctgccgctccccttgccctggcttttgtgcccctttggccttccgctgtcagccgctcgccgtgtgcgcctttgcttctttctttgctgccggatggcgtccttgcgtcgctcttcctggcggtggggtgttctccttgttccgccgggccgcggcgtcggcgcttggtttcctctccggcggtgggtggcgtgccgtgcggtcctggcgcctcttcgctgcttgcttgcctctccacc

SEQ ID NO: 2412 - DNA, 207 bp, Zea mays
  Probeset Number=SeqID_16815
ctgcaggcgctggcctgggcccggcagaagaacggcaagcaggtgccgacgcgatggctggtgcaggtgccggggcatggcgtggatgtacaggtcgaggctgtggaatcgcaagcctggatggaaacgcggttcccgtattgggaggggccggtacgcttgaccgggagtgcgggtgggcgtgggtatctggagatgaccggctat

SEQ ID NO: 2413 - DNA, 463 bp, Zea mays
  Peptide Sequence Number=SeqID_8753
  Probeset Number=SeqID_16816
agcctcagccatagcgcgccgctgagcggcgtgaagccaaacctgcacaaaacgctgtttgcgacctgcattggtaatgcgctggagtggttcgacattgcggtatatggcttcttcgccagctatatcgcccacgccttctttcccaccagcgatgcgtcggtctcgctgctgctgacctttggcagcttcggcgtctcgttcctgattcgcccgctgggtgcggtggtgctgggcaactatgccgatcgccacgggcgtaaaaaagcgctgctgctctccatcaacctgatgatgcttggcggagccatcatcacgtttatgccgggctacgacagcatcggcctgctcgcgccgctgctgatcctgctggcgcgcctgatacagggcttttctgccggtggcgagtttggcagctccacggcgtttctggtcgagcattttcccgagcgcaaagccttta

SEQ ID NO: 2414 - DNA, 358 bp, Zea mays
  Peptide Sequence Number=SeqID_8754
  Probeset Number=SeqID_16817
tcatgtcgggtcttggcgtgcgctctccgtgaggggtggtcctgtgtcgtgtcctgcgtggtgccttgccccgggcgtctgtgctcgctccggggccgtgcggtggcgctgccgccgccggtcttgtgccccgccgtgtgtgtcatggcctctcggctgctggtggcttggtgccgttggccgtgctgcctgtccgtgcgccttgttcgtgtggcgggcctccgggttccgtgtgggtctcgtgcccgtgcggtgtctttgtgtggtgcgcggtgcccggtgggcccgcctggggttggggctcccggtcccccccctttgggtgtcggtgctggtgttcctgttcgggggggcggtg

SEQ ID NO: 2415 - DNA, 499 bp, Zea mays
  Probeset Number=SeqID_16818
attacatagatcggagtttttgagtagcaaataagagttcacaaaataaagtgcagcggatattcgaggtggtcggtatcgaggaaatgggcaaggcctagcccactactcctcgtgctcctctcctgccggagcaacatcccactcgaccgtccaacccggtggcagggtggtaggccaagtcacaccatcaaccatttcctgaatggtaccttgttgcaggagaagatcccaaaatccttctacccaaccatcaattagatagctccatcctcttgatgagaagacactggagtagactcctctttagcaaccacttcatcttgaatcttcactctttattttgggagctctgacagtccaagtctcggtgggtacatgaaactgctcggggaagtcgtacgttggccggtcgatgatgaaactaaacacgacgacgatttacggtggtgcgactacgttctggccactatgaggtgaaggagctggtggccgtggt

SEQ ID NO: 2416 - DNA, 558 bp, Zea mays
  Peptide Sequence Number=SeqID_8755
  Probeset Number=SeqID_16819
ttcatgcgcacgcatctcgccaccttcgtggcggtggtgatgctcatcccgaccgccatggccatgtacctccgtcttaggttcgttctgatcggcctcggcattgtctactggttcatcggccagtgggtgatggtccgcaccaaggacgaccaggcctcagtcgaggagctattatcacagcgtttttgcccatgtcagcgattccatcagcaaagtgtcggtgctgcacagctacaaccgcatctaggatgaaaagaagatgctgaaatctttcacttaaaagctgctgagcgcgcaagatccggtgctcgacagctgggccttctccagtgcgatgaacaggacggcttccaccgtttcgatgatgattatcgctcgtcatcggcactgtgctcgtcaagaacggcgaattgcgagtagaagatgtcatcgccttcatcggtttcgccaatctcctgatcggctgtatggaccagatgcgccaattcgtgacgcaaagtttcgaagcccgcgccaagctcgaggacttcttagtgctcgaggaggcctttagag

SEQ ID NO: 2417 - DNA, 460 bp, Zea mays
  Peptide Sequence Number=SeqID_8756
  Probeset Number=SeqID_16820
ccacagaaggcacagcgaccagactttttttagagcgacaccgagggagggcggggcgcagcaggaaagcccgcccccgaacagaaccgacagagaggggccacgacaggccacagaccgggcccggagggacacaacaagaccacacgggggcacgcccagacgcacgccacgccaaggaggcgcccaagcaggcaacggaaagggccacaagcctgcacgcgcccagaaacgacgcacccaggagaatcaaagagacaccggccagcggcgagtagaggcaagacccccaccccgacgacgaaggacaggacacagacacccgacgggaagggccgcaaccagacggaggcgcaaagaaaagaccaagcagccagaccacaccaagagacagccggaacacagctggccagacctaagactgccccgcaagaccccacactcccagcaaaacgtgtaa

SEQ ID NO: 2418 - DNA, 234 bp, Zea mays
  Probeset Number=SeqID_16821
tcttgcatgcctgcagtgctgtagccccagcttcacaggtccaggaaaggccggtggagcgaaggcctgagctgggcgcccagccattcccctcatgggcatggcaagcgcagggctcccctcacgtgccgttgcaccactctgcagcatcatcaggattctctaccgccggcgccgttcccgactacagacccgttcttcttcccgacttagacggcgtggcgtgtgtggaat

SEQ ID NO: 2419 - DNA, 557 bp, Zea mays
  Peptide Sequence Number=SeqID_8757
  Probeset Number=SeqID_16822
atgggaaagggaaacaggcaccaccaacaaaaccaggacgagggaacccaagccggggatgcaaagggcccgaccagcacaaaaaaggggcccccacggaaggaaagcaccaacaaggagacggaaaagacggaacgcgagcaggagccaacgaaaggcgaaccgaaaactgcgaagaccgagggcgcaacaaccctcgaaaggacacccacaggggggacgcacacagaaaaacgcacaccctcaaacgggacaggcaaggctcccggaagagaggagagccgcgagacagcagaaatgaaaaaagaaccacgggagcccagtggggcagcaaacggacctgcggggcagaaagacgaagccaaaagggcggagaagacggaaatcgaaacagctccagggcacaaagcacaaacagcccgctcagaaccgggggcaaaacacccaggagacccagcgggcaaagcccgggcagggggagccgggagaacgaacccgcaggcaagcaaggggggcaccggccacccggggacaaacaggagaccggggaaaacccc

SEQ ID NO: 2420 - DNA, 589 bp, Zea mays
  Peptide Sequence Number=SeqID_8758
  Probeset Number=SeqID_16823
atgaaccagaaagcccgctacccccgcatgctgccggaattgcgcaaagccaacctggtcgaggcaaaccctggcatgcctcaagcgccatggcttccagggcgcgtcgatccgcaagatttcggccgaggccggggtttcggtcgggttgatcagccatcactatgcaggcaaggatgagctggtggccgaagcctacatggcggtcaccggccgagtgatgggcctgctgcgcgaggccatggcccaggctgcgcccaatgcccgcgaacggttgtcggcgttcttccgcgcctcgttctgcgccgagctgctcgacccgcaattgctcgacgcctggctggcgttctggggcgcggtgaagaccgccgatgcgatcaaccaggtgcatgaccattcctatggcgaataccgcaatgaactgagcgggctgctggccacgctggccggggaggagggctggcagggcttcgatgccgacctggcggccatcagcctgagcgccttgctcgatggcctgtggctggagtcggggctcaaccccggtaccttcacccccgagcagggcgtgctgatctgcgaggcctgg

SEQ ID NO: 2421 - DNA, 629 bp, Zea mays
  Peptide Sequence Number=SeqID_8759
  Probeset Number=SeqID_16824
atgcatgagctaggaggtaaggaacaaccatacgagggcgagcagagcagagagcacacggcgcgccgagctagcagcattgcccaatctcgcggcggggagagattcgtgagcgcggaggcgcgaatcttcgacgcagcgacggcagccatgccggagtcctggagacccgccgaggcgaatgcctcgtcgcagccggcggcaggcacgtccggcccctcggctcagagccctggcaatgacgccaagggacgcgcggcgggggaaacccccggcgcggcggaggcggcggcgacgcgagtgccgttccacaagctgttcgcgttcgccgactccaccgacgtggcgctcatgctcctgggcgcgctcggggccgtggccaacggcgccgcgatgcccttcatgaccgtgctcttcggcaacctcatcgacgccttcggcggcgcgctcagcatccacgacgtcgtcaaccgggtgtccatggtctctctcgatttcgtctacctcgccatcgcctccgccgtcgcttccttcgtccgtaagtccaccttcagtggtaacataacactcccactagagtcagacaccgagcacacgcacgcagactaaggctgctcagggtaccgagc

SEQ ID NO: 2422 - DNA, 361 bp, Zea mays
  Peptide Sequence Number=SeqID_8760
  Probeset Number=SeqID_16825
atgcgccctacgggtcgacccacaacgccggccggagacctgcccaacatgctgggggcaggcacaggggcgccaagacatgtgtcaggctgcccgaagctcaggtgggtgaaggcaaaggacccaaagccaggcggggaccacaagccaagaactaaacccgaccgcagggccatagccgcggcggctcaagttgagaacacccagcgagagcacaaacaacatgacaggggagaaacaggaggtaacaggattgacaacacaaggacaggagccagtgcaacaaaggaacggaaggggtggccgagcaacgagcccacctactggaacaacattaggcatgtgcactgcgcagaagcca

SEQ ID NO: 2423 - DNA, 493 bp, Zea mays
  Probeset Number=SeqID_16826
tttaagatatggaagatacttgtttgcaaccgatccgaaatttcgatccgcgttttccgggcagcgaacgagcttgggatcaaaaccgttgcgatttgggcggaagaggacaagctgtctttgcaccgcatcaagacggatgaatcctatcaggtcggcaggggtccgcatctcgccaagcatatgggaccgatccacagtgatctttcgatctagtagattatccgagtggcctagctctccggagcggatgcgatccatatcggttatggtcttctgtcgccaagccctgagttagtggaggcctgcaacaaggccggcatcaccatcatcaggctgacaccggtcacgatgctccagatcggcaacaaggtcgccgcccgcaatctgtcgatttcggttgatgtccccgttgttgccgccaccaatcctctgccagacgatatctcggaagtaaagcgtatggaggaggaaatcggctatagcgtgtcat

SEQ ID NO: 2424 - DNA, 253 bp, Zea mays
  Peptide Sequence Number=SeqID_8761
  Probeset Number=SeqID_16827
aacgggcgcgccaccgcggacggggtcaaccagggcgacaagagcctgaacggccgctacaagctttgtgatagcgccgacaccgaaattaccgccactgcccagttggtcggggggatctcagctgatcatcggcgattccaagggcggccttgcccagtggttcatggcccgtgacccggatggctaatcgcgcttcaaagctgatccggaccttccagatgggcaagggagcggtcgtgcagattgacgc

SEQ ID NO: 2425 - DNA, 339 bp, Zea mays
  Peptide Sequence Number=SeqID_8762
  Probeset Number=SeqID_16828
atggccgaaaaagagacctggcatgagacgctgcatagcggctttggccaatatttcagcgtagacaatctgctataccgcgataaaaccgcgcatcaggatctggtgatctttgagaacgccgcgtttggccgcgtgatggcgctggacggcgtggtgcaaaccaccgagcgcgatgagtttatctatcacgaaatgatgacgcacgtgccgattctggcgcacggcaatgcccggcgcgtattgattatcggcggcggtgacggcgcgatgctgcgcgaggtcgcccggcatcaaagcgttgagcacatcaccatggtggaaattgatgccggcgtg

SEQ ID NO: 2426 - DNA, 992 bp, Zea mays
  Peptide Sequence Number=SeqID_8763
  Probeset Number=SeqID_16829
atgccgtactacatcgacggctccgtatttggactcatcgccgggcagtcgtacggcgctgtggcgttcctgcacatcgatcacaccgacgagacgcggatcaccctcccggccgtcaccggaaccaagctggtcacctaccaactgtcggtcaacttccagttccaatacctgcccgcagcaggcggaaccgacacggcggcatgggcggacggcctcgacgcgatcgtggacgggctcaaagacgcgattcgtgccgacccgaccttcggcgcgcccgatgtgctcttccaggtcgcccaaggcgacgccaatggggcgaacagcacagacgtcaccgtcgacctggactacccacagcaggaccccaacggcggccgcatctacttgaggcccgccgtgaccgcgtaccggttcactcactcatccccgctgatctacctcggcctgtccgtcggtgaggcgaacgtgacccgcgccgacaccgacttcaaggagccgtcgcccgggtcgacgctcgtcctcttccccggcgacatcatcgacctgcccgacggtgccgaacccggcgcgtggctcgcgcccgtgcccgccgagaagcccgcgaaggaaccccagccggacccggcgaccaccaccgaccctgcgaccgagacggccgcccaggacgccgcgcccgcggctgacaccaagactgagatgaccaaccccaccttcggagcgtcgaacctccagtggctcggtgtcgcccgcgaagacacctacggcaccgcggctgccgccccgaccctgttcgttcccgtcgactcgccggcctggacgcacccgacggagaatctcctcgattcgaacctgcgtggttccatggcgacggacttccagcagcagaagggtctgcgctacgaccaggtgtcgttcaccacgtacgcgtacctcgaccaggtgttcttcttcctccggtcggcgctcgggctgccggacgtgatctccgg

SEQ ID NO: 2427 - DNA, 237 bp, Zea mays
  Probeset Number=SeqID_16830
atgggtcagagcatctccctccggtaccaaagcacggcgcgccagaggggcccaaagcccatcagcatccgcatccccgtccatgatgtttcagttccggtggaagtcaacgataatggcggggtatgtggagtagttgttgtgatgcccgcagtccgcaaaaaagaagtcccgtcccagcatccccactgtcccaacggtgcaggtccacacataaagcgggagtcaagatcagag

SEQ ID NO: 2428 - DNA, 335 bp, Zea mays
  Peptide Sequence Number=SeqID_8764
  Probeset Number=SeqID_16831
tgcagtgggctcaagctatcgatagtttggaagtaggacaaccaggttcagacaaaagttttggaatgcagcaacgacctgatggtgatgttgagattgatgagaagttctgggagcaagattttgaaattcctagctgccatcaatgtggtggagtgctaaagcctgatgttgtgatgtttggtgataatgttcctcaagagagagctgaaagcgctaaggaggctgcaagaacatgcgatgcacttctagtggtcggttcagcactaatgacaatgtccgcttttcggctggcaaggctggcacacgaagccaatgctcctatagctgcaggc

SEQ ID NO: 2429 - DNA, 1226 bp, Zea mays
  misc_feature (1)..(548): n is a, c, g, or t
  misc_feature (1226)..(1226): n is a, c, g, or t
  Peptide Sequence Number=SeqID_8765
  Probeset Number=SeqID_16832
nnnnnnnnnnnnnnnnnnnnnnnnnnnnnnnnnnnnnnnnnnnnnnnnnnnnnnnnnnnnnnnnnnnnnnnnnnnnnnnnnnnnnnnnnnnnnnnnnnnnnnnnnnnnnnnnnnnnnnnnnnnnnnnnnnnnnnnnnnnnnnnnnnnnnnnnnnnnnnnnnnnnnnnnnnnnnnnnnnnnnnnnnnnnnnnnnnnnnnnnnnnnnnnnnnnnnnnnnnnnnnnnnnnnnnnnnnnnnnnnnnnnnnnnnnnnnnnnnnnnnnnnnnnnnnnnnnnnnnnnnnnnnnnnnnnnnnnnnnnnnnnnnnnnnnnnnnnnnnnnnnnnnnnnnnnnnnnnnnnnnnnnnnnnnnnnnnnnnnnnnnnnnnnnnnnnnnnnnnnnnnnnnnnnnnnnnnnnnnnnnnnnnnnnnnnnnnnnnnnnnnnnnnnnnnnnnnnnnnnnnnnnnnnnnnnnnnnnnnnnnnnnnnnnnnnnnnnnnnnnnnnnnnnnnnnnnnnnnnnnnnnnnnnnnnnnnnnnnnnnnnnnnnnnnnnnnnnnnnnnnnnnnnnngcttgcaccaacacgccaccttaagcttcgctttgcccgcactcgcacacagttgcgaccgcattgcatcgtgccgccggctgcagcagcgaagacgaagctctggtacatggcgagcagcgcggaggagcgcttcctgaggcagctgagcgcgagcaacggcggcgacgaaggggtctgcggcggccagcagctgggccacaaggagtactgcgcggagaggaggggctcccggcggtggtccaggaagcgggccgccgccgcgaggggctactgcggcgggtacgacgactacgacgtgaagcagcaggcggaggccgcctctgccgccgcgaggaagcgggtgatagtggtggtggacgacacctcgggctccaagcacgccatgatgtgggcgctcacccacgtcgccagcaagggggacttcctgacgctgctccacgtcctgctgccgcactccgcctccggcggcggctgtagcaggggcgaggaggcctcctccctcgccaactcgctcggcacgctctgcaaggcgtccaggcccagaggtggaggttgaagccctggggatccaaagcccaaactgggcaccgtgctcagccaggtgaagaagctggaggcctccgtgctggtgctcggccagggcaggccgtctccctgctaccgctggctaagctn

SEQ ID NO: 2430 - DNA, 337 bp, Zea mays
  Peptide Sequence Number=SeqID_8766
  Probeset Number=SeqID_16833
gcttggagcaggagcagggaggcaggaagggacgacgccgggagaagacgacctcgcgcggggataaaggcttcatcgaaggatgcatcgcggcgctctgctgctgctggatctgcgagatgtgctgcgactaggcacgcagctagcgagaccatcgacctcctgcgtgaccctgatcgagtcaagcaaagtggggcggtgcagtatgcggatggggacaacggctcgtcgtcgtcgtcggtcggctacggctggcccgccgcccactactactcctcccctgaccggagtgcaccgcccagcatgcaccggccaccgctgttcgtgcgtgcgtctc

SEQ ID NO: 2431 - DNA, 404 bp, Zea mays
  Probeset Number=SeqID_16834
ggttgctccctcgaggatggtggggtcaacctccgctgcgacggcgacgacgacagcctgcgccacgccattgctgtcatcaacctacagttcggatggtgtatggtcctcgtgacgctgttcgtgctcgggctttacgtccacgtgtgcaaaaagtatccagctggggatggggaggtaatatacgggcggctgccggaagcggaagctgcagacgaggacgacgaccaccacaacatgatgaagacgtgcaactgtaactgtaagcaggcggtgcacgacgtgcatgagttcacgtccatggagatcgaggagggacaaacctccaagccgaatcggaaggatactcctccagacggcacaaacatacgcacacaaaagcgggttccttacaacgcaatcct

SEQ ID NO: 2432 - DNA, 459 bp, Zea mays
  Peptide Sequence Number=SeqID_8767
  Probeset Number=SeqID_16835
agacttgctaatggtccatgggctagactttgtgccttgtacgtgggcagcggattaacacacatcttgtggcttttgtacaccagactcaccgccatccaatcgatggtggtgttagttagagtcaagttcctgcccgtgtaccaggcaacgaaagaagaacggttcgtagtacgagagtcccagggttcaggagctcccacatgttccgccagagtagagaggtaccgtcacaaggacagtacaacacgcacaggccgtctcaagaggtgttgggtgtgtagtcttattcgtcaggcggaagacaatcatggagcggtgctcagcgtcgccagagttgcgtccatcgtagtaggcggttggctgtggccgcacgccgttgttcggactccgccaacgagcatctacgcgcatgagctcgtggcgatgatgtcagcgtttggtcgcagggtcgggtaa

SEQ ID NO: 2433 - DNA, 1213 bp, Zea mays
  misc_feature (1)..(39): n is a, c, g, or t
  misc_feature (1152)..(1213): n is a, c, g, or t
  Probeset Number=SeqID_16836
nnnnnnnnnnnnnnnnnnnnnnnnnnnnnnnnnnnnnnngctggtaccgataccgtggatctggatttgctatgttttgtactgtggtcgagtgtaaggtcagttcgtaatacaatcaatctgcgtggaacaatttgatatgcttgaatatgctagtgagatcatttcgacaatgaaagttgagaacagaagttacaatgtcaaaaaaaaaaaaaaaaaaaaaaaaaaaatccgctcaggccaatcaacagaagtgacgcgagcacgagcacacatcccctcccttcttcggttattcctcgttgcgtgccctcgccgcagacctctgccatggcggaccagctcaccgacgagcagatcgcggagttcaaggaggccttcagcctcttcgataaggatggcgacggctgcatcactaccaaggagcttggaacggtgatgcgctcccttggccagaaccctaccgaggcagagctgcaggacatgatcaacgaggtcgatgcggatggcaatgggaccatcgacttcccggagttcctgaacctgatggcgaggaagatgaaggacacggactcagaggaggagctcaaggaggccttccgcgtcttcgacaaggaccagaacggtttcatctcggctgccgagctccgccatgtcatgaccaaccttggcgagaagctgaccgacgaggaggtcgacgagatgatccgtgaggccgacgtcgatggcgacggccagatcaactacgaggagtttgtcaaggttatgatggccaagtgagggagcggtcccccgtgaaataagtatctatggattgaagcggattatcaggcacacaagctgtactttgtcatgtccctttgagtacgcatcagtgtcatgcaggtgggttatgtcttggtagtggtcccgtttaggcgggtgtagtcatgggaacgcgacctcagatacctgggttcttttgattggggatgttatcttgcattattgcaccctgtaggatttgttgaagctcatattttccaggggttttggatcttttgtgctagtcttgtgtctttgtgtatgcagaggctgagctaggattatggtatgtaagggagccaactaattcatcaatactatatgatgttatcaagcttaagtacttannnnnnnnnnnnnnnnnnnnnnnnnnnnnnnnnnnnnnnnnnnnnnnnnnnnnnnnnnnnnn

SEQ ID NO: 2434 - DNA, 212 bp, Zea mays
  Peptide Sequence Number=SeqID_8768
  Probeset Number=SeqID_16837
atggttcacatatcagatattaaactgataagaacagatactacacttgatcttagccaaaaggccgagaaaggtatgctttgtacagccggcctccgtctccttatgtagcgagcgcgcgcctccgcgctgctttggctgggcgaggtgggactatctacctagtgtacatatataacaaacaagaaggcgtgagaaactattgaacatgt

SEQ ID NO: 2435 - DNA, 528 bp, Zea mays
  Peptide Sequence Number=SeqID_8769
  Probeset Number=SeqID_16838
atgcctgcagcgccgcctgcccaggtcggcttccgctccaagctgaaggccgagagccagcaggtgttcctgtaccagctggccaacctcaaggctgacgtgatcgacgtggtcgagctgcacaaggctggcctgatcgacagcaaggccaagaaggtgaaggtggtgctgaagggcgagatcggtcgtgcggtgaagctgtcgggtctgctggccacggccggtgccaaggctgccatcgaggcggccggcggcagcgccaacggcaacgcactcggcaagctcggcaaactgaccgagctccgtcagcgcatcttcttcgtgatcggtgcgctggtggtgttccgtctcggttcgttcatcccggtgccgggcgtgaatcccgacgcgatgaccaacctggtcaacggcaacggcctgatggacatgttcaacatgttctcgggcggtgcgctggcgcgcttctcggtgttcgcgctgggcgtgatcccgtacatctctgcgtccatcgtgatccagatgatgggt

SEQ ID NO: 2436 - DNA, 215 bp, Zea mays
  Peptide Sequence Number=SeqID_8770
  Probeset Number=SeqID_16839
gcgcggcgcacgtgcaacatctcctgtacaccgcaatggctacttctatcagtgaccgaaaaactccctcagagcgtggttgatctactgaaagctcttgttatcaatatccaccattatctgctgttgtttagcttgatggggttctcagttctgttcgacggcatccaaacacctggctttggtatagccaccagatacatgttcactatgag

SEQ ID NO: 2437 - DNA, 212 bp, Zea mays
  Peptide Sequence Number=SeqID_8771
  Probeset Number=SeqID_16840
ggggtggctcttgtctgtggccgtttgtttggtcctccggttgcttgtgtgtgggttggttttgctgccctttctgtggccgtgtgtttccggggtgttggttggcctggcgtgcttttgttcttcggtggggtctttcgttttgttcgtgcgggattgtacgctcccccctttgggcggttgccctccgctgtgggaagtcaacattccct

SEQ ID NO: 2438 - DNA, 214 bp, Zea mays
  misc_feature (46)..(46): n is a, c, g, or t
  Probeset Number=SeqID_16841
cacctcccaaaccgagtggccgatactggagaccaactgttttganaggctaaaatgatccaaatcctgctgtatcagctatagaggaaagcaatgctcttgccttggctattgttccaacagacaactggtaaacactagcatcttcacgacacggggtttgatcctacaggatgggaactcgcccttgttactgcacctagcaacacgactt

SEQ ID NO: 2439 - DNA, 328 bp, Zea mays
  Peptide Sequence Number=SeqID_8772
  Probeset Number=SeqID_16842
tgtggcacccatggtcctcgttgctgctttcacccacacaatcaaggttgttgttccatctgtcctccttgatctcattgtagcgcaactttccctcgctaggcctgatgagacgtcgcttgttcatgagctcgaagggacgggcacactcggcgaggcctacatctggcaaccgatcgggagtgggatgaagcgcggggaggagggcgtcgatgaagaaccgaaggcgttagagccgtcagagaagaaacccttgcgccgtgaaaacctgggtcgctggaatgggatcgccgccgaggaggacgagactcgcaccgtgcaccgctga

SEQ ID NO: 2440 - DNA, 406 bp, Zea mays
  Probeset Number=SeqID_16843
gggttggtgatcctgtactgcagcatctgtgaaaaagacgtgggccgcgaacttggcgtccatggcgctgtactgcgttgccgacgtgtggctgagctgggccatgctcgggctaccagatgaccttatgtcagaagctgttccctttctggggcaaggccggccactcgctcggtcagggcttcctccttagccacgcggcgcacccggcgacgggccagatcactcccctgtatcccacggctatcatggtatacttccagtgcgtgtaccccgccatcaccctcattctgctcgacggctccctgatcttccgtatgaactttaaggcggcgatgccttttctcccgcttgggttcaccttatcctactccatcggcgccttctatatctggggcggcggctc

SEQ ID NO: 2441 - DNA, 392 bp, Zea mays
  misc_feature (101)..(101): n is a, c, g, or t
  Peptide Sequence Number=SeqID_8773
  Probeset Number=SeqID_16844
tgggttcacgcgtacgcagctcgggctcaggattcagctcgagggcagcgaatgttcttgggaaatcaggaatgttttaccttagtcccatgttctaacantgacagaagctgcacaacgagcccttgattgggctgtcaatgagaaattgaaatcaggtgaggatggagaagtaaccgccaatcatttgctactggacgtgggtatggtcagataaagagtcggctggtcataaaatcctgtattcgcttgagctttgacgatgagatagccagtttactggccaaaacggctgaatattgttatattatccatggaaaaggcgtgtactgcacaacggatcatttcgtggtttctcaaatcttctattcatccgctgcaggctggtgaag

SEQ ID NO: 2442 - DNA, 265 bp, Zea mays
  Peptide Sequence Number=SeqID_8774
  Probeset Number=SeqID_16845
tggttcttccgcgcccggttaatcttgatttggtggttctgggttaagttagccacaggattccggttaaaccttaagggacggccaggttcccttctttccaccggtgggcccccaccttaagttccttcaccaaggccccattggttccacccgcgcacaccgggtggtgacggttcttgcaaaccaaagggcaatgttgaagaccatcataagggcttgcgtaggcttggccccagagaccaacatgatcttgaagtacaag

SEQ ID NO: 2443 - DNA, 662 bp, Zea mays
  Peptide Sequence Number=SeqID_8775
  Probeset Number=SeqID_16846
gcgcggtgcccatgaggtgagctttactgtgctgtcgatgacggtgtcgctggtggcggtgtttatcccgattctgctgatgggtagtattgttggccgcctgttccgggaatttgcggtgacgctgacggtctcgctgctgatctccatgtttgtctcgctcagcctgaccccgatgctgtgcgcccgactgctgcggccgaagccgcaggtcacccggcggccgcatccgctctatcagctaatcgaaaatgcgctcaacgcgctgctggccgcctacgcgcgtggcctggcgtgggtgatggcgcaccagaagattaccctgctgagtttgctgctcaccgtgctgctcaatctgtttctgtttagcgtggtgcaaaagggctttttccccaatcaggacaccggcctgctgatgggcgccctgcgcgctgaccagaacatctctttccaggcgatgaagccaaagatgctggcgttcaccaaaatcattgaggccgatccggcggtagacagcgtgatgtcgtcaatgggcagcggcatgtttggctcgcgcaatagcgccaacttttttgtccgggtgaaagattttgaccagcgcagcgccagtgccaccgaaagggctacccggctgagccaaaaaaaccgccatattgccgggg

SEQ ID NO: 2444 - DNA, 1194 bp, Zea mays
  Peptide Sequence Number=SeqID_8776
  Probeset Number=SeqID_16847
aaatccttgctgccctccctcctccgacgccggaggccatcagaaacgcgcgtgcgcgcccgcgcaaccaccaccacaacccctttcctatccacgttctccggcctcgctcctactgtctcccggtcggccgcccaccggccatcgttcgtctcatcccatgggtgttggggcgatggaagcctcttctccggccggcgacgacgtcggcggcacgggcatcgaggacctcccggcggacgtcctcgccctcgtgctccgccgcctggatggcgcgtcgctggcggcggtcggctgcgcgagctccggcctccgcagcctcgccaccgacccggccacgtggcgggcgctctgcttcgccatgtggccctccgtccgcgacctgccctgcacaggccgcgtcgacggcggtcaccgggcgctcttcgccgacgccttccccttcccgtgctcggtctcccctcccacgccgccgcagcccctgcccgcgcgcctcgtgtcggccgtcgacctgcgccacgcgggggtctgcgtcctgtcgcgcgtcgtggagacggacgccgcctccgactggttcctgggcgcgccgttccgcgtcgacgcgctgctgcaggagggcttcacgtcgccggccgccgcggcgatcgcgccggccgacctcgagctcagctgggtcctcttcgacccggccaccggccgcgcgctcaacgcgtccagccgccgcgccgtggccgtcgaccgcaagtggctcacgggggacaccgtggcgcgcttcgccgtcgtgctcggcggcggcgtcgcgctcgacgccgccgtcacgtgcgacgagcgccgcggccacgtccgggaggtcagcctgcgcgtcgaggacgccgacggcgccggcgtcagcggcagggacgggctggccgccgtcgccgccgccatggccgcgcccaggcgggggtgccgcggcgcggcggaggacgtggccagggtcaggtacgaggacttccacagggagaggagggtgcgcaaggagtggaaagccaagcgcgagggcatcctcgacctctgctgctccggcgtctgggccgctgccttcctcggcttccagctcatagctcacgtcccaggtgatgagacagtgtcctctgctgagcctgtggccttagtcggtcgaaggaccacgtcccctgcttctgctttttatcc

SEQ ID NO: 2445 - DNA, 714 bp, Zea mays
  misc_feature (601)..(714): n is a, c, g, or t
  Peptide Sequence Number=SeqID_8777
  Probeset Number=SeqID_16848
atggattgggatctcaacgcggcgggcgcgtgggacctcgcggagctggagcgggaccacgcggccgcggcgccgtcgtcggggggccacgccgccaatgctgccgcggcgggcacggggacggagagccgcccgccggcgcccggggcagcaggggcacccgccgagtgctccgtggacctgaagctgggcgggatgggcgagtgcgagcccggcgcggcccgcagggagagggaggccgcggcgggggcggcgaagcggccgcgccccgccgggcccggcgggcagcagcagcagcagcagtgcccgtcgtgcgcggtggacgggtgcagggcggacctgggcaagtgccgcgactaccaccggcggcacaaggtgtgcgaggcgcactccaagacccccgtcgtcgtcgtcgccggccgcgagatgcgcttctgccagcagtgcagcagtctgggctctggagacggggcggatccacggacacgtgagctcctgcccttgcttttccgcgagcggattctttctttcacggccttcggcgacgggatgtcccccggcccctactctgccagtgccattttttcttcctcggcgtcgnnnnnnnnnnnnnnnnnnnnnnnnnnnnnnnnnnnnnnnnnnnnnnnnnnnnnnnnnnnnnnnnnnnnnnnnnnnnnnnnnnnnnnnnnnnnnnnnnnnnnnnnnnnnnnnnnn

SEQ ID NO: 2446 - DNA, 497 bp, Zea mays
  Peptide Sequence Number=SeqID_8778
  Probeset Number=SeqID_16849
tgctgcctgcagccagggagttgctgcgtcaccctccaagctccacggcctcactagaggccatgaagcagtggcaggacgacgtcgaccgactgctcggcatggcacattctacctcgaccaggtcgaggccacggtcattccggcgccaacatgaggcatcagcgtctgtgcactcaccctcagtaaggggtgcacagaccaacgacctccgggcagagctcaaccgtaggcgtgcgggagaggatgctcgagtctctctagagagggcgcgtgagcgccgacaaaacatcgagggtcgtaacctcgatcaagactttgctgcggtagcactgcaacctccagtgggcacccggttccaggcgggtgtccccttggccgacgtaggctgcgccgctctcgtggatcatctccccgcggcgtcctggccacctaagtttcggtcgcacctgttggaaaagtacgacggtacgtcaaatccgtcggaattcctacag

SEQ ID NO: 2447 - DNA, 240 bp, Zea mays
  Peptide Sequence Number=SeqID_8779
  Probeset Number=SeqID_16850
gtgccagcatgtcccagctgcagaacgtgtggagctctcccgaagcggcatgctgccgctgtcggccgtcctcagccgcccaccaggaaagggggaggagcccctcctccctcccccctcttccctccacccacagggcagtgcgccgccgcaagtgtggctgcccagtgctccagccgccgccgctccattgcttcagcccattgctccagcccattgctacctctgcgccagccgcca

SEQ ID NO: 2448 - DNA, 416 bp, Zea mays
  Probeset Number=SeqID_16851
tgcagtatcgcttcgattcgcagcaaacctttacccgcgcgtttaaaaagcagttcaatcagacacctgcgtggtatcgccgctcatcagagtggaactcgtacggcattcgcccgccgattcgcctcgatgattacccgatgccgcaggcgcagtttgtcacgctgccggaaacggtgctggtggggcaaacgcaaagctatacctgtacgctggagcagatctccagctaccgcgacgagatgcgcatccacttctggaagcagttcctgctggagaccgataccgtgccgccggtgctgtacggcctgcatcaggtacgcgccagccatgagaaggatgatgagcaggagattctgtacaccacggcggtgccggccgaccagcaggcgctgagcatgcagtcaaaccagagc

SEQ ID NO: 2449 - DNA, 317 bp, Zea mays
  Peptide Sequence Number=SeqID_8780
  Probeset Number=SeqID_16852
atgcgcaccccaggggaacggccaaaggagaacggaggcgcgaacacaccgcgggagaccagcggaggacggacccgaggcaccggaccgaccgcgaaacgaacgggcccagcccagacggaggcgcgggaggaaccacgagacggccaagcccagaacaaccaagcacaaggggcgccccccggcgcggggcccacgcgcgacaagggcgggacagagcgggacagggcccgtccagacgccgcaaaaccgggacccgcacccaaggcggacagggacccacgaaagagaacggcagggggaggcaccagacgccc

SEQ ID NO: 2450 - DNA, 783 bp, Zea mays
  Probeset Number=SeqID_16853
ggatgaatcgcaacgaggcggccaaacttgacggcgctcgtaagtcattgacttctgacagcacagaaagtgatatcctacaagcactccagtatgttgatgagatatgtcagagaagtcgatccaataggcaagctgcgagaagagatgggttgataatcatgattgctgacttgctgaacaatagcagtacgaaagtacggcaagcggcactagggactctttgctccattgcaaaagatgacaatgacaataatgttgagattgccgctggagacaatattcgcacaattgtaaagttcttaaatcatgggcagactcaggaaaaggagcacgcggtgtcactgttgtttgaactttcagagaacaaggctctttcagaaagaattggcagtgtttctggagctattcttatacttgctggcttgtggggcagtaaagtagaaaactcgctcattgctgacagagctgagaagacattggaaaacttagagagctgcgaaaagaatggtagacagatggctgaaaatggtcgattgcaacccctgctgtggctgcttcttgatggttcacctgtcatgcaattacctatggctgcatacctcggagagcttgttctaagcaatgatgctaacgtacttgtggcacaaaaggctggctcctcactagtcaatatcattgaaaaaatggaatagagaggccagttaagctgctctggtggcattgaacctaattcttcttttggttgcttgtgcatagattttatttgaagttggtattttt

SEQ ID NO: 2451 - DNA, 621 bp, Zea mays
  Peptide Sequence Number=SeqID_8781
  Probeset Number=SeqID_16854
tctcgcttcggcatcaagaggctgtctcttgctcttggaaatgacgtagaagcatgccagctgcgtataacacaggtgtggcctctcgaaagcggctgggagatgccgaacgaagctgcttctaggtccagccaggacggcttaatttacctgaagtacaccttcagatacaaatatcaattcgatgagctgaacgatgactggctagactgcattgaggcaactagtgacgagttgctttgtgcttacacgagggccgaggatgatgccccgacagttttgacacaccggtctaggaacattgatatggcaaaaatgtcgaagcttgttgaaggaccttcttctgccgctgaaccagatcaccctgctaccactgaaaccatggtgaaatcagccgaagagccaatcttgaaggtagcagcagagaagccgaaagccgagatagccgatgtgccgaagtgtcctgctgaagctagggcaaaaacggccgaagagacagaattgaggaaatcagcaaagcaaccgaagactttgagccaaccacaagagacagagctgccgaatgttggggacttgttctcaaatgctacgaatcaagaacaaggcaacataaaatgttaa

SEQ ID NO: 2452 - DNA, 554 bp, Zea mays
  misc_feature (95)..(95): n is a, c, g, or t
  Peptide Sequence Number=SeqID_8782
  Probeset Number=SeqID_16855
aggaggaggagaagacgaagaaggcatcgtggctggtggaggcgaccagcggaagcgcgggcgcaggcagcaggagaccgaggccgacgaagaancagaaggcgacacaccaccagggcgccgcgcgcgcagggggggcaccaacggggcggagccagaagaggccccacgacccgaggacaagaccggtgacgctgacacagaaccacgaacaggaagggccaacgaccccagctacaaccgaggacgcgacaacgaggacgaccacccaaacagacccacgagcctgccagaggcggaggaggaagcaacaagacgaaagaagggaggaccgactgcactaacagctacggacaaaggtgccgtcaaaggatggacggaccgaccagcagggccagcaacgaaggacaaacaaacaagggacctaggacagcctgccaggacgacggacgcgagaagcaaaggaacacccgacgacaaggaagaagccgaagtaccaacgagagacctgccaagcaaacgcgacaaacagcacgggcacacgaccacacaaa

SEQ ID NO: 2453 - DNA, 503 bp, Zea mays
  Probeset Number=SeqID_16856
tgcagccgctgttgcgcggtatggaggatgccggacggctgctgcgcggccgctttgttgctggtatgggcggcgcgcagtttgctgaaaatccggccatcgaccggctgcgccagctcggcagcgcgcaggccacgcacccgccggtggcgctggcggtgctggatcccgccaatccctttggcgtgcagctggcgtggccgctcagcgtcggtggcgtgcggcctacccgccgcagcggcgcactggtggtgattggcaatgggcgcgttatgttgtggctgccgccgggtggtaaagagctgttaacttttggcgacatctctgaggaccaacgtcaggccgccatcgtggcgctgggccaggccttacgccgggagaaaacccacagcttcattctcgaacgggtggacgatcagccggccagccagtcatcgctgctaccggccctgaaagccaccggtttttcccgcgtgccgaaaggctacagctggtatggctaa

SEQ ID NO: 2454 - DNA, 360 bp, Zea mays
  Peptide Sequence Number=SeqID_8783
  Probeset Number=SeqID_16857
atgaagtgtcgggcccccgttaggttggtggacccacgccaggaagtgaagctagcgcgacccagcgtgaagtccgccgctttaggcatcgggatgcatccgcccgctgcacctgctactgggcgaagacccccctcgccaccatgcgttgctgagacggctgtgtcgggggccagtggagtctccgcggagttgtccgtggacgactatctggtgggcggggtcgctatgttcgacgcccacatagggcggggcacttgctggagcaaagtccgggcaactggctgttgtcccggcgccggtggcggctggcccggtggtcgtgccaaccggggtgaagtggtcttcgcaggacccatg

SEQ ID NO: 2455 - DNA, 209 bp, Zea mays
  Probeset Number=SeqID_16858
atcgtcacctttcctcccctctttaccatatactagcggccctccctccatggcgccctccctctccaatggtggtgctcgcccctccctccctccttctccgttgctgcagctccccttcgtgatggctgtccctccccctacaggagcccctcctctgctctccttggacgccggccatggcagccccctgtgctgctgcgtgatgg

SEQ ID NO: 2456 - DNA, 560 bp, Zea mays
  Peptide Sequence Number=SeqID_8784
  Probeset Number=SeqID_16859
tgcaggcgctgcgcaatcagctcaacaaccagcgtcagcgcgaagccgaactggcgctggagcgcaccgaacagctggcggaaaacagcggcgatctgccggcctccatcagcgatcagttccgcgttaaccgcgagctctccgccgatctgaatcagcaggcgcagcgtatggatctggtggcctcgcagcagcgtctcgccaccaatcagacattgcaggtgcgccaggcgctgagcacgctgcgcgagcagtcacagtggctgggcgtgtcgaatcttctgggtgaagcgctgcgcgcgcaggtggcgcgcctgccggagatgcccaaatcccagcagatcgacagtgaaatgggccagctgcgcgtgcagcggctgcattatgaagacctgctggagcgccagcaggcgctgcgtaaagagaaacaggcggacggcacgccgttcaccagtgaacagacacgcattctggatgcccagctgaaaacccagcgtgaactgctgaactcactgatttccggctgcgacacgctgattctggaaattaccaagctgaag

SEQ ID NO: 2457 - DNA, 342 bp, Zea mays
  Peptide Sequence Number=SeqID_8785
  Probeset Number=SeqID_16860
ctgtcatcttcgaggctggcggctcggggtgtgcacatgggccacggcgtggtgcgacacgcgctggcgggactcaagagcgccagggtggccggcctcggcgccgtgttcttcgccaccgcggaggccctcgaggtcagcgagaacgtcggcactgtgagcgaccactcgtcgtcgctgatgaggaggctgttcctggtactccctctggcggtcctcaacgcagtgttcgtgtactggatcttcagctcgctgtcgaagacgctaaacaagctcaaggcaaaacgaatgacgacaaagctggagatgtaccggatgttgaacaacgccttgatcatcgcg

SEQ ID NO: 2458 - DNA, 390 bp, Zea mays
  Peptide Sequence Number=SeqID_8786
  Probeset Number=SeqID_16861
actgctgccttcgctgatcaggtggcgtccggaacgctggtggatgttgcgacctcacaactgcgctccgagaaaaagcgactggaggacaagattgagcgtcttcggacgcaaaatatagaggccatcatggacaaatctactgctgaaaacaagagtcgaaaccttccagagaaggtcgacacttttgagaaagaaaatgaggggctcagccgtcagttgagcgaactaaaacataccgttgttcagtcacagtcggaggcccaatctgtccgggcagaggcccaagccggtggaggctaccacgcggaccggacacatgcgctctttgtagatgtgtatcatgacctaggtgcggagacaacccccttcgataggtctagaggagag

SEQ ID NO: 2459 - DNA, 488 bp, Zea mays
  Probeset Number=SeqID_16862
cccctgcccgggggttgggccctcccactggtgacaacagtggcgttggtgacatcaccgggagaagccccgcccccacagggaagccgactgccagcatctggacccgtcccaaactcggtgggtgcggcaacagtgacaccaccacctccggctacatcctctctcgcccccccctggtgaagaggagcagggcggatatgcagggccccagcgaatctggccctgctgagaagaagacgaacccagggcctggcgtgggcgctctgctggcacccgatttgttagcggctaagcaacgggccatccaggccctagcaacgctgcgggcggcatgtgctgaagagcaggcgcgtcaacatgcatgggtcgtggagaagctgaagaagatggaggcctccgtccgcgagcgagaggaggaagcaatgagcgcccgcgtccatgcggagaagatgacggcgatggtggacctgcgcctggccgaataa

SEQ ID NO: 2460 - DNA, 294 bp, Zea mays
  Peptide Sequence Number=SeqID_8787
  Probeset Number=SeqID_16863
gcttgcatgcctgcagtaggttcacagatgtgtcaggcaaatgcatgccatagtggaggcatggagacgatggacagaagaaaaatcgaggctgacctttttggggggaaacttcatggagtcgctgctactaatgctcttgagctaggaattgatgttggacatattgatgcaacattgcatcttggatttcctggtagtattgccaggtcggtgaagaatgacacattcaatgaagctcaatgtttatcttgtcaccctgctaagatacaaaatttttactgcaggcatgca

SEQ ID NO: 2461 - DNA, 390 bp, Zea mays
  Peptide Sequence Number=SeqID_8788
  Probeset Number=SeqID_16864
atggagttgatcgtggattgcgtgcagcgcagcctcgccagccatcatccgcaaccgtcgttattgcatggtgatttgtggccggccaactgcgccggcagcgccagcggcccgtggctgttcgatcccgcctgctactggggcgatcgcgaatgcgacctggcgatgctcagctactacgccgatctgccgcgccagatttacgaagggtatcatgcggtgtggccgctgccggaaggcttctcgcagcgtcagccggtgtaccagctctactatctgcttaaccgcgccaacgtttttggcggcaactgggccggcgaagcgcagttcgctattggccagttgctggaggaggatgcgctgggccagcgccaggtcagaccggcctga

SEQ ID NO: 2462 - DNA, 203 bp, Zea mays
  Peptide Sequence Number=SeqID_8789
  Probeset Number=SeqID_16865
cctgggcagataagaatccggcggcggcaaaactgtttgctgaaatgaagctgccgattggcgacatcaatgccgataacgccgcgatgcatgccggtcacgcctcagaagcggacatcaacggccacgttgacggctggatcaaagctcatcaggcggaatttgataaatgggttaacgacgccatggcggcggcgaaataa

SEQ ID NO: 2463 - DNA, 239 bp, Zea mays
  Peptide Sequence Number=SeqID_8790
  Probeset Number=SeqID_16866
tgcagcgcatgttcaaagagcacaccggctatccgctgggtgagtacatccgggccaagaagctgaaaaaatcggccgaccgcctgaccaccaccaacgaaccgatcctcaacgtggcgatttcgctgggcttcgattcacagcagtcgtttaaccgcagcttcaagcgccagtatggcgtggcaccgggcgcatggcgtcgtcacgccgcgcacaccccgagcgcgatgcagcagtaa

SEQ ID NO: 2464 - DNA, 755 bp, Zea mays
  Peptide Sequence Number=SeqID_8791
  Probeset Number=SeqID_16867
ttgtgttgcatcgccactggacccgcaccgccagcgaccgcttcgtgctcgatccgggcattccggctgcgctctactggatcaccagcatcgtggcggaagtggtgtcaaactacgccattgatggcgttcagttcgatgactatttctacaccgaaaccgcggcatcgccgctcaatgacagcgccaccttccgccagtacggcgcgggctttgccagcaaagccgactggcggcggcacaatacccagctgctgatcgaacaggtttcccgcacgattaaacagctcaagcctggcgttgagttcggcgtcagcccggcgggtgtatggcgtaatctgtcgcacgatgcggtcggctccgatacgcgcggtgcggcggcttatgatgaagcctatgccgacacgcgccgctgggtgcagcttgggctgctggattacatcgcgccgcagctctactggccgtttgcccgccaggctgcgcgctatgacgtcctggcgcgctggtgggccaatgtggtacagccaacgcacacccggctttacatcggcgtggcgctgtataaggtgggtgaagcttcaaaaagtgagccggactggacggttcagggcggcgttcccgaactgaaaaaacagctcgatctgaatgaatcactgccgcacattgacggcaccattctgtttcgcgaagattatcttaatcagccgcagacgcagcaggcagtcgattatttacgtcagcgctggggaaaatga

SEQ ID NO: 2465 - DNA, 470 bp, Zea mays
  Peptide Sequence Number=SeqID_8792
  Probeset Number=SeqID_16868
accagggcgtggagaacagcgacacgaagccgggactgatcgccatcatcaacacctcgggtgccgacgccattcgcctcgcgctcggttcgctgccgatgctgatcctttcgctgtcggtggtgggcatcctgaagagtgccggcgccattgagctgctgacgcagctgctggcaccgctgttacacaaactgcatatcgccgaggtgtatgtgctgcccgcgctgaccaaatgcctggccggcggcaccgcctattacggcgtggttgccggtctggtcgaacaggggcagtacagtgcgcacaacatcaacgcctcggcaggcctgctgattcagaccttcgacctgcccggcatcgggattttcctagggctctccagccgttttccgcgcctgttccgcttcgccgtgcccggcattttgctcggcattgcgctgcgcgccacggcgcacagcctgctgttctga

SEQ ID NO: 2466 - DNA, 558 bp, Zea mays
  Peptide Sequence Number=SeqID_8793
  Probeset Number=SeqID_16869
tgcagggatgctcaccgtagcaactggaggagcctgcacgcgctggagacaaggagcagcacgaggatccgcccacgcccgccggctgtcagatcctgcgcgcgccggagacagggaggaggagcccgcgccggagacagggaggagccatcagagcccgcccgcgcgtgccggggacagggggtgagccagagggcgcgccggagaagtaggtggccacgctcgccggagatccgcccgcgccgccgcacgccagagataggcacgcgcgcgccgcacgcctgggaccccccctccacgccgcgcacgccggagacaggcacgcgccgcgcatgcctggaagccgctcgagctacgcacgctgggtcccccgcgtcgccgcacgtcggagacaggcatggtgtagggcgagccgccgccaagcgccagagcacgggagcgtgcgtgctctgtccggttcgatttgggaagagaaggggaaaggggaaagtgtggatggcggggcccacctataaggcttttgggtccacatgtaagagcctcgacgagaggaaatag

SEQ ID NO: 2467 - DNA, 503 bp, Zea mays
  Probeset Number=SeqID_16870
tgcaggcgcagggcgtattcgcggcgaagccgaagggcaactatttcctgctcggcggtgcgccgaccgacaacaacgcgaagatgctgcgcgaaggccagctgaaggtactcaagccggcgatcgatcgcggcgacatcaaggtcgtcggccagcagtgggtgcccgaatggagcgcgtcgaccgcgctgcgcatcgtcgaggatgcgctgaccgcgaacaacaacaagatcgacgcgatcgtcgcgtcgaacgacggcaccgcaggcggcgcgatccaggcgctcgccgcgcagcatctggccggcaaggtgccggtgtccgggcaggatgcggacctcgcggccgtgaagcgcgtgatcgccggcacgcagacgatgaccgtctacaagccgctgaagctgatcgcgagcgaagccgcgaagctcgcggtcgatctcgcgaagggcacgaagcccgcgttcaacgcgcagtacgacaacggcaagaagaaggtcgacacg

SEQ ID NO: 2468 - DNA, 986 bp, Zea mays
  Peptide Sequence Number=SeqID_8794
  Probeset Number=SeqID_16871
cggcaccccattgagcacaacagcgtgcgtgaaattaccctcgacgggcagcgctatcgccacttctcgagcaatgattacctcggcctgagccagcatccggcggtgatggccgcctggcagcagggcgtgcgcgaggcgggcgtcggtgccggcgcttccggctacgtcactggctacagccgccatcatgcgcagctggagcagcagctggcgtcctggctcggctacccgcgcgcgctgctgtttatctctggctttgccgccaaccaggcagtaatccatctgctggcgcaaaagtcggatcgcattatcgctgacaaactggcgcacgcctcgctgctggatgccgccagccacagtccggcaacgctgcgtcgttttgcccacaaccagccggccagcctggcgaatctgctggcgacgcgtgcggaagtcggcacgctggtggtgaccgagggcgtattcagcatggatggcgacagtgcgccgctggctgaacttgccgccgaaacccggcgcgcgggcggctggctgctggtggacgatgcgcacggcattggcgtcaccggtgagcaagggcgcgtcatctgctgtcagcagcaggtcaaaccggaactgctggtggtgacctttggtaaaggctttggcgtcagcggcgccgcgctgctgtgtcatgacgccaccgcagattacgtcgagcaattctcgcgccatttaatctattcctccgccataccgccggcgcagttctgtgcgctgctggcggcgctggcgcagatccagcagggcgacgcgctgcgcgcgcggttgcagcaaaatattgcccgctttcgcgcgggcgcgtcgcagttaccgtggcagctgatggcctctgacagcgccattcagccgctgatcgtcgacgaaatctgcaccgcgctggcgctgtcacagcggctggcacaggccggttgctgggtgagcgcgatccggccaccaacggt

SEQ ID NO: 2469 - DNA, 222 bp, Zea mays
  misc_feature (61)..(61): n is a, c, g, or t
  Peptide Sequence Number=SeqID_8795
  Probeset Number=SeqID_16872
gataaagaagccatagcttatgtgagattttcaaatgcttcccagcagtacggtgactccntgcggcgtcagaacgcactcatttctgagtggttgtcccagcatccggattatgagctcgatgacacaacctaccaggatatgggtctcagtgcttacagcggtatgaacgccacccgcggcgcgctttacgactttctggacgctgtagagcacgggtac

SEQ ID NO: 2470 - DNA, 226 bp, Zea mays
  Peptide Sequence Number=SeqID_8796
  Probeset Number=SeqID_16873
tttttttattccttttggcatcagtttaagataaagctgatacattacatgctttctatttcctccacccatggacttgaaggaagatttcctttgggaagttgagcaaagtaagctaaaaggccaggatttaaaatccaaggaggttagggtcaacacacggcttctttaccagcaaactaaattcaacctcttacgggaggaaagtgagggctatgccaagttg

SEQ ID NO: 2471 - DNA, 209 bp, Zea mays
  Peptide Sequence Number=SeqID_8797
  Probeset Number=SeqID_16874
cgacctgcaccaccggacatgaacagtgcccaatttctttatttgaaggtgtcacctattagaggagtcagaaggttcagagtcaagggcaagttagcaccttaatatatcagaccatattagattgtggcgaggcgtggagaagtggcatatcatctcaacttacgagaagatctattagaagtgcatgatattttccatgtgtctca

SEQ ID NO: 2472 - DNA, 213 bp, Zea mays
  Peptide Sequence Number=SeqID_8798
  Probeset Number=SeqID_16875
gcgccgcgggcaccgggttcgtgcccgccggcaagcttacgtcgcaggtgctccccctcatcaggagatcgcgcaagtacggcggcgtcatgctctgggccaagttctacgacgaccgcacgggctacagcgacgccatcaagagacacttccttggccgggacccagggcatggcctcacaggagcagccagccgtttccctagagctagag

SEQ ID NO: 2473 - DNA, 223 bp, Zea mays
  Peptide Sequence Number=SeqID_8799
  Probeset Number=SeqID_16876
ggcttagctcagaatcagaatccaactgaatactaagggttctgacatgtaccggtcctttcacccggaggccaccatcctaagcgacctcacgaatgcaccactgcttagccctgaggcactggtggtgaacgccttggacaagccaagggccatgctggataacatgatgaggaactgtaaaggactgtgcccagccaacaacatgagactggagtacaag

SEQ ID NO: 2474 - DNA, 419 bp, Zea mays
  Peptide Sequence Number=SeqID_8800
  Probeset Number=SeqID_16877
cccctgttctgcgccagcccatctccattttccctctccgcgtgtccgtaccctgccagtgggacccgtgctccagtgctcagtcgctcacctgcgtccgctccttcctccactgcctgtcggcctgggatggcagggtatcttctctttcccctagctctgccctttcttccgcgcgccgcacctgccacgaccgcgtcaagctccgacaatcgcacgggcaccacgaccacatcccctgctgcggccgcacgaaccccttgcccttattaccaggtgtgggtttgactcggcgtcacccccacactcacccaatgcaatttcttcccaacggtttcgctgcagcggccgccgaagctcgggccgagatcctcgcgttgggcgcgcctcctggcggcataaaatcccagtcacggtag

SEQ ID NO: 2475 - DNA, 246 bp, Zea mays
  Probeset Number=SeqID_16878
agtggtccctctgtgatagagatccatagtgttggctcatcagtctcgacaccaaagtggctggtcggctggtagtagcaaataggtatgaatgggaggagaacccttacgagtagagcgcggtgagctccctcagagacggtgtctacgttctaggagcgcagaagtccacgatggccccaatgagaagacaccacgctcacatgcctgcgcctcgggccgtcgctacctccagccatcgtcggg

SEQ ID NO: 2476 - DNA, 204 bp, Zea mays
  Peptide Sequence Number=SeqID_8801
  Probeset Number=SeqID_16879
accctgctttgtgctgtgactttgattaggagactgggtatttcattttgcagccactactttgacaagctggcatctcctggttacattctgttctctccatgtggcattatgtatgaagctgtttgagcacaaacctttcgatgcaaggactgtcatgggattcggagtgctcaatggcagctttggggagtttgcgttaac

SEQ ID NO: 2477 - DNA, 403 bp, Zea mays
  Peptide Sequence Number=SeqID_8802
  Probeset Number=SeqID_16880
ctgcagcggccaagtcggcggccatctcgccgaacggcggcggcggcggcggcggcagcggcctcgacgtcctgctcctgcacaacggccagataacgagcagcgcggcggcagcggcgccgacggcgctatctctggccgggccgcccccgccgctgcatcacgagaaggacgggagcctggactccgtgctgatgatgcagcgccgggtccattattggtacatggccggcggcgggacggcgaagacgaagagcatcgccgtttcatcacctcgctagctggtgatgcagacccagcagcagcagcagcagcacggcggcaacgtcttgtcgtgctcgtcgatcggtgtcagatcagcagaacggcggccagcaacggtttctttgaggtggacttcatc

SEQ ID NO: 2478 - DNA, 598 bp, Zea mays
  Probeset Number=SeqID_16881
cttcaagagaactcaatctctaggaagatggttgcattaatgaccccttaatctagaatcatatgtgctccattaacccgattatggctacgtgttttctaaacacgctgggtggaagctttcaatcatcgagaggatggtgacaatggcaagcctgatatcaggttggttggtgagcagcacgccagtggtcgacggggggttgttccatcataatcatattacagcggctgcaactgacaggcccaatgcatcttctcttccatgttggatcaacactcttgtaatgtattatttactgtgcggatctgagaggatgtgaatgatttcatttgcgtcctcaagttcaaaagattcaggaaggcatgcttgaaataaaaatagccagaaacatgcaaggtgctccacgacgcagcacggcatttccagtgttttctttttgctgtctagttctgaatatattttaccgccagaccagcacgtaagcttgcctggcaatggtttttatttgttgctatgccatctcaaaagtcaaaaccatggatttatatcaaaagtcaaaagactttgagaagtatttatttggtagcctagctac

SEQ ID NO: 2479 - DNA, 555 bp, Zea mays
  Peptide Sequence Number=SeqID_8803
  Probeset Number=SeqID_16882
atgagcgacatgatcgcgcgcggcaaagcgctgtattggggcacgtccgaatggagcgccgacgagattcgcgccgcgtacggaatcgccgagcggcatcacctgcacaaaccggtcgtcgaacagccgcagtacaacttgttccaccgtacgagggtcgagcaggaatatgcacggctctatgacgactacggcctcggcctgacgacctggagcccgctggcatcggggctgctcaccggcaagtaccgtaacggcgtcccgcccggcagccgcgccgagctgcacggctacgactggcttcgcgaccggctgacggatccggccagcaacgatgtcgtcgagcggctcggcgcgatcgcggccgaactcggctgcaacacggctcagttggcgatcgcatgggtgctcgcgaatccgcacgtgagctcggtcattacgggcgcgtcgcgaatcgagcagattggcgacaacatgcgcgcgatcgacgtcgccgcgcagctgacgcccgagatcaagcaacgcatcgcggaggccgtcggcgatacctacgag

SEQ ID NO: 2480 - DNA, 342 bp, Zea mays
  Peptide Sequence Number=SeqID_8804
  Probeset Number=SeqID_16883
gttcaaccatcaccgcaatcggcaaggacctgaacgccgagggtgctcacgtcattgatgccacaaatatgattgccatgccggggatggtcgattctcatcgtcacgcttgggaaggtcagctgcgccgcatcaaccccaacgccacctgtctggacgactacagcaatgccacgcatttctcgttcgcgaaatattaccggcctgccgatatctatgttggcaacctgctgacggcgctgggcgcgattgatgcgggtatcactaccatgatcgataactcgcacaacagccgtaccgcagcgcattcagacgccgccgttgaagccctgcttgatgccg

SEQ ID NO: 2481 - DNA, 209 bp, Zea mays
  Peptide Sequence Number=SeqID_8805
  Probeset Number=SeqID_16884
ctgcaggaaagaatgcctaggaaagtcgttgtacggtttataggctctgctttggttgggaagtcagagactgaagatgcctgtcaccacggcctagttgagccaactataaacactaaggaggctttggatgccattaatagcatgtttatggagccactggaacctgaaactgttctcaagagacaatcaaagcgtgagaacccaaa

SEQ ID NO: 2482 - DNA, 870 bp, Zea mays
  misc_feature (64)..(64): n is a, c, g, or t
  misc_feature (70)..(70): n is a, c, g, or t
  Peptide Sequence Number=SeqID_8806
  Probeset Number=SeqID_16885
gcgctgtttatacctttagtcagtggaaagctgcggccaaataagctgtggaatagccagcatnttcgcntgaaatttgccttaaggtcagcggtatttccactgaccacttttaattatctccatcagctggccaaactctcttttctgccgcagctgttaagcagccagggcttactgccggctaagccgcatcgcccgtatttgcgcgccggtttcagcgtggcgcagcgtgcgcagacgattctcgatcattatcaattgatggataagctggcgaataatcagctgcgccagttgctgctgagcccgactggtaatctccttgcccgtttcgacggcaaaaacgaggagcagtttgcgatttattgctgctccggccattacgaccgggaaggggaaattacgctgctgcttaattatcaggacatgacgctggcctcgctgtcattctctattattcaggagcagcagcagcgcacgctattaattgggggcttgcaggggccgcggaaacatatttccagtgacgttattcgcgatgccaccaaagccgcgcacggcgtatttcctaagcgtctgctgatggaagcggtatttattctggcggcacagtgcggcgtacaggccattaccgccgtcggcgataccacccatgttttccgcagcctgcgctaccgtcacagcaaaggtgataagttctttgccagctatagcgagttctggctgtcactgggcggggaaatgcggggtgatgagctgtttacgctgccgctgagcatggcacgtaaagatctggaagagattgccagcaagaagcgcgcggagtatcgccgccgctatgccttgctggatacgctggcgcagcag

SEQ ID NO: 2483 - DNA, 317 bp, Zea mays
  Peptide Sequence Number=SeqID_8807
  Probeset Number=SeqID_16886
atccccctgtgctccatgtctcataaattttcgtcaattttgttactgcggctcgcgtttcaaagtcttggggtagtgtttggggacttaggtacatcaccattgtatgttttctacaatatctttccacatggtgttgacgaagacgaggatgtaattggagctctatccttgatcatttacacactcaccctcatccctctgatgaagtatgtttttgtcgtcttgcgagctaacgacaatggtcaaggtgagatagagcattcttgtattttagcctagtctgttgccacaagaaatacttctccttcaggggg

SEQ ID NO: 2484 - DNA, 403 bp, Zea mays
  Peptide Sequence Number=SeqID_8808
  Probeset Number=SeqID_16887
cccgccgacgctgtcgctgctgacgctgaacggcctgtgcgcggcccacggcgtcgtgatcccgatgcagtgcgaatacttcgcgctggaagggttgtcggacctcgtcaacacgatcaagcaggttcacgcgaacatgaaccgcgacctgaagatcatcggcttgctgcgcgtgatgttcgatccgcgcatcacgttgcagcagcaagtctccgatcaattgaaagcgcacttcggcgacaaggtgttcgacgcggtgattccgcgcaacgtgcgcctcgcggaagcgccgagttacggattgccgggcgtcgtgttcgaccgcaattcgcgcggtgcgcaggcctatctccaattcggtgccgagatgatcgatcgcgtacgcgcgttcgaggtgtcgtga

SEQ ID NO: 2485 - DNA, 245 bp, Zea mays
  Peptide Sequence Number=SeqID_8809
  Probeset Number=SeqID_16888
ctagaggagatgatctgggagcagatgtaccgaagcgccgataggacgcccaacgcggcggagatccagcagatttctgaagctcctggccaactacggccgcatcgatggcaataacgtgttctactggttccaaaaccacaaggcccgtgagcgccagcggctccgccggcgcctgtgcgcccgggaccagcagcagtacgcgcagcatcagcagcaggccaattcaataaaaagacgggggt

SEQ ID NO: 2486 - DNA, 400 bp, Zea mays
  Peptide Sequence Number=SeqID_8810
  Probeset Number=SeqID_16889
tgcatgcctgcagacggggaagcacagtttcagactgaactcgagatgatcagcttggcagtgcacaggaacctgcttcagactctatggggattctgcatgacctccagtgagaggctactggtctatccatacatgtcaaatgggagtgtcgcattgcgcctgaaagggaagacaccactggactggatcaccagattaccagaaagaggatagcacttggggcagcacgaggtctaccgtacctgcacgagcagtgtgatcccaagatcatccatagagacgttaaggcagcaaacatactgctagatgactgctgcaacggtgtgggatttggctccgagctctgaccccggaatacatgtcaccacagcggcgggactgtggccatgctctgatc

SEQ ID NO: 2487 - DNA, 347 bp, Zea mays
  Peptide Sequence Number=SeqID_8811
  Probeset Number=SeqID_16890
atggcaaagccgaagccgaagaggcccgcgcccccgccccggcgttgggcagcatgcggtctctggcgacgacccgccttcgcgtcgggcggcctgccgctggccgccgccgcgtacgtgggcgtcgactacatgcagcacctgtcccccgtctggcacgggcggctgcggccggcgctctgggcggcgctggcgctcgccaccgccgcgcgcgcgccgttctaccggcgctggggcgccgaggtccgcgccgccccgcggttcttcgccgccatggcgttcatgctcgccgcgctgctctgcgaggccatctccgtccgcttcgtcagcaccgtcctcggcctgca

SEQ ID NO: 2488 - DNA, 294 bp, Zea mays
  Peptide Sequence Number=SeqID_8812
  Probeset Number=SeqID_16891
ggcgaatgtattcgtcgagcgttgtcctcccaatctttccttttctccttgttcacgttcgagaaatcagcttcgcccggctcctcgccgttgcgcgagaaatccgtcatcggctcatcgctcgtccggctcctcgccgccgcattgcgaggcaccggcgcgggaatggagctccccgacctactggcgctggcagccaacccaacctttgtatcggggctggtggcatgtgcagtggcgcgggccgccaaggccccattaacctccgtcatcaagcagcggtggaacctgcag

SEQ ID NO: 2489 - DNA, 248 bp, Zea mays
  Probeset Number=SeqID_16892
gacagtaaggggaagtagcgatattccgattccttcgtggggaatcaacgaagggtccagtggaattggtggttcagggaacaagcagatcctggacgcacgccactctgagctgttcctggagaaggcatactgggacgagaccttggagtacgagagcctcggcgagcactttcaggacgaggaggtggccgccgccttatgtgccgttgtcaacacgaagcagttcgcttccccatccactacat

SEQ ID NO: 2490 - DNA, 810 bp, Zea mays
  Peptide Sequence Number=SeqID_8823
  Probeset Number=SeqID_16893
catccggatcgcgtcacgctgagcttcgacaacggcgaacgcatcgacgccgatctcgtgatcggcgcggacggcgcgcgttcgatcacgcggcgctggatgctcggctacgacgacgtgctgtattccggctgctcgggttttcgcggcgtggtgccggccgagcggatggacctgctgccggatcccgagaccatccagttctgggtcgggccgcacgggcatctgctgcactatccgatcggcgacaacggcgaccagaacttcctgctggtcgagcggcatccgtcgccgtggccgttgcgcgactgggtgatgccggcgcaggagggcgagcagctgcggctgttcggcgactggcatccggcagtggtggagatgatcaccgcggtgccgatcagccagcgctgggggctgttccaccggccgccgctcggccgctggagccgcggccgcgtgacgctgatcggcgacgccgcgcatgcgctggtgccgcatcacgggcagggcgcgaaccagtcgatcgaggatgcgatggtgctggccgcgcaactcgcgaaggccgggccggggaactggcgcgaagcgcaggaagcgtacgagcggctgcggcgcgggcgcacgcgcaaggtgcagtacgcatcgatctccgcggccgacgtgctgcatctgccggacggaccggccgcgcatgcgcgcaatgcgcgtcttgccgcacgcgacagcgtgctgcatcacctcgactggattcacgatttcgacgcgctcgccgacgaaccgaacgagcggcagggcgggacgtggctgtga

SEQ ID NO: 2491 - DNA, 884 bp, Zea mays
  misc_feature (1)..(10): n is a, c, g, or t
  Peptide Sequence Number=SeqID_8824
  Probeset Number=SeqID_16894
nnnnnnnnnncctgcaggaccagctgttccagaagatccccttcgtgcgcaagatccaggagaacagcgagggcctcctccgctacgacactcccgacatcatcaagagtaagccagcgcccatgcgccttcctcctcctccgtccatgatccatggagaggacaagtttgcttggctgcgggacgacgagttcgcgaggcaggcgctggctggcatcaaccccgtcaacatcgaacgtcttcaggcgttcccgccgatgagcaagctggacccggccgtgtacggcccgccggagtcggccatcacggaagagcacatcatcggacagctcgacggcatgtcggtgcagcaggcgctgcagatcgtgcagaacctgattgcgcagaaggtcaatgcgattggcatcagcgtgctggatgcctccagtattgcgccggtgatggcgcaggcgcaggcgagtaatgtgcatctgttcaccagcgacagcgatgcgcccgacagcgggcggccggtctatgtggcgcaggccaccgatgagggactgggcgatacggtgatcgatgagatgatcaaacgcgtcggcgagcgcggcaaaattggcatcgtctccggcgaagccaccgtgtccaacctcaacagctggattggctttatgcagcagcgggtgaaaagcaaatacccgcacattacgctactcaaaccccagtacgccggcggctccgccagccgcgcggcgcaaatcaccaccgatttgatgtccgctaaccccgatctgaaaggggtgattgccatggcctctacaacctgtccgggcgtggcgcaggccatcgaaaccgctggcaaaaacggcaaggtgattggcagcggtttctgcagaatctaa

SEQ ID NO: 2492 - DNA, 243 bp, Zea mays
  Peptide Sequence Number=SeqID_8825
  Probeset Number=SeqID_16895
aaaaccttacgtgtgaagatccgcaaaaaattacgaaagagtttggcatgattgtttatcagcagctcttcattttacccaagatgatgggggcgtaaactcactaccaaatatatgatggagagggtgctccatctgatgtggatgtaacaatgtataatgcacaagcagaaactggtgaaatcaaggggcattacttgaatgcgactgcaggcgaatgcccgcacctcatctacacctgca

SEQ ID NO: 2493 - DNA, 265 bp, Zea mays
  Peptide Sequence Number=SeqID_8826
  Probeset Number=SeqID_16896
ctgcagcacaactgtgtctgctaaaaagtcctgtgcactgaattcaagttggacaagctctgggcctatccactgactgttctagccatcctgtgtcccgccaggagggttgtacgtactggacgggccagagccacagagcgttctggttggaccccgcgtagtcattgcgcacactgctaccgagcatgtcacggcgccgagaacgttcgcgatagccggctcgccgagcatcagcgcccacaaaaacactctcctgccacac

SEQ ID NO: 2494 - DNA, 1148 bp, Zea mays
  Peptide Sequence Number=SeqID_8827
  Probeset Number=SeqID_16897
atgtggggcgattggctcgggcaggcgtttaccggtctgtcgctcggctccattctgctgctggccgcgctcggcctggcgatcacctacggcctgctgggcgtgatcaacatggcgcacggcgagatgctgatgctcggcgcctacgccacctggctggtgcagaatctgttccagcagtttgcgccgcagtggctggcgtggtacccgctgctggcgctgccggtggccttcgccgtcaccgccgtaatgggcatgctgctggaacgcaccatcatccgccacttatacggtcgcccgctggagacgctgctcgccacctggggcatcagcctgatgctgatccagctggtgcgcatgctgtttggcgcgcagaacctcgaagtggccaacccgggctggctgtccggcggctggcagctgctgccgaatctggtgctgccgtataaccgcatcgcggtaatcctgtttgtcatcgcggtgctggcgctcacctggctgctgctgaataaaacccggctggggctgaatgtgcgggcggtcacgcagaaccgcgccatggccgactgctgcggcgtgccgaccgggcgcatcgatatgctggcgtttggcctgggttccggcattgccggactcggcggcgtcgcgctgtcgcagctgggcaacgtcgggccggaactgggacagggctacatcatcgactcattcctcgtggtggtgctcggtggcgtcggtcagctggccggcaccgtggtggcggcttttggtctcggcatccttaacaaagtgctggagccgcagattggcgcagtgctcggcaaaatcctgatactcgtgctgattgtgctgtttatccagaaacgtccccaggcgccgcgcctcagcctgattctcggcgtcatcgtgaccgcgctgctgctggtgctgccgttctgcgccctgctgcccgccagccatccgctggcgatctccacctatacgctgacgctggtgggcaaaatcctctgctatgcgattgtcgcggtggcgctggatctggtgtggggctacgccgggctgctgtcgctcggccacggactgttttttgccctcggcggctatgccatgggcatgtacgtgatgcgccaggctgaaggtcgactctggag

SEQ ID NO: 2495 - DNA, 316 bp, Zea mays
  Peptide Sequence Number=SeqID_8828
  Probeset Number=SeqID_16898
atgggccactggcgcgctttttatcccggcgggcgctttcatcgcttgaccctcccgcaggggaaaggtttacgctgtgcccctattcacgataaggatatgaatatgcaacgtcgtcattttctcaagctgaccgccgccctcagtgcagccggcgcgctgcccttctggagccgctcgctgatggccgctacgcgcccgctgttgcccatcccgtcgctgctggagcccgatgcacacggccagtacacgctgaccgccatgaccggcagcagccagtggaacggcaaatccgtcccaacctggggttacaacg

SEQ ID NO: 2496 - DNA, 761 bp, Zea mays
  Peptide Sequence Number=SeqID_8829
  Probeset Number=SeqID_16899
ggccgcgggccacccgctggccggcgcccgcctcctgctcctggacgggccgggcaacatccattccctctccttcccgcgccgcggcgaccgggccccgctcaccggcacctacctggacgccttcgccacgctgccgccgctgctcccgcgcccgaagctcgcggagctcggcttcagcgccggcgccgccgcccgcgcgctggtgcacttctacccggacatctccgtgcacggctgggagctggaccccgccgtgctggccgtcgcgcgcgacttcttcggcctctcggacctggagaggcgccacgcgccgcgcctgtccgtgcacgtcggcgacacgctggaggcccgcgcgccgcccggcggtttcggcggcaccgcggtagacctgttcgccctcggcagcgtgttgcaggcgctccaggaaccgggcacgtgtcggcggctgggcgcggtcgtggcgcccgggggcagggtgatggtgacctgcgccggcgcgggcgtggaggcccaggacgaggggcgggacggcgcggcggtcaagaacgccacgctgcgggccatggccgcggcgttcggggagggcacggtgtcggtgctgcacgtggacggcagctgggtggcgatgacggggccgccggagacggcgccggaggcggcggccgcgtgcagggctcggctgcctccggagctgcggcatttcgttgacgaaatggagaccgtacggcgccggcgcgagtggccaatggtcgccaggg

SEQ ID NO: 2497 - DNA, 602 bp, Zea mays
  Peptide Sequence Number=SeqID_8830
  Probeset Number=SeqID_16900
cccccgccccccagaggaccacccctggcggggcgacccccccccggccccaaaaaggacgcccggtgccccgcaaaaagatcccccccgagccggagggcaaacagatccggaagcacccccctggagctccccagcgcggcccccgcgcggaggctcggtaacaactgtgccgaccccgcccgcaggcaggagtcgagaagcctcagccccggggtcgcggccgtctgttcgggcggggtgggattacccgcaagatagcgcccccgcagcatcagcagcagcaggttacgcgtcctcagccccagggtaggtacggggctgaagggtctttttcccccttcatgacccccgagctcctcgttgcgcgcttcgttcgcctccatgcgatgcccacgcgtccggcgcagaccaagccttagctctgcgagctctgtaccatctaataattctggccgtgtcgtaccatggcaactcctaagtagaagaattgaagaaactaccaaccggccctggcttgtattcacccttgaaccatttttttcttggaaaaaaaaaaaaaaaaaaaaaaaaaaaaaccccggaaaaaaacgcattcaaaa

SEQ ID NO: 2498 - DNA, 381 bp, Zea mays
  Probeset Number=SeqID_16901
atgtcagaaagtcgcaccgccgagcgcgccgctcgcggagccagaaagatcaagctcgcgctgctgggaccggccttcatcgcggccattggttatatcgatcccggcaactttgccaccaacatccaggcgggggccgcgtacggctacaaactgctgtgggtggtggtgtgggccaacatcatggcgatgctgatccagctgatgtccgccaagctgggcattgccaccggtaaaaacctcgccgagcatattcgcgatcgcttcccgcgcccggcggtgtggttctactgggtacaggcggagatcatcgccatggccaccgatcaggcggaattcatcggggctgcgctcggctttaagctgctgctcggcatctcg

SEQ ID NO: 2499 - DNA, 233 bp, Zea mays
  Peptide Sequence Number=SeqID_8831
  Probeset Number=SeqID_16902
ctatgcgttccctgggtcgagcggcgctccctcctcctccgtggccccccgcctgtctttgtgccggtcgcccggctcgaacgcgtcggctgtggcccagctggatgcgtgctgccgttttgtgccggtcttctgcgtggggtgggccttggtgtcctccgtgcgttggtttaggcgggtccggtgggtctgccttgcgcgccccccgcgcgcctcgtccggcgtgtggtcgc

SEQ ID NO: 2500 - DNA, 838 bp, Zea mays
  Probeset Number=SeqID_16903
gaacgagatacccatcgcctctctaccttcagtataatagcaaccatgcgatccaagttcaaagacgagcaccccttcgagaagcgcaaggccgaagccgagcgtatccgccagaaatatgctgaccgcatcccggttatttgcgaaaaggtcgagaaatccgacatcgcaaccatcgataagaagaaatacctcgtccccgcagacctcactgtcggccagttcgtgtacgtaatccgcaagcgcatcaagctgtcgcccgaaaaggcgatcttcatctttgtcgatgaggtgcttccgccgaccgcggcgttgatgagtagtatttacgaagagcataaggatgaggacggtttcttatacattacatactccggcgagaacacattcggtgactgctaaagaagagaccatgacgataattctacgacatgctgaatgacgcgacgtgaatcttactcgtactggaatggaactgctttgcttagaagtgttgcaatatgtcttacctttgggcagtctgatgcgtcttcggttactcgagaactcgacttgttctcgaaatgagaatgacatcggatcgtgggtttcgtgttggcgttttacggatcacatatttgctagtctgatacgaatgttattgcttgcttgtacggacactattcatatcgctgctttgagttgtcttcttgatgcgcttttgaggtagaaagcaggcttgtgtctatgagcagtcggccgcaatgcccggtaggacaagacattcacgaataagcggttcactcctatgtctacttgcgatacgtactaaattgaaccatttaactacagagaaaaa

SEQ ID NO: 2501 - DNA, 375 bp, Zea mays
  Peptide Sequence Number=SeqID_8832
  Probeset Number=SeqID_16904
atggacctccgccagctgcctgcgctgaatgccattcgcgcgttcgaagccgccgcccgtcacgagaatttctcccgcgccgccgacgagctgtacgtcacgcacggcgcggtcagccaccaggtgcgcgcgctcgaggaggagctcggcgtgcagctgttcgcgcgcaacggcaagcggctctgcctgaccgacgccggcatgcgctacgcgcagcagatccgtaccgcgctgatggtgatcgccgacgcgacgcgcgaggtgcgcgcgagcgatcgcggacggcggctggtggtgtcgatgctgtcgtcgttcgccgcgcgcttcatcacgccgcgcatcggcacgttcatcgagcggcatccggaaatcgac

SEQ ID NO: 2502 - DNA, 466 bp, Zea mays
  Peptide Sequence Number=SeqID_8833
  Probeset Number=SeqID_16905
ttggcggtaccttcgatcccattcattacggccatctgcgtccggtcaccgcgctggcgcagcaggttggcctgcaaaaagtgacgctgctgccaaacaacgtgccgccgcaccggccacagccggaagcagcgcacaacagcgcgtggcgatgctgcgctgcgccattgccgatcgttcgctgtttgatatcgacacgcgcgagctgacgcgcaccacgccgtcatggacggtggacacgctggaaaccctgcgcgccgagcgcggggcacaacagcccctcgggtttatcatcggtcaggattctctgctaacgttaggaaaatggcatcgctggcaggaactgctgtcgctgtgtcacctgctggtttgtcagcgtgcaggctacgccgcgcagatggctacgccagagatgcagcagtggctggatgcgcaccgcgcgcatgaagtgcagcagctgcatcgc

SEQ ID NO: 2503 - DNA, 443 bp, Zea mays
  Peptide Sequence Number=SeqID_8834
  Probeset Number=SeqID_16906
atgctctaccaaggcgataccctttcagtgcactggcttgacgatggcatcgccgagctggtttttgatgcgcccggttcggtgaataaacttgataccaaaactgtcgccgccttaggcgaggcgctgagcgtactggagcagcaaagcacgctgcgcggcctgctgctctcttccgccaaaccggcgtttattgtcggggcggatatcacagaattcctgtcgctgtttgatgcgcccgctgagcagctcagccaggggctgacatttgccaacagcatctttaatcgtttggaagatttgccggtgcccaaccatcgccgccattgacggttacccactgggccggaggcttgcaattgtgtgctggcaaccgacttccgcgtgggcacgcccaccgggcgcattgggcctgccggaaaaccaaacttcgggaattatgc

SEQ ID NO: 2504 - DNA, 222 bp, Zea mays
  Peptide Sequence Number=SeqID_8835
  Probeset Number=SeqID_16907
ggttcgtcgcgggatgttccgtttcacgtaggatctttgctgggctgggcgcttgcccttcgttggttttttgttgcatcccatcagcgtcccggtctccttctggctttcccattatgttgcgggttcgtcctttctgcccagggcagtgggggtgccctgctcgggcgtggcgcttgtcctagcttggcggtgggccttagcgctcttggtccttttcgt

SEQ ID NO: 2505 - DNA, 762 bp, Zea mays
  Probeset Number=SeqID_16908
tcgcgctttgcagataaagtggtggtgattaccggagccggatccggcattggtgccgcagcggcgcagcgtttcgccagtgaaggcgcacaggtggtgctggtgggcagaacccgcgacaagctggaacaggtgctgagcacgctgagcggcgagaatcatctggtggcaccctgcgacgtcggcgatgcggatcaggttaaacagctggcagagcaggtgcagcgccagtatgggcgcgtggatgtgctggtgaataacgctggcagcatcgtgcagggcaaaattcacgaagtgtcgatagcggactggaagtcgctgatgagcactgacctcgacggtgtattttactgcacccacttctttatgcccgcgctgctcaacagtaaaggcaacgtggtgaatacctcgtcggtatccggactgggtggcgactggggcatgagtgtctataacgccgccaagggcgcggtgaccaattttacccgcgcgctggcgatggattatggcacggacggcgtgcgcgttaacgccgtttgccccggctttaccttcaccgatctcaccgaagagatgaaaaatgatgaggcgctgctcgcacgcttctatgatcgtattccgctgggccgcgccggtgaaccggaaaatattggcagcgcgattgctttcatcgccagcgacgacgcgcgttatatcaccggggttaacctgccggtcgatggcggtctgacggcgtcgaacggccagccgaaacaggcgtga

SEQ ID NO: 2506 - DNA, 278 bp, Zea mays
  Peptide Sequence Number=SeqID_8836
  Probeset Number=SeqID_16909
tgcagcaacgagattcagagctatcaataccgcgttggcatcggcgacgtactgaacgtcaccgtatgggatcaccctgagctgaccacgccggccggtcagtaccgtagcgccagcgacaccggtaactgggtgcaggcagacggtaccatcttctatccgtacatcggtaaagtacgcgttgcaggccgcaccgtgacggaaatccgcagtgaaatcgcgcgtcgtctggcgcagttcattgaaagtccgcaggtggatgtcgctggcgcctgttt

SEQ ID NO: 2507 - DNA, 444 bp, Zea mays
  Peptide Sequence Number=SeqID_8837
  Probeset Number=SeqID_16910
gtgagccgcgacctcgcgcgcgtgatgcgcacgtacatggcgcgctggcatgcgaaccgcgtcgcgctggtcggctactcgttcggcgcggacgtgatgccgttcgcgtacaaccggctgccggccgacctgcgcgacaaggtctcggtgatgtcgctgctcggcttcgcgccggcggcggatttccagatccgcgtgaccggctggctcgggatgccggcgagcgacaacgcgctgaaggtcgcgcctgaaatcgcgaaggtgccgccgcagctcgtgcagtgcttctacggcgcggaggagaaggaaacgatgtgtccggcgctcgcgaataccggcgccgacgtgatcaagaccggaggcgatcaccacttcggccacgactacatcgcgctcgagaagaagatcctcggcgcgttcggcaagccggtcgcggcgcgctga

SEQ ID NO: 2508 - DNA, 1004 bp, Zea mays
  Peptide Sequence Number=SeqID_8838
  Probeset Number=SeqID_16911
atcaagccgcaaaaatcaacatgggaaatcctgaagagtgggttgagatcctcaagcagtgcaagtacctgcctgagcaggacctcaaggagctgtgcgagatggtgaaggagctccttctcgaggagtccaacgtccagcctgttgcggctcccgtcaccatctgcggtgacatccacggtcagttctacgacttgctggagctcttcaggattggtggtgagatccccctgaccaactacattttcatgggcgacttcgtcgatcgtggctactacagtctcgagactttcaccctcctgcttgccctgaaggcgaggtggcccgacaagatcacgctcctcaggggtaaccacgagagcaggcagatcacccaggtgtacggcttctacgatgagtgccagcagaagtacggcaacgccaacgcctggaaatattgcacacaagtcttcgactacctcaccctggccgctctcgttgacggcaaggttctctgtgtccacggaggcctctcgcctgacatccgcaccatcgatcagatccgaaccatccccagaaaccaggagattcctcatgagggcgccttctgcgatttgatgtggtcggatcccgaggaaattgagacttggcagatcagcccgcgaggagccggttggctcttcggctccaaggtcacagaggagttcacgcgagtcaacggcctggagctcatttgccgagctcaccagctcgtgcaggagggctacaagtacatgttccccaagaagaacctcgtcaccgtgtggtctgcccccaactactgctaccgctgcggaaacgtcgcctccatcctcgagctcgacgagaatctcaaccgcgacttcaagattttcaacgccgtccccgataacgagcgcatggtgcccgcccgcaccaccatgtcctactttgtgtaaatcgcagcctcagcctgcctgcaatctctttcctccattcatacaatcctcccttttcatctttaaaaa

SEQ ID NO: 2509 - DNA, 608 bp, Zea mays
  Peptide Sequence Number=SeqID_8839
  Probeset Number=SeqID_16912
tgctgacccacggcatcatgcaagctaatcaggagcagaccaaagaccaccttgcgtaactgctgagcgccggacaggaccaagcggaaaccgcgctgccgctttatcacatgtttgccctgacggtgaactgtgtgctgatcgtcgacctgagcggcaccaacctgctgattaccaaaccgcgtgatattgccggcttcgttaaagagctaaataaatttccctttaccgccatcaccggaggtaatacgttggtcaacgccctgctgaacgatgccaattttcaccagctggacttttacacgctgcgtatgtatgacggtggcggcatggccgtgcaaaaagcagagtccgatcgctgagagaaactcaccgggcactatctgctggagggctacagactcaccaaatgctcaccgttggagacggataatccttatgatattacctgccacacctgcaagataggtttgccggttacagccacgcgacgtgcgtattgacgatgaggaagatcgcgaagtaccgccgggagaacccgtagaactgtgcatacgaaggccgcatgtcatgattggctactggtagctgacggatgccagcgagga

SEQ ID NO: 2510 - DNA, 448 bp, Zea mays
  Peptide Sequence Number=SeqID_8840
  Probeset Number=SeqID_16913
atgagtgcgacagcggaagctcaaagcccgcaacagcccgcgaacaaaaagaagaagcgcaaaggtgcgctgatcctgctggctatcgtgtttatcgtgattggtgtgggttatctggcttactggtatctggtgctgcgccacttccaggaaaccgatgacgcctacgtggcaggcaaccaggtgcaggtgatggcccaggtttccggcagcgtgaataaagtgtggttcgaggatacggatcgggtaaaaaaaggcgacattctggtgtcgctggataaaaccgatgcgcagcaggcattcgagaaagcgcagaccgcgctggccaccagcgtgcgccagacgcaccagctgatgatcaatggcaaacagtatcaggccaccatcaagctgcaacagaccgcgctggatcaggccgaatccgacctgaaacgtcgcgagccgctcg

SEQ ID NO: 2511 - DNA, 342 bp, Zea mays
  Peptide Sequence Number=SeqID_8841
  Probeset Number=SeqID_16914
cccagaccccatcccccgaaaaaaagggacaatcccggtggtggcggccccggggaattttttaatgggggggggaatggcccccctgggcacggaccccttccagggcttgtactacttcaggctgcaaatggaaaccaagctctacgagtgcaacgtctaaagtccccacgcttagcaagctgcttcaggggtggcaaaagggccaagcatgtagcaccattttttttttccttttgtttggattaaaacgcatcggcccccttgttgtgtacgtatatcaaaagtgcatggcatatgcccatttaagtacgtttaataaaacaaatggcttttggtttt

SEQ ID NO: 2512 - DNA, 527 bp, Zea mays
  Peptide Sequence Number=SeqID_8842
  Probeset Number=SeqID_16915
cccccgggctgcggaattcgcacgaggctcccgttccagagctcactgcttcgctccacccacccttaagcaggagtggtatctggtggttttgtttttcaaaagaagacagaaatgtcttccttgaggcctgcccagtcttctagttcatccagcaggactcggcagagctcccaggcacgggtattagcacaagcaacccttgatgctgaactcaatgcggagtatgaagaagctggggaggcctttggattactccaagttggttgaagcacaacggggcactccacctgagcagcgcgggcgagcggggagagggcatagcctacttgcggctcattcaggagaggaagagctaagccaacccattcggttgcttggtggcccttgacgagaagagcttcagggtcattgcgttcaaggagaatgcacctgaaatgcttacaacggacagccatgctgagcctaacggtgatgatcccccaaagctaggaattagaaccaatagacgctgccttttgactgac

SEQ ID NO: 2513 - DNA, 289 bp, Zea mays
  Peptide Sequence Number=SeqID_8843
  Probeset Number=SeqID_16916
atgaaggagaatatgaaggagaagcaggttgaggaggagaagattgagatgaacatggaggagaagaagcagaatctggttgaggatgaaggtagtcaacaggaggaaagtgaagaggaggacggtgaagatggggaaattggagaggaggaaggtgaagatggggcaattggagatgctaaagtggggggagatggagacaaggaaagtgctaaaaggggggggataaagaacatcaacaacgatgagattctcaaacttcttgttaaaagaaatgaagacactgatg

SEQ ID NO: 2514 - DNA, 384 bp, Zea mays
  Probeset Number=SeqID_16917
ctgcagctccacaagacagatggtgggcacgagtatgctgagttcctccacgccccgcggaagcgtttcaccgactttgtaaggctggttccagtgcaccatcctcctctcacccctgccacaattatggaccaatcagaagccgccacctcactgtcgcccctcgctctcgcccgcgaagacgccatcgccaacgcgtcacccacctcccgcctgcctatcgcctccctctcgcccggggcgcgctccagtgcaggcgagagcggggcgatatcgctcgctctcgccgggcggtggcagcagcgcccgccgggtcgctctcgcccacctccagccccgctctcgcctcctgctgggcgctatcgccctcactataggctgcat

SEQ ID NO: 2515 - DNA, 401 bp, Zea mays
  Peptide Sequence Number=SeqID_8844
  Probeset Number=SeqID_16918
tctggataccgcactcttatggattcgctgacaacgcgtcgactcaaccgtcaggactacaaaaccctggcgctggctgccctgggcggggcgctggaattctacgattttatcctcttcgtcttcttcgctgcggtgattggcgagctgttctttccgccagacatcccggaatggctgcgtcaggtgcagacctttgccatcttcgccgccggttatctggcgcgcccgctaggcggcatcatcatggcgcactttggcgacaaagtcgggcgcaagaagatgttcagcctgagtattctgctgatggcgctgccgacgctggcgatgggcgcgctgcccacctacgccagcattggtattgccgcaccgttactgatgttgctgatgcgcgtgctgca

SEQ ID NO: 2516 - DNA, 384 bp, Zea mays
  Peptide Sequence Number=SeqID_8845
  Probeset Number=SeqID_16919
tgcatgcctgcagaagtgggcctgattaaactgaaagaggcgtgggcctgctgccaacctcactggatatcactgagaatccaaagaacctgaagattgttgagctggaaagcgccacagcctgcacgttcacctggacgaacaacaaattgccgctggcggtgatcaacaccacttacgccaaccaaaatggccctgccccggggaaaggccggattttttggcgaaaaataaaaactggccgaccgtgaaccttgatccggtaacccgggaagaccaccaaaacccggaaaacgggaaaaaatttggtggaggttaataatcaaaacaaagggtttgaaacccgccaccaaattttttaccggcggcccatggaaaggttgg

SEQ ID NO: 2517 - DNA, 401 bp, Zea mays
  Peptide Sequence Number=SeqID_8846
  Probeset Number=SeqID_16920
cgcggtgttcgggcaccctcccaaggagcgggacccgaacgcgccggcgccggcgcccaagtcgccgacgtccacggggcgcggccgagggcgcccgcccaaggccaagagcccgctggaagccgacgtgaagcacgccaccgtggggatgcccaagcccagcggtcgaccgcccaaaaaggccaaaaccgacagcgccgcgttgtcgtccctgttgcgtgacactgccggtgctggcgacgggaccacccacggcaagcgcggccgcgacaggccccccaaggtacgcccttgccagcccagcgagacggaagcagctaggcgcccttctggggacatagaaattccaacaggacggatgggaggggcagcattaaagcgctcaggggatgctaacactg

SEQ ID NO: 2518 - DNA, 474 bp, Zea mays
  Peptide Sequence Number=SeqID_8847
  Probeset Number=SeqID_16921
agtacgcccgcctcggtgccatcgccgcatctctgctttgtgttttctctttcgtaacggagtccgaatttgggttaagcagcaggtgggtggcatggcgccgcacattctgatttcccgagaaacgcgtcggttggctggtgtggtatcgttccttctccaaaggtacgcgatgactggagtgttgacgcacaagagcgacgtgtatagcttcggagtgaactgatactgctggagctgctaaccggcaggaagcccgtggaccacaccatgctcaagggacagcagagcctggtgacttgggccacgccgaggttgagcgaggacaaggtcagccaatgcgtggactccaagctaggcggcgacgactatcctccaaaagccgtagcaaagagtttctgtgttccagcctccagatggcagtacgagtccgatttccggccgaacatgaccattgtggtgaaggcgctgcag

SEQ ID NO: 2519 - DNA, 515 bp, Zea mays
  misc_feature (422)..(422): n is a, c, g, or t
  Peptide Sequence Number=SeqID_8848
  Probeset Number=SeqID_16922
gcattagcgcgacgccgcagacgtgacgcccgctgcgtccggcgacgacgcggccctggtgtcgacgacgcgccagctgtcgggttttcagcgttccgcgtgagattgtgcgcgccgcccgtggattgcgcggacggccgtccgccgtgtcgccgaccgtgtcgacgaccagaggggcttcgtagcgggcgttccgcgcgtcgagtgtctggaaggtcacgcacaccccggtgcgccccgctgcccgcttggtgctgccgaacggatacgcgtctcgggccggcccggccatggccgcttccgcattgaacgacggatcggcgatgcccgtgcgcttcagcgattcggccagccgttcgattgcgtgcaggtccagcacgtcgaggcgctcccgcatcgcgtgcacgaacgccgcatgccgnggcgcgtgcgcgtgcttcccgagccattccttgaaatcggggagacggccctcgctcgcgagcgcgcccagttcgccgagcgcgtcggggggc

SEQ ID NO: 2520 - DNA, 291 bp, Zea mays
  Peptide Sequence Number=SeqID_8849
  Probeset Number=SeqID_16923
acagtacgcgtccagcgcaagctccgaaagtcggagtcttctcgtacggcgtcatgctgttgaagctgctcaccggccgccgacccggcgaccgctcctcctacggccaggacggcctcgtcgactgggtacgtaacacacacgcgaggcaggccctgccgcgcgccctggccgacggcaactacgacgcgctggtagaccccaggctgcggggcgactacgaccaaacggaggcggcgcgcgtcgtggccagcgccgcggcctccgtccgccacgcggcgcgccgccgcc

SEQ ID NO: 2521 - DNA, 347 bp, Zea mays
  Peptide Sequence Number=SeqID_8850
  Probeset Number=SeqID_16924
ccgcgccccgcgcgcgccctcgtcctcgccggggcgctgcctcgctctcccgcggcctgcaggctgccgcacccatgcgcgcccgccccgctggggcccggcgcgggcgcccgtcctgcggctttcgcgcctgcgggtcccctgcggtccccgccgcccgcccagagccggcctgccggcgggccgcggcgctgcctcgccagcccgctgccgcctgccgggcagacccccaccgctcacctggctggtgcccctccctccccgctgggctgctgtggctgccctcatgtcgtctcctcccgcgccctctgggggcggcgaccttcctcccccacggcccgcgtgcg

SEQ ID NO: 2522 - DNA, 207 bp, Zea mays
  Peptide Sequence Number=SeqID_8851
  Probeset Number=SeqID_16925
cttcatggactggaaagaagtggacagagcaaccatctggccctccagtttctcattcttctcaagcacagtatcatacttatccttcagtagcagcagcagctctttcagctccccattcacctgtgccgcattctcatacttctcctccaaggacagcacctccttttccagcttgccattggccttgaccatacagtcataccc

SEQ ID NO: 2523 - DNA, 355 bp, Zea mays
  Probeset Number=SeqID_16926
tgcatgcctgcagcagcatgattggatcgcctccgccttcgaccgatgcatatacggcaggatgcaacgacgacgcaatcagccgccagccaacctcaccatctacatagtcgcctcctcgggaaccagagaggcgcgcgttttttttaatcatgcaacggtaatgtctcagcggccggccgccggctctgccggccggatcacgtcgtgtttgcacgcctgccgctgcggccgccgccgccggagcattgagcagacagaggggccgaggaaacaggcgcacgtgcctccacgctcgctcttgtcatttgggcatggcggcgttggcgacgggatttgtccccgcgcgcgtcag

SEQ ID NO: 2524 - DNA, 420 bp, Zea mays
  Peptide Sequence Number=SeqID_8852
  Probeset Number=SeqID_16927
gcgccatgcgtacactggtgtatatcgcggtttttgacgaccggggaggcgcgcggaaaagtcagctcgcgtattggtctttcgtctccggcttttttatataacgcgcagaccaacctggaaagtgaaatagcggaacagcacgcgaagcagacggttcactgtgtactggtggatgacagccagtttccctcatcgtgagggggtgaaagccctgtcggacgtggtagataatctggatattccggtgctgtgttatggtctgcgtaccgactttcgcggggaggtatttaccggcagtcaggatttactggcctgtcccgataagctggtggaattgataaccgcgtgtcactgtggacgctaagccagcatggtgccacggctggatgcgcagggtaaaccgctcagagaacggga

SEQ ID NO: 2525 - DNA, 484 bp, Zea mays
  Peptide Sequence Number=SeqID_8853
  Probeset Number=SeqID_16928
cgacctgcaggtgagcgatcagcaactggatcaggcgattcagaacatcgccgcgcagatccgtttgagcgttgatcagctgcgcagccgtctggcctatgacgggatgaactacaacgattatcgcgcgcagatccgcatagagatgctgatctctgaagtgcggaacaatgaagtgctgtcgcgcatgaccattctgccgcacgaaggggatacactggctaatcatattggctcgcagaatacccactgcaccgatcttaacatcagccacattctgctgccgctgccggaaaatccatctcttcagcctgttgacgaccaggaagcgctggcgcgtcagctggtgggtgaactgaaaggcggtgccgatttctgtaaactggtcgtgacctactctgtcggtccggaggcgctgacaggaggcaacatgggctggggcaaaattgaagagctgacaacgctattcttgcatgcgctgaac

SEQ ID NO: 2526 - DNA, 254 bp, Zea mays
  Peptide Sequence Number=SeqID_8854
  Probeset Number=SeqID_16929
cctcatccagcagtttatcaacgacttcgtcgatgatagaattagcgacgctcattacatccagcgcttctttcatgacaggatcgacctgggggtcgtatggctcgggcaacggaaacttgcgcgctccccgcgagatggcgacaaagcgccgaggggtttggtgctgctgctggctgccgttgcctcggaggctcagagcacgcacgggcacggcgtagcgcatggtagaggtgatagcggagggccgcgag

SEQ ID NO: 2527 - DNA, 427 bp, Zea mays
  Probeset Number=SeqID_16930
aatttggaagaatgaaggaccaagcagggcgcactgctgcctgctggagagccttgttggcctcagtgttcagatctgcgcatccattcaggcaagcgagttcggcgacgcgctccgggacgccaacctcacagtggatttgctcatgcacaagcttagcaggatacttgccgtgtacaagtcaccagacaccgagtacccaggtatacggcgggggacagttgagctgatcatctggatgctgcggagcagcagacgctgcgttgagttcttccttgagcgccgagtggacagggcggtgaaagaagtcgcggaaacagaagagcggcttgagatgttcaagacgttctgctgcggcatcggcctcgctaagcaaggagagcccgtctcttctcttgttgcttctgctctgcctagcattgcttga

SEQ ID NO: 2528 - DNA, 275 bp, Zea mays
  Peptide Sequence Number=SeqID_8855
  Probeset Number=SeqID_16931
tggtagcagccgcatgcgcagtgaccggaaggaggagggatcaagcgaggcggaccaggagcccaactccgccccgctgggcgaggaccagggcgggactgctccgcggacaggcgatggtgcagcccaggccaaggggccgaacatgcataggaccgaacgcgccagcggacgcggtggcaacgccgctgatacatggaacgctcgtacgagcgctatctaccgtgccacgctgggcacagccatgcgtgcggccagcaacatgctcaacaaca

SEQ ID NO: 2529 - DNA, 548 bp, Zea mays
  Probeset Number=SeqID_16932
gactctattaggatccccctgtgacgggttcaccgtgtacgacgccgggagcaatctgtccttcctcgtgtactgctacgccgtctcattcctacggcggggcctagccgacgtagttctggtgcaccccacactgaacccactggtcaccgtgcgccatatgactcgggtcgacttagaggaccgttgggtgatttacgacggggactccgacgaccacaacacggccggagacacgccgctggtgtccgtccttcgtctgcacataggcgcgtactgcacgacggtggcgctcgcgcaccccggacgcgggtccaccgtaggaacaaccgacccaccaccatacgtggtggaggcctcctacggtcgacccgcctgcgcggcgcgcgacccccacggtgtcgccgtactcgcctatgtgcagaggaaggacgcccaccaccaccacgtgccccgccttgttgtggccgtgccactcctcggcgcgccagtgtccatggtgcttttaatcgaactgggaatcatgttgcacggcgagtggtcggttc

SEQ ID NO: 2530 - DNA, 506 bp, Zea mays
  Peptide Sequence Number=SeqID_8856
  Probeset Number=SeqID_16933
tgcttgtacccaaaaaacattcgagtcgaactagtgcaccgtggggcttcgcagtcatcacgaatctagtattgttttcccaaatcaaggcgtctgggctgccctctagcaggtagcctgtacacagggagctatctactatttagcaatatagaaagttgaactgtgtattgatagatattatacacgggtcagccttcgacctacagcctatgtctataccagagggctagcaagatcatacaaagtagttcccattctttatgctctacagggggggatatatccgccatggccctatccgtttccatgaacgggatttagtgacatcactcgtcatatctgatgaaatttgtgtctcagcagcacattctatcaatagtgattatgagcatacaatcctctagaatttcctaagatccgcggcagacattagatttgtttttggtgtatacccactcggtatggtgtttatctaaaaaatgaaaaaaactacggtaagtaaa

SEQ ID NO: 2531 - DNA, 415 bp, Zea mays
  Peptide Sequence Number=SeqID_8857
  Probeset Number=SeqID_16934
ctggtggcagacatgttgcccctcatgggaggcttcatcgtcttggagttcttcccgttcctggcccgcttcttcgttctgttcaaggcgggccgcgccaagtccgagatgttgaggaagaagtgggacgagctcctggacgggctgatcgacggccatgcggcgccggcgagtgatctcaaggacaaggacgaggacgaggacttcatacatatcctgctctctgttcgacaggagtacggcctcaccagagaggccatgaaagctatcctgcttgacgtatttttcggcggcatagacacatcagcttcactactcgaatacaccatgattgagctcataccagaggccacacgtgatgaagaaactacaggccgaggtgaggagcagcagcctgcccccgcaccagcaccag

SEQ ID NO: 2532 - DNA, 577 bp, Zea mays
  Peptide Sequence Number=SeqID_8858
  Probeset Number=SeqID_16935
ctggggggaaacccccccacccccccggttttatggcccgttaaaggggggggccttttcccatttaggggggcaaaattttggaaaaaggcgcaccggtgggggcttttttggttattaccccacactgggaaaaaggggatttttttccaaagcatatttaatttgggaaaccccaaggttttttccccttccccccgtttttaaaaaccggcgcccatgtatttttttttcccccccttttaggggaaattgggcctttttaataaaagttcaacggccccccattttttgggattttttaaaaatttccccttttaaagggccccccggggggggatttttttttttttttttttttttttttttttttttttttttttttttttttttttttttttttttttttttttttttttttttttttttttttttttttttttttttttttttgattcgcccttttgatttgttcgttcgggcatggttttttttgcataaaccccgggccaaaaatgttttcacctcagggtcggtttcttcagcgtcctgaattttatcacgaggtttacccgcg

SEQ ID NO: 2533 - DNA, 755 bp, Zea mays
  Probeset Number=SeqID_16936
caagatcattccgcgcaacaagttcgagtccggcgaatcgatgcgcctgccgcagaccgtgatggtgcagaccgtcaccgccgattatccggaggacggcacgctgaccggcgtgaccgatcccgacatggtgtgcgtgcccgatccatcgaccgatctgtctgatcccgtgggccgtcgatccgaccgcgcaggtgatccacgactgcgtgcatttcgatggctcgccggtcgagatctcgccgcgctacgtgctgcgccgcgtgctcgacctgtaccacgcgaagggttggaagccggtggtcgcgcccgagctcgagttctatctggtcgacatgaatgccgatcccgacctgccgttgcgtccgcccgtcgggcgcacgggccgcgcggagaccggccgccagtcgtattcgatcgaggcagtcaacgagttcgatccgctgttcgaggacatctacgaatattgcgagatgcaggggctcgacatcgagacgctgatcctcgaggtcggcgccgcgcagatggagatcaacttcgtgcacggcgacgcgctgtcgctcgccgaccaggtgttcctgttcaagcgcacagtgcgcgaggccgcgttgcgccacaacatgtacgcgactttcatggccaagccgatggaaggcgagccgggctccgcgatgcacatccaccagagcctcgccgatgcgcgcacgggccgcaacctgttcgccgacgagggcggcgtcgtgtcaccgatgttc

SEQ ID NO: 2534 - DNA, 295 bp, Zea mays
  misc_feature (48)..(48): n is a, c, g, or t
  Peptide Sequence Number=SeqID_8859
  Probeset Number=SeqID_16937
gagccctaggatcttgtccattggcctaagagccccaaacttaaccgnagatgggcatggcgtcccggcgcgcgaggcaaggggtacaaggcttttgtcagataggtcctcttcgggacatatatgttatgttttccaggtaatgccacaattgctttatttctttggtgttggaaatcaaccagactcgcttgattgggcaacaattgttgtctacacatgtcaagggtcatgtgaccaaactgttagctacaaagaggaatttgcttgggttcagttgtaccctacaacaacc

SEQ ID NO: 2535 - DNA, 219 bp, Zea mays
  Peptide Sequence Number=SeqID_8860
  Probeset Number=SeqID_16938
attccttggaaaagatagggagcttccaagttccaacgcaggagctagactggatgttcatgttgcaagtgtactgtctactgcatgagcatggtatccacctacaacctgaagttgatgccaccacagtactgggtacaaactataattcatatttggtgtcttgtggggttggcgcctcattaactaaaatatcatgttgcaatatttcaaaagatc

SEQ ID NO: 2536 - DNA, 299 bp, Zea mays
  Peptide Sequence Number=SeqID_8861
  Probeset Number=SeqID_16939
gcatgcagctcgactcttgagatccccctggcgagcgcgagagggaggacgcgacgcaaatggttgttacccaggttttcgactgctggttcgagagtgggtcaatgccatatgcctacattcactatccatttgagaatcgggaactatttgaaaagaactttcctggcaattttgtggcagagggtttagatcaaacccgtggatggttcgttactctctttcagaacaatatggagtggtataaaaagggttcattttcttcttcagtttgttcaattatggcctgcaggcatgca

SEQ ID NO: 2537 - DNA, 558 bp, Zea mays
  misc_feature (58)..(58): n is a, c, g, or t
  misc_feature (100)..(100): n is a, c, g, or t
  misc_feature (103)..(103): n is a, c, g, or t
  Peptide Sequence Number=SeqID_8862
  Probeset Number=SeqID_16940
tttttaaaaatccccaaatatttggccttttcagcagaattcccgcctttagaacaanccttcttttttattttctatcttttttttttttttttttttnatntttttttttttttttttattttttttttttttttttttttttttttttttttttacttaactacacacgcaagcaattagttcatgcgcttattaggttgtgccactggccaccactacactatattacactagcacaagcaagcagctacacatacttgtccatatcacataaacgaaacagcatatataagaagatgtcccaacatctttgcaccacgcgcgagatcaggggccctgcaggccgaactcttcagggcgcggccacgttctccttggcgagcggcgcgatctcctcgccttcgacccctggctcgccgccggcgaccccgaggctgagcagcacgttctcccagttcttggcagggcccttcgaggagatggtgaggaactgcatgatccaggatctctcctggaactgcatgatccaggatctctcttggcagggcccttcca

SEQ ID NO: 2538 - DNA, 567 bp, Zea mays
  Peptide Sequence Number=SeqID_8863
  Probeset Number=SeqID_16941
atggaggggtccaggttaaagcagcagcagccgcaccaccaccacttgctcgacatgctcaaggccgagctggccaagctcatccagctcaccaagacgacgtggaaggagctcctcgctgccctgcttgcatccaagaggtcgcacgacacccagcgcttcgcgtccaggggcgacgttgagctcgacctcttcaaaccgcggcggatggacgagtacgtggagcaggcccaagcgttcgaggaggaccccagcaggccgccaccgtcggtggaggacgaagttaggccggccccggagccggagccggagccggagccggagccgaggccgacgtggatggcctggtcaggttcgcgtgattatgatgagcgcaggagctccgggttttgggcgtgggcggcggtcctcgtgtgcacggcgctggccaccgccgtgctcctggccggcgctgcggtgctcgccgtctatctcctctgccgccccaggatgccgtacctagcggtcaccgacgcgcggctggagcggctccagtacgcccaggacggcgccatcgactacctgcag

SEQ ID NO: 2539 - DNA, 350 bp, Zea mays
  Peptide Sequence Number=SeqID_8864
  Probeset Number=SeqID_16942
gtgattgaaatcgaatatggcgtgcagggtgaaggcctgcgccacgcgggcagcgtgctggtcgatgccgacggcaaatggagctttacctcgccgtatctgcatcagcctggcgtgtgggaatatcaggcgcgtgcctcaaccggcgagatgaagagcaactggagcagcaaattcgtgctcgacgtcagcccggacgccgcgttcgatcagcaggcgcaggatgaagcccagccggatgcgctgacgctgcaccagctgctgagcgaaggtggcaaaggcctgttcgttgaggatgacagcacccagcttctggttaacggcaagccaggcgacagcgtgcagctgca

SEQ ID NO: 2540 - DNA, 299 bp, Zea mays
  Probeset Number=SeqID_16943
ccacggcggcaacacgcgactcatgctgttggggctgctgccgaaacaaagctgcagttgtataagcgcaaggtgcgctgcctccctcggacgccagtgatagtgcaggcgctgatccctgcggcactcatcatcgaaggtgcagcgatgtacaggcgtgctcgcaagcgctgcgcgaggcagcgtcggtcctctgcatcgctcacgatggcgctcatcaagtgccagcaagctctgggagctacaatgggtgccgagagccgcacgggttactccacggagcacggcgccgaacggcg

SEQ ID NO: 2541 - DNA, 222 bp, Zea mays
  Peptide Sequence Number=SeqID_8865
  Probeset Number=SeqID_16944
atggctgccacgattcccttgttgaaggccacgccagggaagccgcgtgctgctggttacgccgcgctctcgggccctagtggtgtcgcgccgtgcctgaaagtggctgcgctgttggccctcgttcacggacgcgccccacgggagggggtgctccaccatggctgcgacctcgggcacgaggaaggccaagttggtgagcacctgccaccgacgaaatag

SEQ ID NO: 2542 - DNA, 239 bp, Zea mays
  Probeset Number=SeqID_16945
acacactatcatgtgcagctgccaatgatgggtcgtgctgttcacggcaccacgtatgtgctcagagctgcctccagcgcgaacgtccagcgagtggtggaggcgtcgcccatgtctgccgtcgacatcagccccatagactggcctagctggtacccggtggctaagatcatctcagaggaggcggcgctggcgtacgggcagcaaaccgggctcgacgtggtgactatcaatccagg

SEQ ID NO: 2543 - DNA, 876 bp, Zea mays
  misc_feature (262)..(262): n is a, c, g, or t
  misc_feature (876)..(876): n is a, c, g, or t
  Peptide Sequence Number=SeqID_8866
  Probeset Number=SeqID_16946
accctcgggcctgccgggaaaaaattaccccttcctgtgtggtctctttcctcttgattttggtggtgactagactacaagtttcctttgtatcctttgttataaaggtgaagccgtggagcattttactgttgagagacgactgattaggtctcaaaatggagattgacttcccctgctgctaaaatgcaggagtttgttcattcactctctcatttaatccatgtattccgaaccaagttggtttgtctcgcgtggaagnaaacaggatgaacaacctgaccaaatggacttctattcaaatacatgatctcttgttaaccagtgtgaactctcgaccattggactgccgatgggtaccgagacaacattgctcagtgccaaaagtagttcaacaggttggttttactaacttgtaactgccctatggaacaaaggttgagtttagagatcgttttatcgagttgtctaaactcacttttgttcaacccctcctaaggaagtgcttgccaaaaaatcaagttaagccgactggtaaccacctagtcatcgctctagccatgcctcgatcgcctcacgtgtgcttttccagcatgtgtgaataaatcgagccgtgctaagtatttgatgaaataggttggtcgtgaagtcaacatcaacggatctcttcattgattttttgagtatctatcatttttcttgaacttggattttctggctaacacgagttaactgtgatgttgttcgacatccacacccgtctcgtgtgctatgaactaaccgtgaccacttgttggtaaacctctttctatgagttttacccaagaggttgcatctgattctgtttgggtaaaatcgcgtatttgctgcttgctn

SEQ ID NO: 2544 - DNA, 239 bp, Zea mays
  Probeset Number=SeqID_16947
ctaggtggagaaaaaccttgcaccctgaaaagaccagtgtgggaagatggcttctggatgaggacaaacgcctcatggtcactgttaaactaattggacctggcaggtggagtttgattgctccgtttattcctggccgaacacaaacacaaatctttgagaggtggtgcaatattcttgatccagatctatatcttgatgactggcggcctgacgaagattccacattattggctgca

SEQ ID NO: 2545 - DNA, 905 bp, Zea mays
  misc_feature (1)..(31): n is a, c, g, or t
  misc_feature (872)..(905): n is a, c, g, or t
  Peptide Sequence Number=SeqID_8867
  Probeset Number=SeqID_16948
nnnnnnnnnnnnnnnnnnnnnnnnnnnnnnnactcactatctgtacgcaaacaacatgcttcgatatatcgaaggctatgttcagaaggtgaatcccgggaatgctccattggtagtggggcaattacttgatgatgaatgccctgaagattttatcaagggtttgatcctctctgttcgttctctcctccctattgagcctttggttgatgaatgtgagaagaggtttgtttttcatatcctcccagtttacttattcacatgagtgaaggtagccaagatgtgcatgtccataatgctcttggtaaaatcatcattgacagcaacaacaatcctgagcatttccttattaccaacccattttacgactctcgtgttgtgggtaaatattttgaaaagcgggatcctacacttgctgttgttgcttacagacgtgggcagtgtgacgatgaacttattaacgtcactaacaagaattcgttattcaagctgcaagctaggtatgtggttgagagaatggatggtgatctgtgggataaagttcttcagcctgagaatgaatatagaaggcaactcattgaccaagtggtttcgactgcattacctgagagcaagagccccgagcaagtgtctgctgctgttaaggctttcatgactgctgacctgccacatgaactgattgagcttcttgaaaagattgttcttcagaattctgctttcagtggaaattttaatctgcagaacctgctcatctcgactgctatcaaagcagatccatctagagtcatggactatgtcaacagacttgataacttcgatgggcctgctgttggagaagttgctattgatagcatgttgcctttatattgctnnnnnnnnnnnnnnnnnnnnnnnnnnnnnnnnnn

SEQ ID NO: 2546 - DNA, 697 bp, Zea mays
  Peptide Sequence Number=SeqID_8868
  Probeset Number=SeqID_16949
ataggatcagtcttaacaatgttttgagtgtttctgttaagctgagtttcctttgaaatggcgatacaggttcatgcatatgccttcaaggttggactggtgagtgatgcaaatctgagtaatgctctgattgacacttatgctaaatgtggaagtttagatgatgccaacaagctctttgaaataatgggcaccggccgcgatgtgttctcttggagcagcttgattgttggctatgcccaatttggttatgcaaaggaagcacttgatttatttgccaggatgagaaaccttggagtcaagccaaatcatgtaacctttgtcggtgtcctcatagcatgcagtcgtgtaggacttgttgatgaaggctgctattactacagtattatggaacctgaatatggcattgtcccaacgaaagagcattgctcatgtgtcattgatttgttggcacgtgctgggagactaagtgaggcagcaaaatttgttgaccaaatgccatttgaacctgatattataatgtggaatactctgctagccgctagcagaacacataatgatgttgagatggggaagagggcagcagaaggtgttttaaatattgatccttctcattcagcagcctatgtccttttgtgcaacataaataaaacatctggcaattgggatgagtttgcaagattgaagaaggatatga

SEQ ID NO: 2547 - DNA, 498 bp, Zea mays
  Peptide Sequence Number=SeqID_8869
  Probeset Number=SeqID_16950
ccctcaacgccatacgtgccgcagagtacagccagctcttcaagcaggccatggccagcattggcctcaagatgccgccctccggcatcggctccacgctgaagtagtgcctcaccatcgctaaggacatgcagggagttcccgctcattgtttgtatagcattcactataggtggcacggtgtacggcatagccttcgacaggtagatgtgtacaatcatatgcagggtcgtcagtacgtgtagcacaatcagcaggtgctcgtgaatagttactgctaggctgaattgagtccgagttcaaggtcatgcgcgataagaccagtgaagtgttcatcatttgttccatctaatacattgataccatgtgtgtagaccgggcgaactccatccccgtcgcgcctgttcatacactcacggtgtaggagtatcaaagagttactctctcctcagttgccctcatccttagaaattgcgttgagtgtgctggtacctatgt

SEQ ID NO: 2548 - DNA, 1434 bp, Zea mays
  Peptide Sequence Number=SeqID_8870
  Probeset Number=SeqID_16951
tttttttttttttttttttttttttttttttttttttttttttttttttttttttttttttttttttttttttcataaagatggcttagtctttgttcattacttcccacaatgcattactttcaagcacatctaatagaagtacacacatcttcaaccctgagtgaagtacttactacacaataaggatgccacaagtagaattgccaaatgagccattgaacttagagtatatggcattgtcttcaagccaagaacagctaccaatgctcaggctctcaatgactttgtggctaaatggatagagagacaaatatcattcgagtcaaatcctttagattcttggaccatcaatttcgacaaatcactacaactgactagagcagtagctagagttgtgcttacctcctagaaaggtgtgaagttcaaatatatccttcaaatactcttctcgacatcaaataatgttgttgagtatgaaactatggtactcagtctacgaatagccattgctctcggcatacatcagatctgagtcataggtgactcactacttgtgatcaaccaagtcaacaaggaatggacctggagtgatgacaaaatgatgagttacaactaggaaatttagaaacttgaagaaagaggtgataggattgagtttatacatatcccgcgagccaaaaacaaagaggtagacaaacttgggaaagcagtatcatcgagatctcccatggctccaggagtcttcttagaaaagttaatctccacaaccatcgataagaggacagagtttccttcggtcgagtaagttaaacaaccaagcttagagatgcttaatggggtagaatccaaattaatggtcattgaatgagaccggtgggtgcctttcatcaaatatctactagacaaagtccttcatgaatacaaaacattagccctttaagtacaacagaagtccaaggcttacgtaatgccaatgatgaattatcgaaaaagttctttgagaatcttgatgagacgcatccccattaaagaaggaagggaactactcaatgaaatccattcaagcatatgtggaaacagtactcattgtggaatctcacatacttttataaatagatatctatttagcttgtgtttattggactaacttttagcaaagattaattggctcataattactatttgactaaagtaaggtttataatcaagttgtgacctagaatatatcagttacttctgtttagtatatttctcacgtgggttataataacatgggagtcccatttacaatttaatcacctgctatttttggaagatcacatcttattcattataattctgattttagtgattctcgaacatacgatctcgtagcagcgtgtagagtattcctacgtagtttgtcctcatgtttgatgtaatgttattttt

SEQ ID NO: 2549 - DNA, 459 bp, Zea mays
  Peptide Sequence Number=SeqID_8871
  Probeset Number=SeqID_16952
ctatttctgcttcccaaactccaacagctgagcagtggtaccaccagcagcagcagcagctccaatactcgcaatactaccagcagcagcaccctggatccaacccttacatgcagcaacatcaacaatatgaccaataccagcaggcgtatcagcaatacatgcaacctccaatgcaagtaccatcccaaaatgcggtgcaaggatctgcacaacctgcttcttatgttcagcctcaagttcagtcctcccaggtgatgatgcaagcccaaagtcagccccaggtccatccattgacgagtcagccacagcttcaacagcatccagttcaaccccgaccccaaagtcaccctcatatttcccatgttcaagcaccttcaggtcagtcgcagcttcatcaaccaattcagtcagcccaagttccacaggtccaaccaagtcaagttcctctccaaccat

SEQ ID NO: 2550 - DNA, 289 bp, Zea mays
  Probeset Number=SeqID_16953
ggcaagggccagcggcggccacgacctaaggaccagttccccgtcggcatgcgcgtgctcgccgtcgacgatgacccgacctgcctcaaggtccttgagaacctcttgttccgctgccagtaccatggtacttcccttgacaacaatgggacaggcaaccacgaccttgagctgctgagggagaaaaaggaccagtttgaccttgtgatcagcaacgtccacatgctggacatggacggcttcaagctcctcaagcttgtgggtctcgagatggaccttccggggatta

SEQ ID NO: 2551 - DNA, 703 bp, Zea mays
  Peptide Sequence Number=SeqID_8872
  Probeset Number=SeqID_16954
tgcatgcctgcagccgccgaagtggatccacgtcgtgctcaacggcaagggcggcgccgcgcccacggtggccatccgcagcgacaacgcctacatcgtcggcttcaccaacagcaaggggacgtggtaccagctcagcaggacgggcgcccaggagaagctcgtcgacgacaaccccgtgatggcgggcttcgacggcaactacaacacgctcatcggcggcagcgacaagctgctgaccctgaacgtcgccaagtttagcgtggcggccgcggccgccacgttctggaaccacaaggccggaaacacatcatatggtgacgactgcggcagcgacgaggaagaagaaagcggcatgctccgcgctggcgacccgctgaaggtggcggtggcgaccctcgccgtggccatctgcgaggcggcgaggttcgtccccgtctccacggtcatcggcaaaggttggggcgagcaacgggtgagcgtcacggccaaggaggtaagctacatcatggactggggtgacctgtcccgcgcactgctcaagtggaagagtggcggttataaggacgacaagcctttccagccattcaagggtatcgggataaataacggggaggaagccttggctgtggtggcccttctgaagctcatgtcgggaagccagagcctgttggcctggctcaagtgcttctgggggcttctc

SEQ ID NO: 2552 - DNA, 287 bp, Zea mays
  Peptide Sequence Number=SeqID_8873
  Probeset Number=SeqID_16955
gaccttttagggctttggctagtgtagcggaaactttgtgtgtatcctcctctttctccgcgttaatgaaaaaaaacagggtgtgatcgtccttctgtggcaggttcttttttttttttttttttttttcctaggcacacaacaattttatttactagcagtaagtcgcatgtcccttaggatacaatcatttcaatccagcatccagttgtttaccttgtgcgggatagggcgcccgaaggggcgcctcctgatctagtagctttaaaagatcaacagcattcagt

SEQ ID NO: 2553 - DNA, 347 bp, Zea mays
  misc_feature (99)..(99): n is a, c, g, or t
  Probeset Number=SeqID_16956
gctctctgcctccccctccgcattcattgtcgaccaactctaatgactccctagggatctccctaggcgagcgagccattattagggtcatggaatacnctggcctcactggctcagatgagttggacgagagaaaggaggagggcttggaggagttggaggatgacgaggaggaaggcgacggcaagggcgatagaagcggcaagggtggcatcagtggcatcagtagcagcagcgagggcagcaatagcggcggcgacggtggcaacaagggtagcatcagcgatggcgaccacaagagcggcaacagtggccgtagcaccagtggaaaggcgccgccggcctaa

SEQ ID NO: 2554 - DNA, 416 bp, Zea mays
  Peptide Sequence Number=SeqID_8874
  Probeset Number=SeqID_16957
atgggaggctcctacccattaggctgcaaccagcgctcttgggagtgcagcaagccagtcttccctgttgagatcagcagggaccgcgttcaagatgttgttcaagagattctctttggtgtaaattgcggccccgttcccattgacggtcgtgaaattagagtaggggattgtgctctttttcgggctgtcggtgctcctccgttcattggattgatacgttggattgagaaaaaggaagaagcacatcccaaattacgtgttagttggctttatagacctaccgacgtgaagcttaacaaggatatacaactcagcgctgccccgtgcgagatcttataataattccaccaggacgaagcatctgctgtttctctactgcatccttgcaaagttgcctttttacgtaaaggtgt

SEQ ID NO: 2555 - DNA, 265 bp, Zea mays
  Peptide Sequence Number=SeqID_8875
  Probeset Number=SeqID_16958
tatctcccatttttcagaatgaatttttatttggattaggttcacaccatttgaattttagaaaccaacttattttgacagatttctgttccccacaatgagattggataaattgataagggggtatgggtaaaatggcccttattgaaggtggccccaaggtctggttggattccatccaaatttttggtgggaggtttggggggcccaccttggattaggacccattcttccttttccccaatcagggtgtgataatccgtgg

SEQ ID NO: 2556 - DNA, 594 bp, Zea mays
  Peptide Sequence Number=SeqID_8876
  Probeset Number=SeqID_16959
cgccttctcccgtcagcctccgtccgcgccgcgtgcgcggtcgcggtggccgcgctcgccggttgcgcgcagattccgcgcgacccgatcatccagcagccgatgacggcgcagccgccgatgccgatgtcgatgcaggcgcccggctcgatctacaaccccggctacgcgggccggccgctgttcgaggatcagcggccgcgcaacatcggcgacatcctgacgatcgtgatcgcggagaacatcaacgcgaccaagtcgtcgggcgcgaacacgaaccggcagggcaacaccgacttcaacgtgccgacggccggcttcctcggcgggctgttcgcgaaggcgaacctgtcggcggccggcaccaacaagttcgcggcgacgggcggtgcgagcgccgcgaacacgttcaacggcacgatcacggtgaccgtcaccaacgtgctgccgaacggcaacctcgtcgtcagcggcgagaagcagatgctgatcaaccagggcaacgaattcgtgcgcttctcgggggtcgtcaacccgaacacgatctcgggcgcgaactcggtctactcgacgcatgtcgccgacgcgcggatc

SEQ ID NO: 2557 - DNA, 283 bp, Zea mays
  Peptide Sequence Number=SeqID_8877
  Probeset Number=SeqID_16960
tccacctgctagctgtgtgtatgctgatcatcgctgcctctggtgtgacggcggatcgattgcaggctgttgacatcccactgaagctcgttacagccattggtattgctgcggatcaccgccgaaagaccaaatgccttgacggactgctggccaatgcccacaggctgaagacatactaggccctgctggctatcttacctaggcctgcacacaaggtaaaagttgctgactctcctccacaagagctagccgcctctacccaagtactgggtgactacat

SEQ ID NO: 2558 - DNA, 272 bp, Zea mays
  Peptide Sequence Number=SeqID_8878
  Probeset Number=SeqID_16961
gcaggaggggcgtacggtgggccgggcacgccgtgacaggtcaggtcagggtcctcgcatgtgcccggctcggcatgcgcacctgctccgtacgcccccaacccaaagagcaaacctgctgccggtgggcggtggggctgtgcgctgcctgggcgaggaccgtgtacactgttaccgccgtacgtacgcggcgcgtaactgccacggcgagctggctacgcgccaccggccagcctatacgcgcggacgggattgggaggatgatgggctga

SEQ ID NO: 2559 - DNA, 505 bp, Zea mays
  Probeset Number=SeqID_16962
ctgcagccgccagcaaccaggccaccactgctccctggtcactgccgccgtggatcctccccactctgacgctccctccctccccctctccttcgtgctggctcctggccacctaggcgccacgaccatgggcgcaagcgcggacgccgggctaggtgcggccaccgccaacctggacgcgctcgtcaccgtggccctgggcgcgcacaccacagcggcccggcgcgccgccactcctctgcccacaaccacctccccaggctctcttcccggcctccgccgctctctagtcaccacggccctgggcgcagacgtcgccgccagggtgggcgtggacaccgaaataggcgcgtgggccgccgcgggcagcgcgtgtccaggcacagccgccaccaccatgggcgcggatcaggccgccagcgccctagacctcgccgtcgccgccatggccgtggatctggccaccggctccctctcccgctcctcgccaacgtcgcgcgcatag

SEQ ID NO: 2560 - DNA, 721 bp, Zea mays
  Peptide Sequence Number=SeqID_8879
  Probeset Number=SeqID_16963
gccatcgagcgcgcgatcaggacagcgcgctgtccaccgcgcgcgctactatttcgcaggaagactctgctgagctgtgcggagaataagcgatgctgacaagtccatcggagatgagaggagaagcagtgcctgcaggcccaggagaagaagctcatcaacgagatcaagaaggtggccaagcagggtcagatgggagctgtaaaaattatggcaaaggatcttatccgcacaagacaccaaatcacaaatatctatgccctcaagtcccagctacaaggtgtatctcttcgtattcagactctgaaatcaacacaggccatgggtgaagccatgaagtgtgtgacgaaagccatgtggcagatgactagacagatgaatcttcttgccttgtagaaaataatgcgagagtttgagatccaaaacgagaagatggagatggttggtgaactgatgaacgatgccttcgatgatcccttggagggtgccgaggaggaaaagatggaatagaactcaaattttgatgcccgcataagtgtggagccttgaattcatatatatttagttaggctcaatattaacgcacacagtcgatgatcaagtttttcaattagtattttagtctggatttaaagtacacttatgtatgagttatttgacaacgcccatttattataaattgaatgatacttatttatattatattaattacaatgttatt

SEQ ID NO: 2561 - DNA, 372 bp, Zea mays
  Peptide Sequence Number=SeqID_8880
  Probeset Number=SeqID_16964
atgaccattatgtgcgtggcgatcgcgctggtgtgtgcgctcagtacgctgtttctgccgctgccggcgcgcgtcagctggaaatatgcgctgctttcggcgctgctgcacgtcggctataacctgtgcctggtgcgcagctaccagagcggcgatctcggccagacctatccgattgcgcgcggatcgtcgccgctgctggtgacctgcgccgccgcgctgtttgccggcgagcacatcgccttcgctacgctgtgcggcatcgtgctgtcgctgaagctgcgcggcggcaaactggcgctgccgggcctgcgctacacgctggcgaccggtgcctttatcgccgcgtacagcgtggtggacggcatgggc

SEQ ID NO: 2562 - DNA, 405 bp, Zea mays
  Peptide Sequence Number=SeqID_8881
  Probeset Number=SeqID_16965
gcccacccggagcaacccgggcagctgacggaaaacgaccaacaccacagggcacaacgccgggagcacaaggaccgccaagccagtgccggaggcgcggaaggcgccgcagcccatctcaagaccaaaacacggagcacaagccggaagagcggaggcggaacagagacgccacaaaccgggaccaaaaagaaggggaaccgaccgcggtcaaacagcagcagagcacggcgcacgcagggaccgggcgagcccgaaaccgagcccccgaaagccgacacggaagccgaggacacggccagggggaggacgaaagggacgcagccggagacaatcagagggcgagcggggaacaaagcacaccgagaacgagcccgcgaagcgcgccgcgaggcgaaacactaa

SEQ ID NO: 2563 - DNA, 403 bp, Zea mays
  Probeset Number=SeqID_16966
tgcaggtggcgatggctgagcatttgatcgagtgcgacgatccggacaccgcgcaaagcatcgtgctggaagggctgaagcgtcagtatgacgatcggctggtgctgctgatgccgcgcatcaaaagcggtgacccgcaggcgctggagaaagcgctgcgtcagcagattaagcagcaccggcgccacgcccgctgttgcacagcacgctcggccagctgctgatgcgtcacggtgaatggcagcaggccgcagaagccttccagcaggcgctggcacagcgtccggatggctttgactacgcctggctggcggacgtttacgatcgcctgcatcgcccggaagacgcggctaaaatgcgtcgcgaaggtctgttactgacgctgaagaacaatcctggcgcc

SEQ ID NO: 2564 - DNA, 518 bp, Zea mays
  Peptide Sequence Number=SeqID_8882
  Probeset Number=SeqID_16967
tgcatgcctgcaacaagagtgccaaaacaagaacgcagagggagaaattggacctgatttgggctggccgcgacgagcttggttcacggcggcggagagttgatttggggaaaaacccgaattgcggggctacgacggctggccggcgacggatgaggctcggggagctcgggatcgcgctggcgagcataccacgcggcggattccggggacagcgcggtggtcgccgtttaaccggagcctgccacctcggtaactctttgacacgtcgccgggagcttttaccgtggccgccgacgaccaaaccgggccacagcggcagtttccatctcaagatcaccttttttttttgcgattctctcaagaagtcaagagcacactatgcgagctgggagccaagacactcgatgcattgttacagctacccatggcagaagtacgtgaagctcgggtccgtgctcaggcacttcgcctacacggttgctgcacttcatgggtgtctggaatctgaggttcag

SEQ ID NO: 2565 - DNA, 343 bp, Zea mays
  misc_feature (290)..(290): n is a, c, g, or t
  Peptide Sequence Number=SeqID_8883
  Probeset Number=SeqID_16968
atggacccgcgcagtgaagtgttgctccgccaggcagagctgttccagggcccgctgctgctcgccggcgcccccgccgacggcctgctcggccagttgccccaggcccggggctggaaatagcatgcgggcgatcatgccatgctcgaaagccgcttcgccgggcgcagccactatggggtcgagccaccggaagtggctttcgacaacgccgtgctgttcctgcccaagtcccgcgaactggctgcctacctgctcaacgccctggcctcgcgcctggctggccgcgnaactgtacctggtcggcgagaaacgcggtggcctccaagggaaggcccaacaa

SEQ ID NO: 2566 - DNA, 346 bp, Zea mays
  Peptide Sequence Number=SeqID_8884
  Probeset Number=SeqID_16969
atgcatcccatgtcgggacgttcgccgccgagagagagaaagagagagccgccatggatctccaccgtcgctcatgagcacggcaccaattggagcattgtgtgtggtcaggaggttccgcccgaggacccagatcgcgtgggcggtggcaaggaaaaagagcgattagggagccaccaattcgtcgccatcgccgcgaatccacgatgcgcctttcgtttagcactcaatgtacctaggggccatgcactgtggggcggtgcgggtcttctggccatggcacaccgccgcggcgcccctgctatgtcgccagagttcggccaggggaggaaggcacacgttggcg

SEQ ID NO: 2567 - DNA, 279 bp, Zea mays
  Probeset Number=SeqID_16970
atgagcgcgcgggtcggagtcacactttccggccgctatcgacttcagcgactcatcgccacaggcggcatgggtcaggtctgggaaggcgtcgacagcaggctcggccgacaggtcgccatcaaggtactcaaggccgaatactcgaccgaccccgaattcgtcgagcggttccgcgccgaggcgcgcacggtcgcgatgctgaaccaccccggcatcgccagcgtctacgactacggcgagaccgaactcgacgattccggccgcaccgcctacctg

SEQ ID NO: 2568 - DNA, 295 bp, Zea mays
  Peptide Sequence Number=SeqID_8885
  Probeset Number=SeqID_16971
atggcaccgcaggcacaacagggggccgggagggccggggaagacgacaccacccaggcgcgcgcacacgaggctgcgccacaagagggccagcggcgacaagccctggaaacgcacgccaccgaccgcgcacaaaagaaccaaaggaaccccacgctacagcgcaggaaccaccccgccagcaacccggtggacgctgaacaggacgacgagcggccgaagaaacgcgccaagaggaaccgccaccacaagaacagcatcaggcccggcagcaaaaaaaaacccgacgggaaca

SEQ ID NO: 2569 - DNA, 323 bp, Zea mays
  Probeset Number=SeqID_16972
gtgggcacccaccccaccacggggccctacagcagcacaggagagcgcgggctgcccacctagctagggctaccaggcggcccggcccgccccgcccggccagcatttactgcgttcatgcctccctcgcgtcgtccaacggcgcggcactaccacgccgccgccgccggccggcagcccgacccggcgcccaccaccgccggacccgtcccgaccgttcggcggtgacagtacggatcaccgccgccgccgcctccgtgcagagctccgtccgtacgtcacggtcacggttcgggctatgcgtgctattggctaggcgctag

SEQ ID NO: 2570 - DNA, 345 bp, Zea mays
  Peptide Sequence Number=SeqID_8886
  Probeset Number=SeqID_16973
gccgcaaattgtgtgacggggcccgttacgttatacgagccaaaaaccactctttcgctccaaggtaccacgctggactggaatggactggatcaagagagccaacaaatcaacgtgaatacacaattcaaaggatacgactatctggattgttacggtgatcctgaatttattggcaagatcggcaccgacattgaagattacaagtgctcatggctagttgtgcaagcccttgatcgtgctgattagagccaaaagcacattctatttgtaggtcatctccagacctctttgaaatgattagaactttactgtctaaaggtttatacaattgatggctctgca

SEQ ID NO: 2571 - DNA, 380 bp, Zea mays
  Peptide Sequence Number=SeqID_8887
  Probeset Number=SeqID_16974
ctgcgctcagaccgggcgcatatgtatatccttgccaccctcaccttgtgaagaaggggtggaagagtcagtggttttacctctgcaacgacgatgtgcgattgtcggcgttcacgcactgcgtcgttctcgaagaaaataagcgatggaggtggggcctacctcgggagctccagacccacatgaagccgttgttggacgtcctacggagatgctgggaccgcggccttaccgtggccggggtcatcgcagtgttccaccggcggagggttctgccgctgaccgaccatcggctctgcctcgacgagatgacgcccaaggcctccttggaaagttcccagatggcttcgactgccctcgccaccgacaaactcctctag

SEQ ID NO: 2572 - DNA, 253 bp, Zea mays
  Peptide Sequence Number=SeqID_8888
  Probeset Number=SeqID_16975
ctgcaggttaaccccttcgaaagcttccaaagaagtgtgatttccatgaacacctcccaagataaaacaccccgaaggtcttgaatccatcttgaatctgtcaaggcttccagaatttgcttcaactgttccttggactgaagaggagcatcgaacatttcttgctggtcttgaaaagctaggtaagggagattggaggggtatagcaaaaaaatttgttaccaccagaacaccaactcaagttgtaagtcat

SEQ ID NO: 2573 - DNA, 467 bp, Zea mays
  misc_feature (454)..(454): n is a, c, g, or t
  Peptide Sequence Number=SeqID_8889
  Probeset Number=SeqID_16976
atccccctgctctctggtacgcccttgatcggtctgttcaagctgctgaccttgttctgcacccgcccgaatgagctggcctcacagtggattattgtcatcttttgatcatgccagtttgcgccgtggttatgaagtgtacaagcaggtgtgtgctgcatgtcacagcatgcagtatgtacgctacagagagttgattggtgtcacacacactgaagaggaggccaaggctgaagccgccgaaattatggtggaggatggacctgatgacactggtagcatgttcaaaaggcctggcaaaatagcggactcattcccaagtccatatcccaatgagaatgcggctcgtgctgctaacaatggagcttacccacctgatctatcctatattacttctgcccgtcacggcggtgaggattacgtgttttccctgttgaccggttactgtgtcctnccaggggtaccga

SEQ ID NO: 2574 - DNA, 222 bp, Zea mays
  Peptide Sequence Number=SeqID_8890
  Probeset Number=SeqID_16977
ccgagtacgagcgcaagcaccacaagagccacaaggaggaggcgaagccgaggaggaacgagcgcgcgcgcgacaacaccgagcagggcggcgggagcaacgcagacagccgcggagagccgaggaccccgaaggacgggcaccgcgacgccggcaaccaggaggaggaggccagccacggcgacaccgaggaccgaaaggagcaggaggccggcaagaacg

SEQ ID NO: 2575 - DNA, 303 bp, Zea mays
  Probeset Number=SeqID_16978
cgacctgcagccttcaggcgtgcagccctgctggagaagtcgcccagctctccttcgctggttcccttggccttgagcctggcagcgcgctcagcagagaggtaaacagagtggtttttccggagggggtattgccacatactggaggatcacataaagcaggattcagagtggcttactcaaactcgaaaggagattttcacttggatggggtgttcaatgtgatatcttatgatgtagttcccaagatacaaagcacacttctgtatttggatttcaaggtagattttgtgtcttatactt

SEQ ID NO: 2576 - DNA, 496 bp, Zea mays
  Peptide Sequence Number=SeqID_8891
  Probeset Number=SeqID_16979
atggaccagcagcagtacccgatcatatacccaagcgcaccgccgaccccgggcaacatggagacgggcctcgtcgccacgggcctgcctgtgcggcggcagcagctcggcggggccgcgccggacagggacggcggctgggcgggcaacgaccacagcacgctgatcgtggtggccacgctgatcacggcgctcagcttcctgctcggcctcagcatgcccggcggctactggcagaacgaccagaagttcgtgagcaacggcggggtggtgtaccaccgcgccggagaccccatcatgcgcgacctgcaccggccgaggtactgggtgttcaggggggccagctgggtcggggtgacgagctcgatggtgatgacgctcagcctgctcgtgcggatggccgtggactcgcgccacgtgctctggtccttctcggtggcctactccagcctcgtgctcaccttcatcgtgtcgcagtccaagacgcacctgtcgc

SEQ ID NO: 2577 - DNA, 552 bp, Zea mays
  Peptide Sequence Number=SeqID_8892
  Probeset Number=SeqID_16980
aacgccggctgacctggtggttcgtcaggaccaggatcgacaccgagcgtcttttgacgtttttgttgctctccgtgcccaaggagctgtcgacgccggcggccctcgtgagccggctcgtggcggcgtccaggtcggtcggtgacttcgcggggctgctgcatggcgctggtacctgtgccagcagcagcgacgacgcagttgcagagcaggcgcggtcgtggaggaggtacgccatcgaggcgcacctgtggcgagcgatgctgctcgttggcaccggcggcggcgacgccggtagtagcttccacgggatcatgaagccacgcgacgcgctcgatgccctgatgcatgtcccacgctcggggctctcggcgttctgccgggcggcctacctggtcgtcgcgtcgtcggaagccgaggcggtcgcgtgccggaacctgtaccacaaggccttcgtgacccgcggcgggcacccgaggacgccgctttacccgtgcgttcgtggggggtcgcaaggtccgtgtgggcgcttcgggttgctgattggccggc

SEQ ID NO: 2578 - DNA, 257 bp, Zea mays
  Peptide Sequence Number=SeqID_8893
  Probeset Number=SeqID_16981
atggacaagagcggcggcagcagcaggaagacgaggaggaagaagaagtctctcttcccaaaactccacggagcagaagatgatgttgggaataatgatgcctcgccgagacgtctcccgacagagcagcactgcatcgaccccgccgcaggtcgtcatcattggcttgaaggagtccctagaacggtggtcagtggcagcagtggcttccccgtcagcgtcagcgtcgtcctcatccttcttcaaaagcctttcgg

SEQ ID NO: 2579 - DNA, 305 bp, Zea mays
  Probeset Number=SeqID_16982
atagccacctaaactacatcgtgagcactgtccaactcccgaatggcgccgtcaaagccatcgaccaacgtcgtcgtggcttcttctgggcgggtcagaagctttcccatggctccaaatgtcttgtcccatgggagattgtgcttgggtgcaagttcgtcggtggtctggaggcatgtggtgggagcagtacggcgactcagcaccttcgctgcaacgcgccgccgtcagaatacaccagacaagtgtacagcacgttgacgttcccgagggcctggggcgtgatcctgcaggtcgcactgtag

SEQ ID NO: 2580 - DNA, 246 bp, Zea mays
  Peptide Sequence Number=SeqID_8894
  Probeset Number=SeqID_16983
ggcaacccccggggacggaggccacgcgatgaacacttaccggcaaacgccaagctccacccgacagcgcagatagactattgggtgacacagagcaggcgaaccaagctgatcacgggcggaaacaccaccagcggcgcgcgcgggagccgcgagggcagaactgagcagaccgacacaaggaccggcaggccgcacggcatgcagggcagagacacggacagctcaggccaccggacactctag

SEQ ID NO: 2581 - DNA, 215 bp, Zea mays
  Probeset Number=SeqID_16984
tatgttcaatattaactatcttgccatcttcttagtgtatgagtttcacatagacaagctctgttcactggtgaagaagtggcaaactcttattgaggatcatgtcgatgtcgagaccattgataactacatgttgcagttgttttgcattggcttcaccaagaggtaggccaaccaagtgaagaactcatgtattacaggggggtcctctagag

SEQ ID NO: 2582 - DNA, 556 bp, Zea mays
  misc_feature (72)..(72): n is a, c, g, or t
  misc_feature (116)..(116): n is a, c, g, or t
  misc_feature (122)..(122): n is a, c, g, or t
  misc_feature (124)..(124): n is a, c, g, or t
  misc_feature (200)..(200): n is a, c, g, or t
  Peptide Sequence Number=SeqID_8895
  Probeset Number=SeqID_16985
gacaaccggggggacaggaggaccaaccagacacgaccccacatacgaccattctaccacacccagcccgcncccggggacccagaggaaaacatcggaaacgcaccccatccacnaaaccnancggaagaggggaccgcgacaaacacgaacaccgccagggcgggaaacccagacggacacaaagccacacccgctcnacgcagggaggagcgacaaaccccccccgcagaggcaaaaacacgacaaagccccccccaccggacccaagcagaaagggacaagcggaacaacgacggccgcaccgcaaagggatgcacgatcaaaccaaaactgggagaacccgcaaaaaaagaccgcacagccacagaggaaagccgacacagcggaccaagagcgaccaaggatgacgaaaccgtaaacccacaacccactaagcgcaggaaacaccacatccactttgggcccgaaacagaaaacaaagcacaagcccaaactgcgcaaaacaacgggcagcaccagaacgcgactgcgggcccacaagaaagaacccccg

SEQ ID NO: 2583 - DNA, 502 bp, Zea mays
  Peptide Sequence Number=SeqID_8896
  Probeset Number=SeqID_16986
cacttcgacgcaacgcagctggacgatgttttcctcgtgattgccgccaccgacgataacgccctcaacgcgcaggtatttgatgccgccaatgcgcgccacaagctggtgaatgtggtcgacgaccagccaaaatgcagctttatcttcccgtcgattgttgaccgctcaccgctggtggtggcgatctcctccagcggcaccgcgccggtgctggcgcgtctgctgcgtgaaaaaatcgaagcgctgctgcccgccaatcttgggcagatggccgaagtggccggtcagtggcgcgacaaagtcaaacagcgctaccacaaaatgtccgaccgtcgtcgcttctgggagcgtgccttcaatggcctgtttgccagccagatggcggcgggtaacgtcaacgaggcgtgccgcacgctcgatcgcgaactggaaaacacctccgataatcaaggtgaaatcacgctggtcggtgccggaccgggcgacagcggtctgctga

SEQ ID NO: 2584 - DNA, 760 bp, Zea mays
  Peptide Sequence Number=SeqID_8897
  Probeset Number=SeqID_16987
tgcatgcctgcaggattttaaggtggtgctggagcaaacgccgaaactctccggcggtgccaacatcggcacgcggctggcgtttgatcgccagggctatctgtacatcgcgttcggcgataactttgccagccgcagcgcgcagcagctggacaaactgtcgggcaaaattgtccgcctgacgcaggacggcaaggtgccggcggataatccgtttaaccatcgtcagggcgcacgcgcggagatctggtcttacggcgtgcgcaacccgcaggggctggcgctcaatccatggacgcagcagatgtgggagagtgaacacggcccgcgcggcggcgatgaggtgaacctggcggcgaagggcaaaaattatggctggccgctggcgacatacggcattgattacagcgggcagaaagtgccggaagcgcagggcagcgccgttgccggcactgagcaaccgctgttttactggcagcaatcgccggccatcagcggcatggcgttttacaatagcgcgcgctttccccagtggaaaaactcgctgtttatcggtgcgctgaaagataaaagtctgatccgtctgcgcgttaacggcgagaaagtcgaagaggcgcagcggctgctgggcgaccgtggcgaacgcatccgcgatgttcgtcagggaccggatggttatctgtatgtgctgaccgatgaggccaatggcaagctgctgaaagtcgggctggcggaggccgccagcgccgcgcgcggttga

SEQ ID NO: 2585 - DNA, 348 bp, Zea mays
  misc_feature (262)..(262): n is a, c, g, or t
  Peptide Sequence Number=SeqID_8898
  Probeset Number=SeqID_16988
tcaccggctgcccgggggggcgccttttgcctgtccgggccgcgcttcccgttgttgttgttccggtccttgccttccccccggtttggccctgccccttggtccgcccgttcccccggttgccctgccccccgtgctggccgggcccggggtccccgtgccccatttgacggtgccgcccatgccggtggctccctccgtcaccgtgttgctgccgcccgtgccctccgtcccgtccgtgttgccttggttttcgctgccntcctcgccgggtgtcgttccttctgttgtgcgctgggaagtggccttaacgcctgtgccgtcggtcctgaccgtgcacgtgcccat

SEQ ID NO: 2586 - DNA, 414 bp, Zea mays
  Peptide Sequence Number=SeqID_8899
  Probeset Number=SeqID_16989
caaaagaccaccggaacaggagcggacggaaaaagagcagaagcaccccaggagagagagccggggccggcacgggcggcgagggaggacacccaccaagacggaaaagcgacgggcaacaaacggaaacgagacagagcggtcacacaagcgacgcacggagcgaagcgcaacacccgcacaacggcacgcagccaatcaacaacaaccaagggggcagcagagggagggaacacagggggacgaaccgacaagaaagcaacaagcgaggcacgaggcaccagaggcaaaagaggcagaagaggaggcggaagcagcaggagcatagcgaccaaaggacgaccaaaggcggggacgaccagagacagcaacaagaacaacaacgccaacaacaaagggggcgggggaggcaag

SEQ ID NO: 2587 - DNA, 608 bp, Zea mays
  Probeset Number=SeqID_16990
atgccgatgcgctgtcgcgcgcggccggtcaccgaggcgcagattgtggcgcagcagctgcaaccggtgacgctggatgccagcggcgagggctcgctggaactgccggtaccggccttcaacggcgagctgcggctgatggcgcaggtgtggagcgaagacagtttcggcgcggcagatcgtaaaatggtggtcgccgcaccgctggtaagcgaactggcgacgccgcgctttcttgccagcggcgatcaatcaacactggcgctggatttgaccaaccttaccgatcaacctcaaacgttgaacgtcgcggtcaacgcaagtggcttgattgcactcaacggccaaatcccggccagggtgcagctggcgaagggggcgcgaaccacgctggcgattccggttaaagcgcaggacggttttggtgagggcgacgtgcaggtgaccgtttcggggctgagcctgccgaacgagacgctggcaccgagcgtgcgccgctggaagattggcgtgcgtccggcttatccggcgcaaaccctgagtttcgataacgtaatgaacagcgggcagcgctggcaggtgatggcaagcgctttcagcggcctgca

SEQ ID NO: 2588 - DNA, 563 bp, Zea mays
  Peptide Sequence Number=SeqID_8900
  Probeset Number=SeqID_16991
gcggcggctgggtggccggagccggtggtgagggtgcagtcgctgtcggagagcggcgcggcgacgatcccggcgcggtacgtgaagccggaggctgagcggccggcgtcggcggcgggcgaggaggagggcggcggcgggatccccgtggtggacctgtcgtcgccggcgacggcgcgcgcggtgtcggaggcgtgccgcgactggggcttcttccaggccgtgaaccacggcgtgcccggtgagctgctgcggcgcgcgcgcggcgcgtggcgcggcttcttccggcagcccatggaggtgaagcagcggtacgccaactcgccggccacgtacgaggggtacggcagccggctgggcgtggaggctggcgccctcctcgactggggcgactactacttcctccacgtccgcccgccccacctctgcgacccgcgcaagtggccccacctgccccccggcctcaggtacattaactactacttggttatttattttttattattatactccatctgaggaggatcggatcatcggaggagttgatgtacttacgagcttac

SEQ ID NO: 2589 - DNA, 387 bp, Zea mays
  Peptide Sequence Number=SeqID_8901
  Probeset Number=SeqID_16992
atgagccgaagtgaaaccgtatggatcgtcgacgatgatcgctccatccgctgggtcctggaaaaagccctgcaacaggaaggcatgaccacccagagcttcgatagcgccgatggcgtgatgggccgcctggcacgtcagcaaccggacgtgatcatttccgacatccgcatgccgggcaccagcggcctcgacctgctggcacagatccgtgagcagcacccacgcctgccggtcatcatcatgaccgcccactccgacctggacagcgccgttgcgtcgtaccagggcggtgccttcgagtacctgcccaaaccattcgatgtggacgaggcggtctcgctggtcaagcgcgccaaccaacacgcccaggagcaacaagggctg

SEQ ID NO: 2590 - DNA, 276 bp, Zea mays
  Peptide Sequence Number=SeqID_8902
  Probeset Number=SeqID_16993
atgatgtactaccacctgagcacgcacgcccagatcaacgcgaacaaggacgccggcatggcactgcactgcacggatgcaaccgtggaccaccggtggctctgccacgataatgacaacacttcaacgtgtgaactcgctgccagtgtgctcggagctctcaactttgatcatgacgagactcgtgaggcgcacgagcctgtgcacgaccaggtcgtaacggaccatgggcagccactgccagagcatgacggtgccgaggtggacactcactga

SEQ ID NO: 2591 - DNA, 411 bp, Zea mays
  Probeset Number=SeqID_16994
cgggtctcggaggatcgcttcaactaccaggagaaggcgctgccgctgatgcagcccgatccgaccgctgggctgtactccgaaaccgccacatcgaaattgtccctgttgaaccgcaccatgaacgacgtgaagaacgcgatcctggtgggtcgccagccggtgtcggactggaaggcggccgttgacacatggcgctcgggaggcggcgacaccatccgcaaggagtacgaagaggcctttgccgaagccaaggcagctggcctgctgagcaccgcgacccttcatccctcgcgagcattcgcggcactcccactcctgcatccaccggacgacttccttgccacgctccgaccgagccacccattcctgatggttgacccggccggactggagcggatcgaacaacag

SEQ ID NO: 2592 - DNA, 317 bp, Zea mays
  Peptide Sequence Number=SeqID_8903
  Probeset Number=SeqID_16995
tcttcgacaccaacgactggagcatcattacccagcgcttccattgcgaacgcgcgctgtatatcgcccagcatctcggcattcaggcacagtgctacgccgagccgacgcccaagaatatgctgtcggtgcggttccgcgaggtgggtgcgcgcctcggtgcgctggcggatctctatctgatgaagcgcgagccgcgtttccttggcccgctggtgccgattccggcggtgcatgaagtgccggaagatgcgcagagctacccggcggtcacaccggaacagttgctcgagctggaagagaagctgcggaaataa

SEQ ID NO: 2593 - DNA, 710 bp, Zea mays
  Peptide Sequence Number=SeqID_8904
  Probeset Number=SeqID_16996
cggcgccgcacctgaccccgtcgttgctgggtgggctgttcttcccgcgtaccgggcacttcatcgacccgtaccgggtggtgtgcgaactgttcgaagcagccaaggccagtggcgtgcgctttgttcaggcgcaggtcgatggcggacgcctgcacggcggcggggtcagcctggccagcgaccagggctcgctcgatgcccgccaggtactgatcagttgtggcgcgcattctgcgcggttgaccgccgcgctgaccggcaagcaggtgccactggacaccgagcgcggctaccacctgatgttgcctggcgagcatcagcgtttgccgtttgcagtcacatcgctggagcgcaagttcatcatgacgcccatggccgagggcttgcgcctggccggcacggtggaattcgccgggctggacgcgccgccgagcatgcaacgggcgtggcagttgcacaggttgagcaaggggttgttccagcgggacttgagtgtggagggagcaacgccgtggatgggcttgcggccttcgttgccggattcgttgccggtgatcgaccgggtgtgtgatgggcgagtgctgttggcattcgggcatcagcacctggggttgacccaggcagcagtgacagcggaatgggtgggacggttggctgagatggccggtggaccggagatggcggcttaccggttggatcggttttag

SEQ ID NO: 2594 - DNA, 480 bp, Zea mays
  Peptide Sequence Number=SeqID_8905
  Probeset Number=SeqID_16997
gatgtaaagcctgttggcaattacagcatgtggttctttcgtcaatcatattgtagacacactaccgcgagatgctatattgaccggacaattgcattaaaaaaaaaaaaaaaaaaaaaaaaaaaaaaaaaaaaaaaaaaaaaaaaaaaaaaaaataactaatcattctcttaaacaaatggggagaaaaagcaagcgtagcatgtcaggtcgtcatacggttttacaaattttagtcctcgtcgctgtcatcaaacacgacagcctttctacgatgcgaaacagccggctgcttccttggcggagaatcgtcgtggtcctcgtcgtcctcctcagacaccagctcctctacgagcctgccgatccttccgaagccgttgattccgatcttaatcttgcccatggcgactggcgagtagaggagctaggaggacgacgggtggacgagactcgagaggcggaggcagcggatgcggatat

SEQ ID NO: 2595 - DNA, 361 bp, Zea mays
  Probeset Number=SeqID_16998
ttgcagtccgtgctggagaaggcgcaggaggcgctggcccagcagaacggcggcgctgacgagacgacgacgactacgcagcagcagcagcagttgctgctgccggatctcattttgagagccacggctactagggccggcaatgttcagcaggagcacctcccccagcaagcacccccttggaggcgacgggtcggtggacaactgcctggccgcgtgcgaggggtttcggggccaagagggaagaaggacccgggccctgtggcccatcggcctctcgtccgtccggcctcccactcccactcccagcagaggctacaacgacagaggaggcggcggcagcgccagctgcgaggagttc

SEQ ID NO: 2596 - DNA, 224 bp, Zea mays
  Peptide Sequence Number=SeqID_8906
  Probeset Number=SeqID_16999
atgggaaacgccctcgggtgcgcggggctcggcgagcggctggcggccggcgccagggacggcgacgcggcggaggtgcggcggctgctggacgccaacccggggctcgcccgctgcgccgccttcggcagcctgagctcgccgctccacctcgccgccgccaaaggccaccacgaggtacgcaaaaaaatctcgccaaacacagaagatgtcgtccaccaaac

SEQ ID NO: 2597 - DNA, 287 bp, Zea mays
  Peptide Sequence Number=SeqID_8907
  Probeset Number=SeqID_17000
ttttctcggaagcttctgaatttagcgcatcgagcagcctactttccagagtgcaccctattgatggatagcacaattgacatccttggtcaacagattgaagacagaattaccacatgcacaaatgacgatcaaagtgtttctcagagtgatcttgctccaccaaatgacacattgagtaatgtacaattgaagaaaaaagaggttcgcataaaaacttcaaagagaaaaaagcttggctgggaagaaaaacacaaggggaggaaaaatggacaaaacagaactca

SEQ ID NO: 2598 - DNA, 298 bp, Zea mays
  Peptide Sequence Number=SeqID_8908
  Probeset Number=SeqID_17001
gatcccctccctatcgtcgacgtcagcaagctgtggcccgcagacgaggcagacaagctccgctaggcggtacagacctggaggcttcatctggctaccaaccacggcataaacgcgtctctaatgaaggatctgatggaggcgtctcgggagttcttccaccagccgctccaggagaggcagaagtacagcaacctgagggaaggcacgcgcttccagctcgaagggtacggcagtgacccagtggtggcgcaggaccatatccttgactggaacgaccgtctgcaggggtaccgag

SEQ ID NO: 2599 - DNA, 232 bp, Zea mays
  Peptide Sequence Number=SeqID_8909
  Probeset Number=SeqID_17002
gccatggtctatacttttcaaagtacatggcactatgttatcagtatctgaagatgggtcctcacatctttgtgagatatcacgtgtgtgccattaacgcgggcgttgttggtgacctctctagagcactctagacaaacttttacccttctgtaatggcattttgacctaactcctgaaggacctgtccagtaagcaagagcacaattcggcagagggatctctagacacg

SEQ ID NO: 2600 - DNA, 811 bp, Zea mays
  misc_feature (331)..(331): n is a, c, g, or t
  Peptide Sequence Number=SeqID_8910
  Probeset Number=SeqID_17003
ctgcagcgaccttgttcttcgaagggatcgatcatcagagattcagagcgacgcaaaaaaaaaaaacagcgacatcgtagctttttctctcgtccggtcatcgagaagccccaccaggaggccgatggcagcgcacacgtttgcttgcgccgatcagggcggccgctcccactggaggggccgtgtcggactctggccagaggagccgacaacgtggaacagaggaggcacgacacatccacccgagaaggccgcgctagatccagccaggaagacggcaaatccgaccgtgaaggtcgcgacagcgttggatccggttgtgacggcgacnaagaggatgggagggcggctgggcggttcaggaaagcagggggctgcgccggatctagccaggcgaaggagcgacgtcgacgacaggtgaagcttgaaggggctgggcaaggggtggcggtcgtgcctgtacgtgtggctggcctacggcgacgcccgcacgctcgcaaggctagcccgcaacagcggcggcgtttgcacggcgcccgtgctctctgtcgcggctagggaaacgtgtgtgcatgaggcaccacgacaggggcaaggaggcaggggcgccagatctggggcagggaggcgagggacaatgacgagggcctcgagggccatggccgacgacgactctgccaccaacgatgggttaggggaggcagggctggagcgatgggttaggggaggcggagttggaggcagagggatgggggtcgccccaggagtgagggacaaacctcccaagaatgacggcgcagaagcaggatgt

SEQ ID NO: 2601 - DNA, 390 bp, Zea mays
  Probeset Number=SeqID_17004
atgtcactcaaagctatcgcctccgcccttggcctctctgtgaccaccgtgagccgcgcgctgaatgggtttgatgatgtcgccgctgctacccgcaaacgcatcgaagaggaagccgaccggcgcggttatcgcccgaatgccgccgcgcgccgcctgaagaccggccgtgccaatgcggtcgggctggtctttccggtcagcaatgcctcactcaacgacagctactacagtgaaatgctgctgacgctcgatcagcgccttgccctgcacgagatcgatctgctgttgctccccgacaaaccgcaggatcagcagcgcaatttgctgcgcatgctgcgcagcggcgtgctggacgcgctgattgtcacccataccacgccgcaggat

SEQ ID NO: 2602 - DNA, 264 bp, Zea mays
  Peptide Sequence Number=SeqID_8911
  Probeset Number=SeqID_17005
atgggcggtcccacccagggcccgtttgaggcggggcggcaagctggcagccagaggggaccccccgacacctggactgggatacgaccaaccaagcggggcccgacgggcggggggcgccatctagggacagtgccctccacggaacacagtcccctggttgagggggcacccaacggccaagcaccagcgggccgcggcatgccggtcgctccacaggcgggggttcccacgatgccagggccctaccaagcggccttgtaa

SEQ ID NO: 2603 - DNA, 208 bp, Zea mays
  Probeset Number=SeqID_17006
ctgcgagtcagggtggtgctctacaagcaactcaatttgctgcaccaagggcaatgcagccacagcctgctaacctgggaattactcaacctcaatggcccagaattactcaaccggacatccaaaagtacatgaaagtctttggggatgttgatagggacagagatggcaaaataactggtgcagaagctcgcactctgttcctcag

SEQ ID NO: 2604 - DNA, 288 bp, Zea mays
  Peptide Sequence Number=SeqID_8912
  Probeset Number=SeqID_17007
atgacctatcgtcgccctgtgctggccgctatttttgatatggatggcttactgatcgattctgaaccgctatgggatcgcgccgagctggaggtgtttgccagcctgaatgtggatattagccgccgccacgagctgccggatacgctcggcctgcgcatcgatcaaaccgtacgcatgtggtacgaagcgctgccgtggaacgggccggatcaggctgaagtcactcagcgcattattgcccgcgcgctggcgctggttgaagagacgcggccgctgttgcctggc

SEQ ID NO: 2605 - DNA, 226 bp, Zea mays
  Peptide Sequence Number=SeqID_8913
  Probeset Number=SeqID_17008
atgccgtatccgcatccgtatccgtggcaaagcagcagcagcaggaggaggaggaggcgcgggcgcgacggggccccgcggcagcctcaggctcgccgggtcgtggagagcgcagcagcaggccccggccacggcgacgacaacgcagcagcctgacaacgtctccagtgctaaagtcatatacacggctcgctagccacagcctaaggcctactgcaatacactg

SEQ ID NO: 2606 - DNA, 970 bp, Zea mays
  Peptide Sequence Number=SeqID_8914
  Probeset Number=SeqID_17009
gtcagcagtctcggacgctcagctcccgctcccactcccggacgacgacgatggccttggcgctgcaatggcccctccaactcccactccagctccaggcgcggcctcccgccgttaccgcgggtcatcaccggcgccgccaccgagtcctcgccgtctggcgctccccgccgctccgagctcgctgttgtgccagcgccgccgctgcggccgacacggggaaggcgcagacagcggcgaggagggcttacccattcgatgagatcgagccgaggtggcagcagcactgggaggagcaccgcacgttccgcaccctggacatcggcgaggggctcgacacctccaagcccaagtgctacatcctcgacatgttcccctaccccagtggggctgggttgcatgttgggcacccccttggatacacggcaactgacattctgtcaagattcaagcgcatgaaaggcttcaacgttttgcatccaatgggatgggatgcatttggtcttcctgctgagcagtatgctattcagacgggaacccaccctaagattaccactgaaagaaacattgagcgctttcgcacacagcttaaatcgttgggtttttcatatgattgggatcgtgaaatctccacgacagagccgggttattataaatggacacaatggattttcctgcaactgttaaagagaggacttgcttatcaggctgaggtacctgtcaattggtgccctgctcttggaactgtcctggcgaatgaagaagtagtagatggtgtgagcgaacgtggtggctatcctgttatacgaaagccaatgcgccagtggatgctaaggataacatcttatgctgatcgtcttcttgaagatttgaatgatcttgattggcccgagagtatcaaggaaatgcaaagaaactggatagggagatcaaaaggtgctgagcttattttttctgcaggcatgcaagc

SEQ ID NO: 2607 - DNA, 650 bp, Zea mays
  Peptide Sequence Number=SeqID_8915
  Probeset Number=SeqID_17010
atgacgatgcagcagcctcttttccaccgtctgtcgttgcgcgcatcgcgtgcgctcggtgcgctggccgccgcgttggtgctggccgcgggcgcgttcggcgcggcgcccgcgcacgcggagcgcctgaaggacctcgcgcagatccagggcgtgcgcgacaacccgctgatcggctatggcctcgtcgtcggcctcgacggcacgggcgaccagacgatgcagacgccgttcacgacgcagacgctcgcgaacatgctcgcgaacctcggcatctcgatcaacaacggttcggcgaacggcggcacgtcgtcgctgaacaacatgcagctgaagaacgtcgcggccgtgatggtgaccgccacgctgccgccgttcgcgcggccgggcgaggcgctcgacgtgaccgtgtcgtcgctcggcaatgcgaagagcctgcgcggcggcacgctgctgctcacgccgctgaagggcgcggacgggcaggtgtatgcgctcgcgcagggcaacatggccgtcggcggcgcgggcgcgagcgcgaacggcagccgcgtgcaggtgaaccagctcgcggccggccggatcgtcggcggcgcgatcgtcgagcgttcggtgccgaacgcgatcgcgcagatgaacggcgtgctgca

SEQ ID NO: 2608 - DNA, 496 bp, Zea mays
  Peptide Sequence Number=SeqID_8916
  Probeset Number=SeqID_17011
atggactacggcaacggctccacctgcgagccgtgcccgcggaacacgtggagtgacggcaacacgtcctgcagggcctgcccgcccggctcaacgcccaactacggcgtgcagatagtgcgctggatagagctgcccacctacatgagcgccgcctgcctagagcctgacgggtcgacgtgccagagcggcgcgggctggcaggtggcggggacgtacatacacacgacgcgccaccactcccccgccgcctacctgctgctctcgctcaccgtgtccggattccgctccaaggggggcgtgtccgccggccaccgcctcgaggtgggccgcgtcgagttctccttcgagctggactgcgccgcggagtgcgagttcgtcttcctgcagaccagcgactccaagggcatgacgttgatcgagagctggtcgcagcgccaggcccgccagacctacagctacgccgtcatgcagaacgacacctacacgttcaggg

SEQ ID NO: 2609 - DNA, 368 bp, Zea mays
  Peptide Sequence Number=SeqID_8917
  Probeset Number=SeqID_17012
atccaataagcaatttgccaattctcaagtgcgcacgttgcatcatgaatagagtacaccaaacctaaagtgaaggacgccagtgttacatagttctggagtacaccaaccaaaaacatcagaactaaccattagttgcatcgttggaatgtctctaaataattctagcagctaactattagctctaccacatttaaacagggcatcaacaagtgaatgatttacaaggtgaatgttttactgcactgcagtaaccgggtatcttaccttgaaaacatctggaaaggtagttttcccctggcacacacactgcgcaccgacttagaagaaaaggtcatacgtgaagaacaacatcaagaacgagaagc

SEQ ID NO: 2610 - DNA, 527 bp, Zea mays
  Probeset Number=SeqID_17013
tcagtccgtcgggatgagcgatgcgccgcccagcagttccccggtgtcggcgtcgaacaggatcagcgagcggacctcgggcggcaggacgtgcgggttggcgaggacgagggactgcgacgaggtgtcggccgggatgtcccccaccacgaccggtgagccgtcgtcggcccagaaaccccgcttcgcaccgatcacgggcttcgaggacagcaccacgcggagcgtgcgcggcggcgtgccgggggtcgcgacttcgaggtcgtcgaaggtgatcaccaggccgatgtcggggatgtcctcgatccggaccgtccccccggcgtaccggttgatcgggagcagcgtgccggagacgggcgggacccgctgccaccacggagcgatcggtgacccgtcggtgtccgactgcgacccggagtccggctcggggacgggcgcgccgagggtgttcgagggagtcgcgagtccaccgccgacgacgccctgcccggcgacggcagcggagttcgacgtcgccacgggtc

SEQ ID NO: 2611 - DNA, 404 bp, Zea mays
  Peptide Sequence Number=SeqID_8918
  Probeset Number=SeqID_17014
ctgtcagctatgctacatacatacattatcccacaaccacctccaagatgaacattttacacttgagtttggttgttaaaatcactaactccctcaagaaggctggtcgtcagttcgccaccgtcaagagagtagaagatgccaaggccaacacatctccggacgggacgggcacaagacaaccatcggagtcggaggcacccgcaccgcacgccgacccgcgcacactcccccgcggccgcgcccccgatctcgccgggccggtggccctcgccgccggcgacacccaccgcccaatcgcccacgcccggggggcgatggaggcggccttcgacgcctacttccgcgccgcagatctggaccgcgacggccggatcagcggccaggaggccgtcgccttctag

SEQ ID NO: 2612 - DNA, 584 bp, Zea mays
  Peptide Sequence Number=SeqID_8919
  Probeset Number=SeqID_17015
atgaaaaagaccaaggttgccgtaggtgtgattgtggcgctcggcgtaatctggactggcgcagcgtggtttaccggtaaacagctggaaagccacatggatgagatgctgcaaaatgccaacagccagatcaacgcgtacgcgccgaatagccgtctgacgctcagctatcaggattaccagcgtggcgtattcagcagcaaaaccaaactggtgattcaggccagttcgcagaccgaagacaatccgctgctgaagccgggtcaaagcatcgtgctcaacgaaaccatcgaccacggtcctttcccgtttgctcagctgaagcgcggcaacctgatccccagcatggcctcggtgcacaccgaactggaaaacaccgatgcggtgaagaaactgtttgaactgactcagggcaaatcgctggttaatgccgatacccgcgtcgggtacagcggcgcgaccgataccgcgctgcacctgctgccggtggattacagcaatgcgcagaccggtgatcgcctcgccactaacggcggcacgctcaacgtcagcgcggacagcaaaggcgacaaagtgagtctgca

SEQ ID NO: 2613 - DNA, 1317 bp, Zea mays
  Peptide Sequence Number=SeqID_8920
  Probeset Number=SeqID_17016
atcctctggagtcctcttgaataaacctgcagcagctgttcagcggttacggttatgagccgctgtttgtctgcgggcacgagccggccgacatgcaccagcagatggcggcagcgctggataacgcgtttgataagattgccgcttatcagcagcaggcgcgcagcgggcagacagagcaggcgatcccgcgctggccgatgattgtactgcgcagcccgaagggctggaccggcccgaaagaggtggacggtaaaaaggtggaagatttctggcgtgcgcatcaggtgccggtggcggcatgtcgcgaagacgcgtcgcatcggcaggtgttagagcagtggctgcgcagctatcagccggaagatctgtttgacgaggcgggtaaactcaggccggaactgcgtgcgctggcgccgcagggggataaacgcatgagcgcctcaccctatgccaacggcggacgggtgcgccgcacgctcaacacgccggacatccgcgagtttgcgctcgacaccggcgcgccgggcagccagcgcggcgaagccactaagcagttcggccactacctcagcgcgatttttcagcgcaacgccgataacttccgtctgttcgggccagatgagaccgcctcgaatcgcctgacgccggtcttttacgtcaccagccgcagctggatggcagacatcgaaccgtatgatgagcagctggcgcgtgacggtcgggtgatggaaattctcagcgagcatcaatgtcagggctggctggagggctatctcctcaccggacgacacgggctgttcaactgctatgaagcctttattcatatcatcgattcgatgttcaatcagcacgccaaatggctgaaggtgacgcgcaaactgggctggcgccagccgatttcgtcgctcaactatctgttgtcttcacacgtctggcgccaggatcacaacggatacagccatcaggatcccggttttatcgatcacgtggcgaataaaaaggcggatatcgtgcgcatctatctgccaccggacgcgaataccctgctgtgggtgggcgatcactgtctgcgcacctgggatcgcatcaacgtgattgtcgccggcaagcagccgtcaccgcagtggctggacatcgacagcgccattgcccactgcgaggcgggtatgggcgaatggcgttgggcgagcgatgacggcgagccggatgtggtgatggcctgcgccggcgatgtgcccaccatgaaaacgctggcggcggtggatctgctgcgaaactacctgcccacgctgcgcattcgcgtggtcaaaatgg

SEQ ID NO: 2614 - DNA, 460 bp, Zea mays
  Peptide Sequence Number=SeqID_8921
  Probeset Number=SeqID_17017
atggtgacgaccggcgagcaggtcagcgcccgcgcctttcctcgagcgggttgccgtcgatcggcgagtccgacctgtacgaccagatctgcgaccgactcggcgcgagcgacgacggcgaacgagccggagcgatcgagctggcgctcgaggggctctacctggcacgacgcatcagcaaggagtccggcgggggcgaagccgtctatggctaggcagaaccgacggctcagccgcgatgcccgctacggcaggtacgaggacggtccggacccgctcgctcccccggtcgacctcgccgaggcgctcgacgccatcggcgaggacgtgatgggcgggacctcgcccgagcgcgccatccgcgagttcctgcgtcgtggcggacgcgatcaggcgcggtctcgacgacctggcgcgccgcgtcgccgaacggcggcgggagctgacgagccggaacacc

SEQ ID NO: 2615 - DNA, 225 bp, Zea mays
  Peptide Sequence Number=SeqID_8922
  Probeset Number=SeqID_17018
tgtacaactatgattacaaacgggtaatacaagctaggagttgagaccacaatccttatgaaaagttacactcttccagatagaagagttattaaagtagacactaaacgattccaacctcctgaatctctttttactcctgaagctaatcctctggaaagtacggtagtagcgtccaaatgtgcaaatgttgtggcaggagcagggtcggtcaaatcgtctgca

SEQ ID NO: 2616 - DNA, 218 bp, Zea mays
  Peptide Sequence Number=SeqID_8923
  Probeset Number=SeqID_17019
gaaaacgatagatctttccctgatatcaccggtttcgtgcgtgcattgcagtacaaggaggtcgtgggatcaggggccttcaagacagtgtacctcccttccgctacaaaggtttcgacgtggtcgaaggcatcgaggtggcatgggctaaagtggagataaccggccggaccatgggatcccccaaggagctccagcggctcaagacggagatccag

SEQ ID NO: 2617 - DNA, 584 bp, Zea mays
  Peptide Sequence Number=SeqID_8924
  Probeset Number=SeqID_17020
atgtcggcaacgctggataatcagcagctacgcacgctgctgcccgacgcgccgtttattgcgtcacaggggcgcagctttccggtgattcgacgttacgcctcgctcaatccgcagcagcggtttgaagaggcagtggcgcgcgaggtggcacagttgctgcgggatgagcccggttcgctgctgctgtttctgcccggcgtggcggagattgaacgggtgaagcgtgaactggcgtcgcgcgtcagtgatgaggtggatttatctcctttatatggtgcgctgtcgctggaggcacagcggcgggccatcctgccggccgcgccgggccggcgtaaagtggtgctcgccaccaatatcgccgagaccagcctgacgattgaaggcatccgtctggtgatggacagcgcgctggagcgcgcggcgcagtttgacgtgcgcagcggcgtgacgcgtttgctgacccagcgcatcagccaggcatcgatgacgcagcgcgctggccgcgccggtcgcctggcgccggggatctgtctgcatctgctgccgcaggagcaggcgctgcgtgcggcggcacagagtga

SEQ ID NO: 2618 - DNA, 1029 bp, Zea mays
  Peptide Sequence Number=SeqID_8925
  Probeset Number=SeqID_17021
cttgcatgcctgcagctcgggggcgacggggaccagccggagcccggggcgacgatcaccctcggccccgacgccgggcgcgaccgggtgaacgacgcgcaggcgttcgtccgcggtggcgtgtggcagcggaccctgcccggcgagggcgaggtgctgctgagctgcctggtgtcgccgggcttctcgttcgaggacttcaccatggcggatacactgcgtccagcccccgacccctcgcacgaaggcccgaccgtgacccgttccctccgcctcaccatcgccgtcgccaccgctgcggtcgccgccctcgcgctgtcggcctgctcggccggcggcagcaacgccgccggcaccgtgaccgacggcaagctcacgatcgcgaccggccagccggcgtactcgccctgggtcgaggacaacaagccgcagtccggcaagggcttcgaggccgccgtggcgtacgccgtcgcgaaggagatgggctacgcgaagtccgacgtggtctggaagcggagcaccttcgacagcgcgatcgccccggggccgaaggactgggacctcaacatccagcagttctcgatcgacgccaagcgcaagaaggccgtcgacatgtccacgccctactacacgaccacacaggcggtcgtcacgacgacgtcctcgaaggccgtcgaccgcaccacgatcgccgagctcaagcaggacgcgatcggcgtcgccaccggctcgacctcgatcgacagcgtgaagcgcgtcctcggggtcaccccgcaggtcttcaactcgaacgacgacgccgtgctcgcgctcaagtccgggcagatcgacgccatcgtgaccgacctgccgacagccttctacatggcgtccgcgcagctcgacgacggcaccgtgtccgcgcagttcccggccgacggcaagggtgaccagttcgggttcgggctgccgaaggactcggagctgacgagcaaggtcgacaaggccctcgcggcactcgacgacgacggcaccctggagtccctgcag

SEQ ID NO: 2619 - DNA, 507 bp, Zea mays
  Peptide Sequence Number=SeqID_8926
  Probeset Number=SeqID_17022
atggccgtggtcggtttgctcgaatccatgatgacggcgagcgtcgtcgacgaatggaccgtgaccacgagttccaaatcccgcgaatgttcaggtctcggcctcgcgaacctcgccgccggtcttttcggtggcatcgcaggctgcggcatgatcggccagacggtgggcaatctgcgctatggcgggcgcgggcggctctccaccctcacctccggcctcttcctgcttttgctcatcgtggcgctgcacccctgggtcgcccgcattccggtcgcggccctggtcgccatcatgatcatggtctcgatcagcaccttctcctggtcctccgtccgggacctcacccgccatcccaaggtgtcgagcgccgtcatgctggcgaccgtcgcggtgacggtcgcgacggccgatctcgcggctggtgtcgcagtcggcgtgctgctgtccggcgtcttcttcgccttcaaggtgatgcgcctgatggcggtgtcgatcgactacgat

SEQ ID NO: 2620 - DNA, 334 bp, Zea mays
  Peptide Sequence Number=SeqID_8927
  Probeset Number=SeqID_17023
ggaagaaaagacatgtcggacaaactgactatcgctatcgtgggcggcggcccggcaggcctcacggcggccgtgattcttcagcgccacggttttaacgtaacggtgtttgaggatgagccggcggatgctgcacggagtcagggcggctcgcttgatttgcatgctgacagcggccaggcggcgctgcgcagagcgggcctgctcgaacagttcatcaacatcgccaggcacgaggatcaggaaagccggatgctgaattaccttaccggagacattgaggtcgacagattcacaccggaaggtgaaatggataaaccggaaatcgatcgcg

SEQ ID NO: 2621 - DNA, 263 bp, Zea mays
  Peptide Sequence Number=SeqID_8928
  Probeset Number=SeqID_17024
ccctgcgcccactccccccgcgcgctttgagctccaagaggtatccttccttctggaaggacaacaatgtgcaggttgcgatccgtatccggccgctgagcggcagtgaggtgtcgatgcaggggcagaagcggtgcgtcaggcaggatagtagccagagccttacctggatcggacaccccgagtccaggttcactttcgatcttgtcgctgacgaacatgtcacgcaggagggcatgttcaatgttgccggggtgcccatg

SEQ ID NO: 2622 - DNA, 1103 bp, Zea mays
  Peptide Sequence Number=SeqID_8929
  Probeset Number=SeqID_17025
ttagatcatcttcgcgccggcgagcaggtcggcagccgcgtcgaacgacgtgttgcgcagcaactggtggttgtgcgcgagcgcgacgcggatctcgtcgtagacgaccgatgccgcgctcgcgtcttcgccggggtgcgcgtcggacggcgcgagaaagcgctggccgacggccgctgcctgcgcgacgagcaccttcagttcgcgcacgtcgcggcagccgacggccttcgcgaaacgcgtgaccgtcgcgacgctcacttccgcgtcgcgggccagcgcgccgatgctcgcatgcgcggcgcgcgcgagatcggcgaggatgaacgcggcgaccttgcgttccgcttcgcgcagctcgggcgcgcattcggcgatccgcgcgacgatgtcgaggaccggctgggcgggcggcgcggcgtgcggatcggcggcggacggagcggacggaatcacgggcgtattcatctgcggaaaaggggtctcggcaacctgccgagcgcgagcgtgccgctcgacgacgcagcccgcctcgagtggaacctgctcgcggaagacgtgagcctgccggccgccgtgctgtacgcggaccgcatcgaacacaatctgaactggatgcaggcattcgtccagcagtatggcgcgcagttcgcgccgcacggcaagacgacgatggcgccgcaactgttccgccgccagctcgccgcgggcgcgtggggcatcacgctcgcgaccgcgcaccagacgcaggccgcgtatcacggcggcgtgcggcgcgtgctgctcgcgaaccagctggtcggccgccagaacatgacgatcatcgccgggctgctgtccgatcccgacttcgaattcttctgcctcgtcgattcggcggacagcgtcgaccagctcggccgcttcttcggcgacgcgaagaagacgctgaacgtgctgatcgaactgggcgtgccgggcggccgtgcgggcgtgcgcgatgcagtgcagcgccaggccgtgctcgatgccatcgcgcgctatccggacacgctgaagatggccggcatagaactctacgaaggcgtgctgaagtaggaaggcgagatccgcgcgttcctgca

SEQ ID NO: 2623 - DNA, 426 bp, Zea mays
  Peptide Sequence Number=SeqID_8930
  Probeset Number=SeqID_17026
gcccgagaatcgttgagttctatgccaaaattattccccgcgctgctgcttggtctcagcgtcctgagtgcctctgcgctcgccgcgcccgcggactctatccgccacagcggctttgtctattgcgtaaacggcacggttaacaccttcaacccgcagatggtcagcagcgggctggtggtcgatacgctggcggcacagttgtatgaccgcctgctcgacgtcgacccttatacctatcgcctgatccccgatctggcgcagagctgggaagtgcgcgataacggcgcgacttaccgctttcatttacgcaaagatgtttcgttccagcacaccaactggtttacgccgacgcgcaaaatgaacgccgacgatgtggtcttcagctttgcccgcatgttcatgaaaagagacatccgtggcata

SEQ ID NO: 2624 - DNA, 288 bp, Zea mays
  Peptide Sequence Number=SeqID_8931
  Probeset Number=SeqID_17027
gacctgcagcactcaccacgcgcagagtcacaggtctgcccccccacccccaccctctctggctctctgcccccagtgcagcgcagccgggcgtggccccagaaacttgaaatgcaggtccggttgatgttggatgagcccgagtctggagttacagtcataaaactcaaacaaactggtgtgccagaggaagacaagtatgggaattcaactgtggttgagaacacggagagaggctggagagatctcatattccagcggatacgtgggatgtttggttttgggatc

SEQ ID NO: 2625 - DNA, 672 bp, Zea mays
  misc_feature (601)..(672): n is a, c, g, or t
  Peptide Sequence Number=SeqID_8932
  Probeset Number=SeqID_17028
cccctggatgtccgctgcgaaacaaagacaaaggttttctccgtcgcatcccgttttgatgacaatgtctttgtcactgttgttgcatctgtccaatatcgcgctcttgctgataaggcaactgacgccttctacaagctgagcaacaccagggaacaaatccagtcatacgtatttgatgctctagccgctactctgctcttcccccagcgtggctgttttgcacttttgcggtcgtcagtgcgggagtggacaaagctaaagacttgggggctggttcagacggggatcgacatgtgtctagggttaaggtttgagagcagtcacggacgggcggtggggggagctatgtctgaaccgaatagggccatgagaaggcggaggatctcctctgcaaacacgcacgacggtgggatgggcaggaacttacctcacgcggcggcggacggtgagaaagcatcgcggcgcgcgcgcagcaagggaggagctcggcggcaccttggttcgggcgagacatgggcggggcatcacaaaagcagggatggtgggtattaggaggcgggcgtagtgggtggggcatggaggtaggagagcgggacannnnnnnnnnnnnnnnnnnnnnnnnnnnnnnnnnnnnnnnnnnnnnnnnnnnnnnnnnnnnnnnnnnnnnnn

SEQ ID NO: 2626 - DNA, 753 bp, Zea mays
  Peptide Sequence Number=SeqID_8933
  Probeset Number=SeqID_17029
tgcagacgctgcttgctagcaacaaccggatctgtggcgccgtgcctgcggagctcggggagctccggcggctcgtgaagctggacctcagcggcaacgagctgtcggggcctatccctggggcggtggggcagtgctgcgagctgacgtatctcgatctcagcaggaacaacctgtctggggtgatccccgaggcgatcgcgagcatccgggtgctgaactacctgaacctgtcgcggaacgcgctggaggacgcggtcccggcggcgatcggggccatgagcagccttacggcggcggacttgtcgtacaacgacctgtcggggcagctcccggacacggggcagctggggtacctgaacgcgacggcgttcgcgggcaacccgaggctgtgcggcgcggtggtgggccgtccgtgcaactacaccggcgggggcctgggcgtgacggcccggcgcggtgttggggccggggagctgaagctggtgctggcgctggggctcctcgcctgctccgtggggttcgcggcggcggccgtgctccgcgcgcggtcgttccgccgcgtggacgggagcggcggcggcggcggcaggtggcggttcgcggcgttccacaaggtggacttcggcgtggcggaggtgatcgagtgcatgaaggacggcaacgtggtggggcgcggcggcgccggggtggtgtacgcggggcgcacccggtcgggcggcgcgatcgcggtgaagcggctgcaggtcgact

SEQ ID NO: 2627 - DNA, 524 bp, Zea mays
  Peptide Sequence Number=SeqID_8934
  Probeset Number=SeqID_17030
gccagcacgacttctacaccgcgaagggcggcaaggacgtcgccgcgccgggcaacccgaacggccgcgtgcgcgcgatgctgtcgccgaagaacggcggccccgggccgctgaacggcgcgccggcgaagctgtcgccgtcgaccacgatccagggagcgccaggccaatgaacgcgctcccgaaccgccagccggccggcacgacgagctcgctcgtcgtccgcaacctgaagaagcgctacggctcgcgcacggtcgtcaaggacgtgtcgctcgacgtgaagagcggcgaagtcgtcggcctgctcggcccgaacggcgccggcaagacgacgtcgttctacatgatcgtcggcctcgtgccgctcgatgcgggcgagatctcgctgaacggcagctcgatcagcctgctgccgatccacaagcgcgcgtcgctcggcctgtcgtacctgccgcaggaagcgtcggtgttccgcaagctgaccgtcgaggaaaacatccgcgcggtgctcgagctgcagg

SEQ ID NO: 2628 - DNA, 400 bp, Zea mays
  Peptide Sequence Number=SeqID_8935
  Probeset Number=SeqID_17031
ccagaataacccaatacagggggaagaaatggcaaacaaatataaagggggcaccaaaatcggggcctttttttgagggggagagggaagagaacgtcaattggattcaactgctggcgctgtcctagcctatctttcgcctcgaactggcgatggtgggccggctgtttgcgcaggacccgcagctgtacgccgacatcatcatgtcgtcggaaagtaatctcgcgctaattaagcgctactatcagcgttttggtgaagccatcacgctgtcaagcagggcgataaacaggcgttcacaaccgcctttgagcgtgtggaacagtccatttacgaatacttcatacgcttccttgtcgagatcctcagcgggttccgctccgcctacgacagtcgccag

SEQ ID NO: 2629 - DNA, 241 bp, Zea mays
  Peptide Sequence Number=SeqID_8936
  Probeset Number=SeqID_17032
tgcatgcctgcagtacctcgtcttcacccaacccgacatcacctatgtcgtctagaaggcgtgccttcatatgcacgccccgtgggagccacatctcatcgctatgaagtggatcctgtggtacctccggggcactatcgacttcgtcgtcaggtaatttatggggacactgattctgtgatggtacagtttggtgtttctacagttgaagatgcaatgaagttaggaagagaagctgcag

SEQ ID NO: 2630 - DNA, 317 bp, Zea mays
  Peptide Sequence Number=SeqID_8937
  Probeset Number=SeqID_17033
tgcagggacaactttactaccttgtatctcatcatgcagtacttatggttgtccctttggtgagggctgccattttgtccattacttccctggtgactaccgggccgtttcagaaatgaccaacctgggtggcgcaacaatcgcacctcctggaggaatgatgatggatgggccacctacacccatcgtgaagactcgcttgtgcaacaagtacaacactgcagtgagcttgaacatctcgcagcgattgcacaaaaatagttaagaacaagaactagccaaaccctgcacaaatgctgcttctctgcaggcatgca

SEQ ID NO: 2631 - DNA, 602 bp, Zea mays
  Peptide Sequence Number=SeqID_8938
  Probeset Number=SeqID_17034
atgcggcataaaaaagtaaaaatttacgccggcgccatcgcgctcagcgccagcgcgttgtttaccagcctgacgcagtcggcggaaaccgccatctgttacaactgcccgcccgagtggcccgactggggcactcagctcaaagcgattgccagagacaccggcattcaggtgccgcaggacaacaatcactccggccaggcgctggcgcagctggtggcgcagcagggcaatccggtggcccatgtggtctattacggcgtcagcttcggcattcaggcgcacagcgccggcgtggtcgccagttaccaaccggcgcactgggatgacattcctgccggcatgaaagccagcatcggcaaatgggtggcgctgcactcgggcaccatgggctttatggtcaatgtcgatgcgctgggcggcgcgccggtgccgcaatcctgggacgacctgctgaagccggaatacaaaggcatgattggctatctccacccggccagagcctttgtcggttacgtgacgccggtggcggtcaaccagaaaaagggcggcaacatgcaggacttcacgccggcgctgacctggttcaacaagctgcaggt

SEQ ID NO: 2632 - DNA, 251 bp, Zea mays
  Peptide Sequence Number=SeqID_8939
  Probeset Number=SeqID_17035
ccaggagagacggacacgcccacacggcgacctgctgcgcctgggctgtgctgcgcggcgcggcgtgcgctccggcgccgtctaacgacgcggttacgttacattacattacattaataggacgcgccggctggctcgccttgtcgccgtccggccaggtcgaccggcgggcgggcgctcgctcgcccataggcaggcaggcacacggtaggtgggtggtacagtggtcgcgttccttgcgcgctagctga

SEQ ID NO: 2633 - DNA, 361 bp, Zea mays
  Probeset Number=SeqID_17036
tgcagcggtaaagtggcgccgcacggcatcgtgctgcactcggtttcggtcggtgaaacgctcgccgccgtgccgctggtgcgcgcgttgcgtcatcgctatccgacgctgcccattaccgtgaccaccatgacgcccaccggctccgagcgtgctcagtcggcgtttggcaaagacgtgcaccacgtctatctgccgtacgatttgcccggctcaattaaccgtttcctcgataccgtcgacccgcggctggtgattatcatggaaaccgagctgtggccgaacattattcgcattctgcatcagcgccagattccgctggtgattgccaatgcgcgcctgtctgaacgctccgccagag

SEQ ID NO: 2634 - DNA, 218 bp, Zea mays
  Peptide Sequence Number=SeqID_8940
  Probeset Number=SeqID_17037
atgacggttgttacggtgattcggttcgtaacgaacccgggaaagaaccttctggcgaggcggccccacggatcagtgaagcagagtcacggtgcaagcgagttcaagcagatgacgaagggtttcgtcgagcttgtgcacgagatcgaggctgaaccggtggaagacgcatccgacagcggagtccatcggtcggcgctgctgggccgcacgagggg

SEQ ID NO: 2635 - DNA, 428 bp, Zea mays
  Probeset Number=SeqID_17038
aaaactcttagggccgcctgttcggttccagtggattgagaacccggaatgattcctagctggattggccagaccaaggtgaagcggtactggccgagaaagccgcctgagtgagccgacgaagccgatgaggacatcgatcttaggacggcgcaggtctccctcgacaaggcgttccccaaggacgaagacggtgacgtccccgcgaaggatgaccgccggctccgtcgcctcgcggaaactcgtgcgaagaataaggaagagctgagggcagatcaccgccgcatacggcaggcagagattgtgtcgaccgcggaggaggagaacgagaggcaggaagctgatgccgacgaggaggacgaggaggcccaggaggagaggaggaggagagtaagggagaggcagatccgcaggtccactatagagga

SEQ ID NO: 2636 - DNA, 381 bp, Zea mays
  Peptide Sequence Number=SeqID_8941
  Probeset Number=SeqID_17039
gaggctggcgtcaccatggctatctcttacagcacgctttgggacaatccatcggctggaacgagggacgtaattagctatgatcgtattaccatgcgaaataccgacgacaaacccaatctggcgaactccgacatcccatgattccgtgcataccgcatgctgtacctgcacccgctgtgcgacttacctgcaatctacataaacaaccatttcccggtcaactacggatgagacaccgtccgtctgtcagcggacccggacactttgcacagaatccacgagctgaaggcgatgcactgccggtgggccatactcggcgcgctcgagtgcttgttcactgagctgatctgccacaccggcgtgatgatcgaccaagcg

SEQ ID NO: 2637 - DNA, 518 bp, Zea mays
  Peptide Sequence Number=SeqID_8942
  Probeset Number=SeqID_17040
ccggcctcacgctgagctacagcgacgttaatcccgtgacgctggaagaggatgaaatcagcaccagcccggcacagcgcatcgattatccgttactcaatcgcgggctggctggcttacaggatcgcgccgcacgcgtggtggtggaaggtacgggcggctggcgcagcctgatgaacgacttacggccgctgtcgcagtgggtacagcaggcgcaactgccggtggtgctggtggtgggcattaaagagggttgcattagccacgctttactgaccgccgaagcgattgccgccgatggcctgacgctggcgggctgggtcgccaatcgtatcaatcccgggctggcgcactatgctgaaatcattgatgttctgcgcgataagctgaacgcgccgctgttgggtgaactgccttatttgccgcgcgccgaacagcgtgatttgagtggttatctggatattacgttactcgggggtgatgcgttgcacagcgagagtgcaaagcccgccgcctga

SEQ ID NO: 2638 - DNA, 1512 bp, Zea mays
  Peptide Sequence Number=SeqID_8943
  Probeset Number=SeqID_17041
cgggaccctagggtagtgacagtgtccatgtggcatgccgagtctggctggttaagtgcatgacagcacatttcaggtgccatgacaggcggtcgagcactgtaattgatcactggtgctgacctatctgttctgtctacacacaacgtgctagtgctcttcttacacagtcgtcaatgcttcatatgcttggagacattggcgatgaatatagactgagccagagccttcagttcctgcagaggtagagcccgagctaccttgtactgtcatcttgagatgccgggagagatcacttgagccagatcagaaatatatttgatgagccattacactatagaattggaaacaaaacacctgctggcgaaaatccgtggaatatcatgatatagatttaccgtgcttcgcttccgatattagcctgccattgatccgttgcgcatcacactcacagcctaatatctgcagttatagagatacgaaaccgatgacattctatatgaaggccatcaaatcgtatctgagcttgttggcacatgggccgtgacatttgcagtcaacttaggaaccagagtgcaggacgctgagaagcttgtgcagtctgcaaagcatctatcagaaaaacatttctttgcaaatagcctgaaacccgtgaaggagaatcgtgtgcatggcccattagagaatatctctgtgcatctgagtccaagagaggccttctttacagagaagaggagagtgaaaatcgagggacagccttggtgaaatctgtggtgagctaatatgcccgtatccacctggtatcccagttctgattccaggcgaggtagtaacccatgattcactgtcctacttgatgagcgttagacaccaaggcatcacgatcagtggagcggctgatgctgagctaaattccattctggtgtgcgacttatgatgattgccctattgtttctcacaagactgtgttgtcgcagagataccgtgggtgggagagatcaagtatggtttatgccaagtcaagagctcgttctattgtccggttgatggatgtaaaccaatggcctggcggttcgtagccgccggccacttggccaaataatggtagtctgtgctgtgtctcgtctcgtgagccgacaagagttgccaagctgccccatatgatgcccgagcatgcatagagggtctagagcatgtggtctcctgtgtcggtgtttgaagtaggcgttgctagggaggcccggctccctttcgatctgaagtggcggccaatgtcatggtatcctgcttcttttctgcagttatgttgaagaaaaacggctttaattagccggtaagtagctgttgctgccggttgtcttcttttcctttctcaggtttcctctttgcttctcttctgagctggcagctccggtctgagctggcagtaaacctgaagcatcccatgcaggtctgcgcgcctccgcggttgtgctgcctccggcggcatgtttcgcagggcttctccaccaa

SEQ ID NO: 2639 - DNA, 202 bp, Zea mays
  Peptide Sequence Number=SeqID_8944
  Probeset Number=SeqID_17042
tgcactgggtctcgtggctgaccaggtggacgtgtcgctgctgccggaaagcgtgtagggcgtgcgggtgaagggtgtcgtgtaccggcggctgccggagcccacggcgacgtcgccgatcatcatgagccgccggctgcacggcgaaagcgcggcgacgacggcgttctgtgcgattgcgcgggaaatgatcgtgccgact

SEQ ID NO: 2640 - DNA, 211 bp, Zea mays
  Peptide Sequence Number=SeqID_8945
  Probeset Number=SeqID_17043
atcgatcaaggccacttcttcaaaaattgttccacaacacaaatatttaccaatctatacatccatacatcattcaggtctgtggataagactcatatgaatgaacagtcgtacagaggtcattttgtatttacattaaagatatccgaatctaatgagaaaacaggccaacctggcaaaagagtcattaacttgattgattttgctgcag

SEQ ID NO: 2641 - DNA, 452 bp, Zea mays
  Peptide Sequence Number=SeqID_8946
  Probeset Number=SeqID_17044
tgcagccggccacgctgaaacgcatgccgtggtcggaaacgctggtgatggtgctgtccgtcgccgtcacggtgtggaccggtaaccttgcgcttggcgtgctggtgggcgtgatgctggccatgatgctgtttgcgcgccgcatcgctcacgtgatccatgccgagcgccagctgagtgacgatggcgagcatgtgcactacacggtacgtggcccgctgtttttcgccagcagcaacgatctgtttgagcattttgactacggccacgatccgcagcgcgtgaccatcgatttgacccacgcgcagatttgggatgcctccagcgtggcggcgctcgacgccattgagtaccgctaccagcggcacggcgccagcgtcaccttcaccggcctggataaccgcagcagcgatttccgcgatcgcctgagcggcaatctcggctagatgtgc

SEQ ID NO: 2642 - DNA, 684 bp, Zea mays
  Peptide Sequence Number=SeqID_8947
  Probeset Number=SeqID_17045
tgcagggcgagccgggtaaagaggtgtatcgccaggacggggacggcaacattattgcgatgatcgattacgagccgccgaagcagccgccgacggtgcagctcagtatcgacaaatttgaccagtttacgctgtacagcaagctgcgcgacggcgtgctgctcaacaaggcagactcgggcgcggcggtgctggtgaagatcgacaccggcgagatcctcgctatggcgtcttatccatcgttcaaccccaacaattatgacaacgccacgccggcgcaaatgcgcaataccgccatcaacgacagctacgagcccggttcgacggtgaagccgctggtggtgatggaagggctgcagcgtcatctggtgcgccccgattcggtgatcgacaccacgccctacagcgtcaacggccacctgatccgtgatgtcggccactggccgcggctgaccatgaccggcattttgcagaaatccagcgacatcggcgtgtcgcacatcgcgctggcgatgccggcggaagcgctggtgaacacctatcaggcgtttggactcggcaagccgaccgggctggggctgaccggtgagagcgtgggctacttcccgctgcatcgccagcgctgggcggacattgagcgcgccacctttcgttcggctatggtctgcgcgtaacgccgctgca

SEQ ID NO: 2643 - DNA, 672 bp, Zea mays
  Peptide Sequence Number=SeqID_8948
  Probeset Number=SeqID_17046
gcttgcatgcctccagctggagtggcatctgtcgaagcgcgagatcctcacgctgtatctcaaccgcgccccgtttggtggcacggttgagggcgtcggcgctgccagctggatgtggctgggcaaaccggcgtcgcagcttacccgcggcgaggcggcgctgctggcggtgctgccgcaggcacccagccgtttgcgcccggaccgctggccgcagcgcgctgaagctgcccgcaataaagtgctggatcgcctggcgcagtatcaggtgtggccggcgcataccgtcgccgaaatcaaacaggagccggtatggctgccgccgcgccagctgccgcagctggcaccgctgctggcgcgccggctgctgtcgctgtcgcccgacagcaaaattacctccacgctggatgtgtcgctgcaacgcgaactggagaacctcgctgcgtcgctgcaaacccggctgccgccgcgcacctcgctggcactgctggttgtcgaccacagcagcatgaaggtgcgcggctacgtcggctcggtgtctttcaatgacgacagccgctttggccatgtggatatgattgccagcgtgcgttcgccgggatcgctgctcaagccgtttgtctacggcatggcgctggatgatggcctgattcatggcgaatcgctgctgca

SEQ ID NO: 2644 - DNA, 450 bp, Zea mays
  Peptide Sequence Number=SeqID_8949
  Probeset Number=SeqID_17047
atgaccgacagtttgctgtcgtacgttggcgtggaggacaagaccagcggcaaacgctgggggcgtgtcaccaaaaacggcggcaacgccatgctgagcttcgataacggcgacgcgggtttctacgtcggcggcggcgcttacagctatctgggcgagaacgtggcgagcaacaacagcgtgcaggccacggcgggcgcttacgtgcggccttaccactccgacgaccgcgagctgaaggtcggcatgagcctgtcgtggatggatttctccaaaaacctgagttacttcagctacggtcagggcggctatttcagtccgcagaattatgccgcggtatcgttccctgtcgacttcagccgcaagtttgatgacctgaaagtcaacgttggcggttcggtcggctatcagtcatacagccaggacaagagcgcgtatttccccaacgat

SEQ ID NO: 2645 - DNA, 564 bp, Zea mays
  Peptide Sequence Number=SeqID_8950
  Probeset Number=SeqID_17048
attcggctcgaggaacgaacaccagattaccttggacgatagcacgggagatgatcatgtgagggcatagggctctaacttgggcataattactaagcccaggggggggcgtgcccaaacggggctgagcactggctaggaacttgttgctatctcaactggtgaggaaccatatcaggctttaactgaactgaatggcacaatgatggtctggaaagccatcggatgttgcatatgcacagctcaaataagatagaggagcgaggctgcaagcacagttttatcagaggcgccctgctgtaccaatgacacctactctagccccacgccttgcaatgtactctccgatggctcctaagcaactattctatggacaagcgccaccagctatgaggccactgcagccaggatttgctgttcagcaacagcttgctccaggcatgaggcctgggggtcctcatatgccaactggttatgttccggttgaccaacagggccaacagggtccacgcccacctattacgcgtcgagcttgagcccagggacagcaacctgcgccatcat

SEQ ID NO: 2646 - DNA, 391 bp, Zea mays
  Peptide Sequence Number=SeqID_8951
  Probeset Number=SeqID_17049
tgcaggtgttcgccagcgtggtggaaaaccagggctattcgcgtgcgcagcaggcgctgaacatgaccacgccggccatcagcgcctacatgagtgaactggaaggccagctgggctttattctgtgccagcgcgggcgcgcagggtttgcgctgaccagcaaaggcgaacagttctacgcctatacccgggaaatgctggcgaccctgagcggctggcagtcgcaggtggagacactgaaaagcgcgcagggcggcacgtttgcgctcggcgtggtcgacgccaccgtcaccgacagcactctggatctgccggcggttatcgcccgttttaaccagcgctttccggcggtgtttctcaccctcagcgtgtgcgagcccaacgaactgca

SEQ ID NO: 2647 - DNA, 244 bp, Zea mays
  Peptide Sequence Number=SeqID_8952
  Probeset Number=SeqID_17050
tgcagcgagcgcttggcccgcagcagccttcacatggcttcggcctcggcctccaccaccagcggcttggtgacgcttcttctcctggcggcatggaacccgacgcggtgatgatgccgcctctcctcttccgcgccctcgcgtcgctcaacctcctcctcctcgtcggctacctcctgctcgtcctcctcgccaagctcttcgcgcgcctgcaccacagggccaccgccaaggacagcacaag

SEQ ID NO: 2648 - DNA, 550 bp, Zea mays
  Probeset Number=SeqID_17051
tcgagcctcggtacctcctgcggcctgcgccccgcacgcgctgcgccctggttggccccacccgccagtcggccccctccccaaaaccacctttttcctctacccccccccccctggggcaggttctctcctccttttcccccgcccggttcgcccgtcgccgcccggagtcgaaccgccatccgccgcttcgtccttgcccgcggtgagacctctccctcctctcccccacccccttctccttccttggcccggcgcggctccctccctctcccgacgcagtggccccggcacggcctcgcccctgccccgcgcggcgacgctcggtccggcacgcggcccgtgacctcggcatcccgcccccgccccgacgcacccccctccctccacctagtgtctgccccggcgcgccctccggctatggcgtgcccgtctcggcgcgcgcggcccaccacgtcctggcacgcgcggccccgcctgttccagcgcgctgcctcacctctgatcctgcttcccccctgccccggcgtgcttccccggcgctgccccg

SEQ ID NO: 2649 - DNA, 422 bp, Zea mays
  Peptide Sequence Number=SeqID_8953
  Probeset Number=SeqID_17052
cccggggggtgtgttatggctgaaaacagtttccctgcatcatcgtccgaccgcggacggcccaatctgcacccgcgcagcggtcgcgcgtcgcgcgtgctctttctgctgctgctgctggccgggctggtgttcaccggtatcaatctgttcaacgacgtggaagagaccggcgcggtcgtcaccagctatacgccgtttctgctgcttggcgtggcgctgctgattgcgctcggcttcgagtttgttaacggctttcacgataccgccaatgccgtcgccacggtgatctacacccactcgctgtcgccgggcgtggcggtggtgtggtccggcttgtgtaatttccttggtgtactgctctccagcggcgtggtggcgtttggcattatttcgctgctgccggtggagctgattctgca

SEQ ID NO: 2650 - DNA, 439 bp, Zea mays
  Peptide Sequence Number=SeqID_8965
  Probeset Number=SeqID_17053
gcaccaacgaaatccagtgggcagaagttcattgcccgcaatcgcgcgcctcgcgttcagattgaatatgacgtggaaatttatggcgcggaacgcaaaattcagctgccgtttgtgatgggcgtcatggcggacctggtcggtaaaccactcgagccgcaggcgagccttgatgagcgtaaattcctggaaattgatatcgataacttcgatgagcgcatgaaagcgctgaagccgcgcgcggcgtttcaggtggataacacgctcaacggcgaaggcaaacttaacgtcgaactgacctttgagagcatggacgatttctcaccggatgcgattgcccgcaaagttgaaccgctgagcaacctgctggaagcgcgtacccagctttcgaatctgctgacctacatggacggcaaaaacggtgcggaagagctgatcg

SEQ ID NO: 2651 - DNA, 246 bp, Zea mays
  Peptide Sequence Number=SeqID_8966
  Probeset Number=SeqID_17054
gtgtgggagatcagcttcagcggggatggtggccggagagcggaacgacgacgagaggcagcctcacacggagatggtgggctcgcaactcatcaacgccgggtaccacgtggtcgcgaagcatgcgctcagtgtcagggtcaatcgcgtcgtcttctgcgtcatccgtgacctcctcgccttgtgatgtcgtggactcgtggcttacaaattttctttgtctgatgtatacgtgcttggtctgca

SEQ ID NO: 2652 - DNA, 389 bp, Zea mays
  Peptide Sequence Number=SeqID_8967
  Probeset Number=SeqID_17055
tttgtgacgcgttatatcgccattgactggggctccaccaacctgcgcgcctggtattaccgcgccggtgaatgcgtcgatgagcgccgttcggaagcgggcgtgacgcgcctcggcgaccgcacgcctgctcaggtgtttgccaccattaccgacggctggccggtggccgaagtcccggtgatcatggccggcatggtgggcagcaacgctggctggctggcagtgccttatctcgcctgcccggtggcgctcaatacattaagcgatcgcctgacctgcgtggaaggaaaagcatggattgtgccgggactgagcgtcgaacgtgacgacaactacaacgtaatgcgcggtgaagaaacccagctgctcggcgcggtcacgctgca

SEQ ID NO: 2653 - DNA, 440 bp, Zea mays
  Peptide Sequence Number=SeqID_8968
  Probeset Number=SeqID_17056
acggtccatgcgttcgagttctcgccgcagatcgacggcctcgtgatcaccgtcgtgcagcgcgcgctgcagacgctcgtcaaaaccgccgcaccgggcgcgctgtcgatcatgcaacgcgccgcggtgattccggtcaagggtccggacgcgagcgtgtcgatgctgatgccgctgttcgcgctgctcgaacaggaattccgcagcccatcacgcgggcgcggcgcggccgggatggcgttgctggtggcgttgatcgtgcatgtcgcgcgcctgagcgatctcgcggcagcgccgtcgcaggcgggcaccgatcggcgcggcatcctgctgcggcgttttctcgaacatgatcgacgcgcattttcgcgagcatcggccggtggaattctatgtggagcggctcggcgtcctggccgcgcagcttgcgagagtccgca

SEQ ID NO: 2654 - DNA, 732 bp, Zea mays
  Peptide Sequence Number=SeqID_8969
  Probeset Number=SeqID_17057
atgactagccccaggctaaagctcttcggcttccacgtctccgaggaggagcacgagctgggccgggcccgggagacggaagcggaagccgagccggacgaggcgccggcgtgcggcaacgtcggtggcggcggcggaggctccgactcgtcgtcctcgtctaccaccaccaccaccacgaccacggccacggcggccggcgacgcgcggaggttcgagtgccagtactgctgccgcgagttcgccaactcgcaggcgctgggcggccaccagaacgcgcacaagaaggagcggcagcagctcaagcgcgcgcagctacaggccgcgggggtggacgccggccgggtcgccgcgggcggggcgctctacccgcgcgccaacccgatggtgtccgccttcgtgccgccgccgcacctcttcggcggagacgcggcgcccacgagctgggtctacttctccccgcgcgccgccgccgccgcggccgggggcccgcagggccagcagttccacgtctcccacaactgcgtgttcccgtcgcgcgccgccacgccagccaccgtgacggccgcctcgccggccgtgttctcgtacgccgcggcgtcctccgccggcggcggcgccgcggcgccctacgggaacgggaccgacgaccagtacagcgggcggaggctccacgtgagcccggcggccgccctgaggagataccccggcatggcagggggatcgctatag

SEQ ID NO: 2655 - DNA, 244 bp, Zea mays
  Peptide Sequence Number=SeqID_8970
  Probeset Number=SeqID_17058
gtcgacctgcagggagggtctgggagtggatcgcggagctggctaatccacttggagggtggaggctggtgtcgtaatctcaaatcatgtgcctcacgtcagagatcaatgttgggctcatcccgttacatggaaggccaggttgagtttacagggatcttgagcgatgacaaatctcagaatcccggtattgaagtttcccatctctctaatgtttgttacctttattgttgattatgtattt

SEQ ID NO: 2656 - DNA, 278 bp, Zea mays
  Peptide Sequence Number=SeqID_8971
  Probeset Number=SeqID_17059
acctacaatacttgtctctttgttgttgctgtcttgtagtgccagcagcgatgcctccttgttcgtgctcggcaagtcggccggtgtgagcaaaatccgtacgtcatcgactccagtggtgccattctccgtggctctgcacacggtcggggactcggcggccttgctggatcatttgtgccgccaaacgagtttgacacaggatcacgcaaagaaagacattgggctcaagcccagcccaaaccgatgggatcggtcgacaccaatcgaggcacgct

SEQ ID NO: 2657 - DNA, 293 bp, Zea mays
  Probeset Number=SeqID_17060
agtatctggaccagcaccatgttcaacatcaagatcataggcacagttaaacgagctggcgtaggggtgggtcaaacatggacggcggcaccaagcagctcatcaggcccttagtaaacgaggccatcctccgatgcggcgccacgccgttcaccgcgtggcgcatcgcatatttcgtgccggggatcatgcacatctccgtgggaatccccgagccaaccgcggggcagggcctccccgaaaaaaaaatccgcagcctccggaagcagcagcagcatcagcagcagggtggc

SEQ ID NO: 2658 - DNA, 225 bp, Zea mays
  Peptide Sequence Number=SeqID_8972
  Probeset Number=SeqID_17061
atgcacgttttgattgttaaaacctcgtcgatgggtgatgtgctgcacacgttgccggcgctgaccgacgcgatgcaggcgattcccggcattcgcttcgactgggtggtgcaagagaattttgcgcagatccccggctggcatccggccgttgacaaagtcctgccggtggcgatttgtcgctggcgcaaacactggtttggcagccagcagcgcgaagagcgc

SEQ ID NO: 2659 - DNA, 606 bp, Zea mays
  Peptide Sequence Number=SeqID_8973
  Probeset Number=SeqID_17062
ctgccgatcaagctgatggcggcgatcgaggcgaatccgacgctgcgctttatcattcagcagatccgcatcgattcgacgctgagggggctgcgcatcgagatcgtcgatacgcagaagcggccgatgttcgcgatgtcgagcgaccacgtggagccgtacatgcgcgacatcctgcgcgagatcggcaagacgctgaacgacgtgccgaaccggatcatcgtccagggccataccgacgcggtgccgtacgcgggcggcgagggcggctacagcaactgggagctgtcggccgaccgcgcgaacgcgtcgcgccgcgagctgatcacgggcggcatggacgaggcgaaggtgctgcgcgtgctcggcctcgcgtcgacccagaacctgaacaaggccgatccgctcgatccggaaaaccgccggatcagcgtgatcgtgctgaaccgcaaatccgaagacgcgctgatgcgcgacgacgcgacgaccacgacgctgtcggccgacgccgcgggttcgaagcagctcgcgcagcagctcggcggcgcggccccggccgcgcggccggcgctcgcgaacgccgtcgcggtcgcgccgaaaccctga

SEQ ID NO: 2660 - DNA, 249 bp, Zea mays
  Peptide Sequence Number=SeqID_8974
  Probeset Number=SeqID_17063
ctctgtcttcgtgtaaatctctctctctctcttcccagcctttcgatcatctctagtttattcgtgaccaagagcttcaaccgcgagtgccaggtcctgaagcgcatccggcaccggaacctcatgcgcatcgtcacggcgtgcagcctgccggacttcaaggcgctggtgctgccgttcatggccaacggcagcctcgagcggtgcctctacgcgggcccgccagcggagctgagccttgtgcagcgg

SEQ ID NO: 2661 - DNA, 374 bp, Zea mays
  Peptide Sequence Number=SeqID_8975
  Probeset Number=SeqID_17064
tgcaggtgcagtgcagccggcgtggtcgtggtggtcgcggtcgggtgactcggcacccgtcgagcaggcagctgagacagtggacgctgcgccaatgggccgtcgcgagagaaggccaaatgtccgctatgccggcccagagtggcggctgtaataggcaccaccgatcgccgagcctggagggtgtgcctcactacactcgccgcgcacggatggcgggagcaacagatccgagtatcgccacggcgctggaggaccaagcccgagcgctcaagatgcaagcgaagacgctcgactctactcagaagctcctccagcggatctgcgagcgcttcgacgagcaggatgggcgctggcgcgaactggagcacacg

SEQ ID NO: 2662 - DNA, 302 bp, Zea mays
  Probeset Number=SeqID_17065
ttagccagcggcgtactggaaggcagcgcaccggccacaccggttgccgccagccctgccgcaccggctgcggctgcggctgcggcagcgagtccggctccggccagccataacgccagcgcccatgccggcagcggttttgtggtacaggttggcgccctgaatgatgccgctcgcgcccggcagatggcggacagccttggccagcgctttggtgtacccggcgcggtggaagccaatggcaacgtctaccgcgtgcagcttggcggtttcagcagccgggctcaggccgcggcgctgca

SEQ ID NO: 2663 - DNA, 260 bp, Zea mays
  Peptide Sequence Number=SeqID_8976
  Probeset Number=SeqID_17066
atgaccgagactacactggcgcgccacggcctggccctgagcttgctgctgatggttgcagcgccgggtgtggcgctggccgagcctgcggatgtcgagcgcctgggcaaggacctgacctgcgtcggcgccgaccccagcggcaatgccgacggcagcatcccgccattctccggcaagtggctgggcgtgccgccgcacgttgcgttcaagggtaccggccagcatccggtcgacccgtacccggacgagaagccttt

SEQ ID NO: 2664 - DNA, 617 bp, Zea mays
  Peptide Sequence Number=SeqID_8977
  Probeset Number=SeqID_17067
cggcgacgcgatccatcatctcaccattgctgctccgcttcctctcctccgctcgcttgtctccgtgcaccggcgcaccatcgcttgtctccgtgcacctgctgtggttggggcctcgacggcttatatattctttatcggcgaggcgatccatcatctcaccattgccgctccgcttcctctcctccgctcgcttgtctccccgtgcaccggcgcaccatcgcttgtctccgtgcagttcgcgcgtcaccatggccataaccatagaccgggtccacctcgccgtggcacacgtagctctcccggcgctgctcccgacgccgtgcgtggccgcagtcgtcctcccgaagccgcttgccaagcccagccgcgccgactccgacgagaggtgggacgcgcgcaagacggccatgaccaagccggccagcacacatcatcaatgctcggcctcgtcaagccctcgtcaagccgacagcagcagcgcccgacgcaagaacgggacagcgccgcccaagcccggccgagccgactccgctgggccatgggtcgcgcacaacaagacgaccatcccattcccagcttcatcgtcatcctcttcacgcacgtcttcttctcac

SEQ ID NO: 2665 - DNA, 310 bp, Zea mays
  Probeset Number=SeqID_17068
tcactacgcgatgacccggacaaggtcgcgctggttcagcgcctggccggcgagctggcgatggctgacaccgtggaaacagctttgaccatgcggcgcatgctgaccaccggagaatccgagccaaacgccgctgagcaacccgaggcgcttgctgaaggcgaccgccgcattgatgcgcttgaccgcgagctcagcgccctgcgtaacgagatggagttgcgcaaatccataagcaacaacagcctgctgaccacgctggcgcgtcagggagagcgtaaccaggataaccagctgcaggcatgcaagc

SEQ ID NO: 2666 - DNA, 350 bp, Zea mays
  Peptide Sequence Number=SeqID_8978
  Probeset Number=SeqID_17069
atgcccgtcccctggtgttcgttcttggcgtccttgctcactgcccgggctgttatccccctcccggtctcctggttccccgcgctcctgacgtgggccatttcggcctgtccctgctgagcctcgttctcggccaccgcttcgccgggcctctcgccgcgctcctcgtgcgtcccccgctcctccgtcgggggtgtgcgcctcggtgctgcgtactcgcaacccccgcctccttgccagcgcgcggggctcgcacgctctggcgttctgcggccggagctcgcgcccgctgcggcagtcgcgcgcgtgctcggcgcgttctggccgcccgcggcggcgctgcccgtgct

SEQ ID NO: 2667 - DNA, 1173 bp, Zea mays
  Probeset Number=SeqID_17070
ctgctatggttaacctaattgcttttgccatcacgacgacgcaggtcggcgatctgaagaaagggatcaacccactgtctatttcgcagctgacgtttacagacaagcacgtcaatacggcaatgaaagcggggttcttgtccgggatcctggcgctggcagaagggatcgccgtcggacggagcctggcgctggtaaagaacgagcagatcgacgggaacaaggagatgatcgcattcggcatcatgaacatcgccgggtccttcacttcttgctacctcaccacagggccgttctccaaatcggcggtgaacttccacgccgggtgccggacgcccatgtccaacgtggtgatgtcggtgtgcatcctgctggtgctgctgttcctggccccgctcttcaagtacacccccctggtggcgctctcgtccatcatcgtcgtcgccatgatcgggctcatcaaggtcagggagttctgccacctgtaccgggtggacaagttcgacttctgcatctgcatggtcgcattcatcggcgtcgtcttcttcaccatggtcatcggcctcagtgcctcggtaggcttgtccgtggtcagggcactgctgcacgtggcgagacctagcacctgcaagctcggaagcgtcgcgggaggcgacatcttccgcgacgtcaggcactacccgcacgcgaggagcgtccccaacgtcctcgttttgcagctgggatctccgatatatttcgtcaatgcaggttacttgcgagaaaggatcttaagatgggcggaagaggaggagaacggcagcaagattgacgggcaagatctgcagtacgtggtccttgatctcgctggtgtgacttccatcgacaacacggggattgggatgctagtcgaggttcacaagagccttgatcaatgggcagtcaagaaaccagatgagctcttcgggttccttggaaccgtggcagctgaccagaacggtaacctcacaaggccagctgaggtgcgcatcggtgcactgttcacgtttggttcggttatcggaatggcggtgagatctgctatcgagctcgccgttgcggatgtcaatgctgaccctaccatactctgggggacgaaactgagtgttcttatgcaggacaccaattgcagtggctttgttggcaccatagaag

SEQ ID NO: 2668 - DNA, 414 bp, Zea mays
  Peptide Sequence Number=SeqID_8979
  Probeset Number=SeqID_17071
ttgcatgcctgcagcgcgtcgagtaccggatcgaagcggcggctccggcgcccgagcggcgcgagcagctgcggatggacggcgtcgagccgtgtctggttttacatcggcgcacctggtcgcagggcgtcgtcgcctcggtggcgaatctgtggcatcccggcagcctcgtcttgaaccatccgaaacacatcgatccccgtctcgatccgacgcgcacgatccgcgcgccgcgcggcagcgagaaggtctgcaagacctggctggccgaagcggcctaccggatgatccagaacaacctggatccggaagtcgccgagcatccgcacgcgctcgtcgtgtacggcggcatcggccgcgcggcgcgcaactgggaatgctacgaccagatcctcgcgtcgctgaaggatctcg

SEQ ID NO: 2669 - DNA, 451 bp, Zea mays
  Peptide Sequence Number=SeqID_8980
  Probeset Number=SeqID_17072
gtggtccccttatgctgctatgcttgctgcccaagatgttgcacagcgttgcaaggagctcggtatccccgcgctgcccattaaggtttggtggaactgggaggcaacaagacccaagacccctggacctggtgctcagtttgctctcagggtttttgctcgttttgggatgaaaattggacgcattgaggatgttaccccggttccccctgacagccctcccaaaaagggtggtaggagggaaaggagcctgtaggggtgtatccttgctatttgccatccctttgccctggcctttgggtagcgttgctgtttattagcttgccaaaaggagttttaattttgcccattttgctctatgtgaagggtcattttctgttagccgaatctatgatgtgcattgataatgttttggttgaggaattgccaattatgctagttttgctgcccc

SEQ ID NO: 2670 - DNA, 520 bp, Zea mays
  Peptide Sequence Number=SeqID_8981
  Probeset Number=SeqID_17073
cctgcagggcttggtaaaatatcaatctctggacatttcatggaacaagttaaatgggaatatcccaccctggctagggaatctgatgaatctcttgtaccttgacctatcaaacaattccttcagtggggtgcttcccatgagcttcacatggatgaggattttggttccaaccaatggcttgaatgagcagtcaccaacagagggcctcccgttatcttcaagaagaattcaactagcaaagttttgcagtacaatcaaagtcagcagcttcccaccttctttgttgggccaatcttgtcaagctttggccatcctgtcaaccttcatgtgctggacttgagctggaacaacatatcagggccaattccttatgagttgtcaaacatggcaagcttcgaaacgctgatctcaatgggagcattccatcatcactaacaaagctgaatttcctctccagtttgccgtgtcgtacagcaatgtctggactgttatcaaacagggctcacaccgcaacacg

SEQ ID NO: 2671 - DNA, 237 bp, Zea mays
  Peptide Sequence Number=SeqID_8982
  Probeset Number=SeqID_17074
cccggccgcggtggcaatgggctcgctgatcgcctcagtgatttttgtgccgctcggtctgacctttgccgcgcccggtatctggcagtgggaaattctgccgctggcgttgctcatcgccctgctctccagcgccattccgtactcgctggaaatgatggcgctgacgcgtctgccggcgcgcattttcggcacgctcatgagtctggaaccgacgatggcggcgctctccggcat

SEQ ID NO: 2672 - DNA, 419 bp, Zea mays
  Peptide Sequence Number=SeqID_8983
  Probeset Number=SeqID_17075
gaccaccggcccaccgccaccaccgtgggggaccgctccgagagcagcaccacgaaagggacaccaacgcccatccggagcatgagcaacgacacggcagcagccgccgccgccggcacgccgacaaacggcagctgccacgccaaggccgcgagcggacaccacaacccgcgccagggccacgacaggggagctcacgcaccgggccacgacacaccgacagccgccccgaacgacggggccactgggaacgcggccctgacaccggggaaggccggcgaccgtagacagcgcaccactcccaccaacccctgcatcaacaacagcgaggccggaacaccggctggacacccatgcacccagaacctagaccagcacgcaacggaaagggccacagaggccagccccaagggcaacca

SEQ ID NO: 2673 - DNA, 476 bp, Zea mays
  Probeset Number=SeqID_17076
tataatccaagagaactcacccaaactagcaaggcaggctctcatgcaaatttaggacagataaagaacgccacaaagatattcctcgagaagagcaactccaagacacataattgtccgattcaccaaagttgaaaagaaggaaaaaatgctaagggcagccaaagagaaaggtcaggttacccacaaaggggagcccatcagaccaacagctgatctgttgggagaaactctacaagccagaagagagtgggggccaatattcaacattctttaaagacaagcattgacaacccagaatttcaaatccagacaaactaagcttcataagtgaaggagaaataaaattctttagagacaaacaaatgctgagagattatggcaccaccaggcctgccccaaaagaactcctgaaggaagcactacacatggaaaggaacaactggtgagacccactgcaaaaacatgcccaattg

SEQ ID NO: 2674 - DNA, 422 bp, Zea mays
  Peptide Sequence Number=SeqID_8984
  Probeset Number=SeqID_17077
atgccgctgccggcgcaggcgtccgacgacagcgccgactggccggtttccgcgcgcgctgccgggttgcactcgctgcatcgcctctccagtcaggagctggcgctgcgcccgagcacgccggcgctggcgcatttcccgctggcgcagtggcgtcgcgcgctcaatcaaaccgcgcagcaggcacagctgctgggctacggcgatccgctgggtgagctggcgctgcgtgaggcgctggcgcagcatctggcgctggcgcgcggcgtgcgctgtgcgccgcagcagattgtgattaccgaaggcgcgcagcaggcgctgacgctgtgcgtcgcgctgctcaccaatcgtggtgacaccggctgggtggaggagccaggctatcgcggcgccaaagcggcgatgcgcctgggcgatctgca

SEQ ID NO: 2675 - DNA, 669 bp, Zea mays
  misc_feature (669)..(669): n is a, c, g, or t
  Peptide Sequence Number=SeqID_8985
  Probeset Number=SeqID_17078
aatgcagaatggaagcggtggcggcggcggcctcgctgccggagtgcggctccaccggtggactgctcatcagtggcagcagaagtgcttcactgcagctgcccccgccgacgctcgcgcaagaaggcgttcgtggcgcgcttttgcacggcctcgtcgaagtgatcaccgagaatgcgaggccgccacggagaccagcacgaaggagacgtacgtgctgatggaacccggcatggacgaggcgttcgtgtccagagaggagctagaggagagcctcacaagaactggcccgtggacaccctatccctggacctcgccaggttcggcatggtcgacgaggccgtctcgtacctcgtcaggtccgtgtgtgtgctcgagatcgatggagacgttgggtccgtggagtggtaccaggtccagttggactagttgccaccctagcttggatgtatgtcagtgagaaacccattaagagcctttttcacgctccccagcttctcgcctatggacggccgggcaacgcgcccaactgcagcagtcgtctgtgctcttcccctcatttgtggtcttaccagtggcgagtttctaggtaaatgagaagttgtggatacctgtcactgccaaactcattgtctgactttcttttaaagaagttagcttttataagtn

SEQ ID NO: 2676 - DNA, 539 bp, Zea mays
  Peptide Sequence Number=SeqID_8986
  Probeset Number=SeqID_17079
cccgaaaaggggaggcgcgcgccaaagccacaagaggcaggagcgggaaaaacaagcacgaggatcatgttcgctattatcgagcgaaccagcagcactaagcgggggaacgaggggccgcggaggggcaagccggcgataaagccgcccgcagggggatccgacaaggcgcgaagaagaaccgcccgggggccgggacgacagaagcaggaaccagacaagagaactcaagacgcccacgacgaatgcagaagagccacaagcgcagggcgagggggcgagcggccggcggcgcgcagcgagcaacagaccggacatcaaaaaaggcgcgaaagaccccgcagggcaaacaaacggaaccacgacacggtgaaacacatgcaggcgcagccagagcaccgcgagcacaacgcagcacccgctaggccacggcgaagaaaccaaaaccaaagcaaaggcagcacaacgcccaggcgcaagcaaaaacaaagacgcaaagagagaggcggggcggaaacggccccagaacgacaaaagaa

SEQ ID NO: 2677 - DNA, 482 bp, Zea mays
  Probeset Number=SeqID_17080
cccaacgtggcgcactgccggtactgcttacacgacgaggacaagaaggagttcttcctggtcatggaccaggtcatgaccaatgatctggccacccacgtcaaggaggcgaacagcggcaagcgacgggtacccttcccgctcgttgtcgtcgtcgacgtgatgctgcagatcgcgcgcggcatggagtacctgcactcgaggaacatctaccacggcgatctgaccccgtccaacgtgctcgtcaggacgcggtatgccgacgcgcacctgcacgtcaaggtggccgggttcgggcagcacgcggcccctagggcgtcagcgaaagcatcaaacgccaccagcgccccttgcatctggtacgcgccggaggtgctggagcagcaggaggcggccaagcgcacggagaaggcggacgtgtacagcttccggatggtctgcttcgagctgctgacggtgaaggtcccgttcgaggacaacca

SEQ ID NO: 2678 - DNA, 235 bp, Zea mays
  misc_feature (16)..(16): n is a, c, g, or t
  Peptide Sequence Number=SeqID_8987
  Probeset Number=SeqID_17081
tcgtccgagcattctngcacttggcttcttctttccctttctctgccatggattcattacgattgtaccagcatcgctggttggtgtattcttttttttctcctattctaaataatctgattgttgtatccattactgtacttttgagcttaagaaagaaatacttctcggctcaacgtgttctctaatttattcgctgtcatgtagccaccaaaacaggatgaagagtttgccg

SEQ ID NO: 2679 - DNA, 458 bp, Zea mays
  Probeset Number=SeqID_17082
tgctcacgctgacgcacgctactagcggctttgaggacgtagagtccgtggtgcaggtcgccgtgacttgttgttcggctagatcctgcccaatctgtaggtgaagttcgagcaccccgactcgggacgaacggtgcccaatacacaccgggggagatctgagtgcgtagccagatcgcgatgcacggctactactggtagacggaggagacggactgcaccatcgacgcggcgtggtggctgcacacagccgacggggggtacattgactaccacttgagacgtgctcatcgtggaccgcatgaaggagctcataaggttcaagggcttccaggtcgcccctgccgagctgaaggccattctgatgtctaaccctgccgtagaggacgccgacgtcttttagtatcgagcgagcgtaccgcgacttgcaggggtacccacctagaatttataatctt

SEQ ID NO: 2680 - DNA, 274 bp, Zea mays
  Peptide Sequence Number=SeqID_8988
  Probeset Number=SeqID_17083
gaattcggcagcttctttagggaaaggagtccgggtgattggggtcgctggagcacctggtggccccacagtttccaggaaacagattggccgtcatatagaaccatacctgccgaggaggacggccaacgagatcaataactactggaagacgaggctacataagcacaccaaacatgtaaactgccatgtcagcaacaagcgctataaggacgacatgcgctacctgtgtgatgcctacctcttggacgccaccgttaccgtcgacgactaa

SEQ ID NO: 2681 - DNA, 236 bp, Zea mays
  Peptide Sequence Number=SeqID_8989
  Probeset Number=SeqID_17084
cagcgtgtcaccacgtccacaagcaaggacggtccaccgtggcgcccggtgacaatagcggcagacgcagcgaaggtggcggacaggggcaggggacatttcgctgggtggtggcacaacgagacagggagccgacagacagtaggttagcagcgcacgacgagccaacagcgccaggatggccatctctcatctgtgttcgaggcgacatggcacacctcaacacgcgcaattag

SEQ ID NO: 2682 - DNA, 369 bp, Zea mays
  Peptide Sequence Number=SeqID_8990
  Probeset Number=SeqID_17085
gaaagctggatgcgccattggcttccccgggggcacgacccagcttcgcggagtgggtgaaacagcacaacgtgccgtatctgctcggaccgattacaaagaaagaagtcgacgtcgtggtgtgcggcctcggctggtccggctcgctgatgagcatcgagctggcattggctggactggacgtgtgcgcccttgagctcggcggcgagcgcgactacctggatttcgcttacccgaaaccggccgatgaggacgcctatgacgtgcgcaatagagtgttcgccacgccgaaagaagtggcggtcaccgcgcctcacgacatggaccacacggcgctgcccccccgtttgtggggggagaagggcccgg

SEQ ID NO: 2683 - DNA, 451 bp, Zea mays
  Peptide Sequence Number=SeqID_8991
  Probeset Number=SeqID_17086
tgcagcaaattctgatcaacctgattggcaacgccattaaattcaccgagcgcggtcacattgatttgcgcgtcgaactgcgtcatttcagcatcacgcgggcggaactggagattcaggtgcacgataccggcatcggtatcttttaacaacaacagttgcaactgtttcaggcattttgtcaggcggacgccaatattttgcgccgtcacggcgggaccggttttggcctggttaatacgcaaaaacttgtgcacgaaattggcggttagattgcctttcacaaccggcaaaatcaagggtccccctttttgggccaaggacatttggatttccatcctaaagccccggcgaatccaagcaagcttgaccatttgccccccccccccgttggttaaaatcaacccccatcccgccgttgccaaaaccggttcagaaaatgttaaccata

SEQ ID NO: 2684 - DNA, 260 bp, Zea mays
  Peptide Sequence Number=SeqID_8992
  Probeset Number=SeqID_17087
atgagtttactgtttagcgcgacgcagcttggcgagttgtcgctggaaaatcgcattgtgattgcaccaatgtgccaatactcagcggaagaaggtcaggcaacggcctggcaccgcattcatctcggccagctggcgctctctggcgcgggactgctgattatcgaggcgacggcagtggaagccattggccgtatcacgccgggcgacctggggttatgggacgacgcgacagaagccgcgctggccagcgtgctgca

SEQ ID NO: 2685 - DNA, 428 bp, Zea mays
  Peptide Sequence Number=SeqID_8993
  Probeset Number=SeqID_17088
accacacataacaccatccattacaatcacatctcactcaccgaacctgcatgcgcatcgacaaccatgttctctccaagcatataaatgcacgaaaaacaaagctccgataatacagcataacaggtagggaaactagcagcacacaagcattctataattcaagaaactgtcaaaccatctgtgaattgagaaatcaagttcgaaagcaactttttgcatacatcaccatagagccgtttggttttttttcatcacatgctcatcgcacctccagatgcaccaggaccaacacacacactcgtgttcttgtcgtgcatctgatgtgtgagtgtgtttagcttgtgatgaagaacatgagtgtgtgtgttggtcgtggtgcatctggaggtgcgatgagcaacacacacactcatgttcttcatcac

SEQ ID NO: 2686 - DNA, 270 bp, Zea mays
  misc_feature (9)..(13): n is a, c, g, or t
  misc_feature (15)..(15): n is a, c, g, or t
  misc_feature (35)..(35): n is a, c, g, or t
  misc_feature (88)..(88): n is a, c, g, or t
  misc_feature (248)..(248): n is a, c, g, or t
  Probeset Number=SeqID_17089
ccctccccnnnnngntttttttccccccccccccnttaagagtaggagtagcatgatgattattgatcccccgccctcccagatctcnaccaaagtttccctgggatatactattgtttctgatccctacaactcaactaaacactgggagttggcgttatattacaacgatcggaaacaacaacaacaacaaagagagacaaggagaattcttatgcattactactgcacccgcgtggttgttaatnctgtgctctaaaaaaacgctgg

SEQ ID NO: 2687 - DNA, 285 bp, Zea mays
  Peptide Sequence Number=SeqID_8994
  Probeset Number=SeqID_17090
tgtgaccgcacagacatatttccagaaagcaagaagagctacaatcgtgatctgttcctgtttctatacattcttctcatcatagcatcaacacttacttcactaaagaagcatcatgaaaaatcagcattttcaggaaagtctatactctatcttaatcgccaccaaactgaggaatggaaagggtggatgcaggttagtgattttgcttcacttatttatttttcttgatgttcccaaccgaataaggtgtatttaggaagcagtagtgaggaaagtatccag

SEQ ID NO: 2688 - DNA, 652 bp, Zea mays
  Peptide Sequence Number=SeqID_8995
  Probeset Number=SeqID_17091
cgcacgagtggctcgaccactccgccgacacagacgactccgtgctaacatccatgtctgggtgcaccaaactcgctgagctgcacctgaggggcatcaacttcagaggacgcattccagatgctctgttcgacgtcgggctcgagacgctcaacgtgtcgtcgcacgcgctttcgggcgtacttcccttgggctccaccaggctggcggagatgctacaatccgtccaccagctcacttgtggcatcctcaccgagatgtcgctcttcttcaagctgcgcgtggatctgtattgcgccatacctgccgacctctgcgagtctgttacccaaggggacattccagtaggagaagatgatccgccagacaaccccacgagattcatcctccccaccgatgcgcccaacgcaccggcccgcaccaactccggagtcgtggacgactctgtgttcgtgatcgccgaactcaccggctacgatgagtccaagctacacgccacctccgtcctcgcggtgatgtacggcgcgcacacagcctcttgcaccatgcccgacccgacgctcgacgctcactttgccaacaagcggcggatgcgctgctcccgcaacggcaccagtacggcgggagcggcattggagttcgatcccgacag

SEQ ID NO: 2689 - DNA, 303 bp, Zea mays
  Peptide Sequence Number=SeqID_8996
  Probeset Number=SeqID_17092
tccggctcaggcaggacgggtgggcaggtgatgccatgctttatgtgaacgtggagctagtgggcgtggacacgcgaccgcacatcgaaagggcactttcgtttggtgagaagccgaggacgagcatggtgccgcctcagctgccgacgacgcgagatggccggaagagcttggaggcagcgacataccatgatgtccttgacctgaagcaggtggggctgcggtgtacagagtataggaacgcagactatagacgaataaatctcaattataaatcctcacatgtgatttctcaggggtccc

SEQ ID NO: 2690 - DNA, 270 bp, Zea mays
  Peptide Sequence Number=SeqID_8997
  Probeset Number=SeqID_17093
atggatggtggtgagggagaccatgggcgtgcagaagaccagattatagggaattgctcgcggtatcatgcctccgtcgtgatgcctctgtgcgctgtggccgggtctccttgccatcttcactcgatgtcttccaggggggacggagctcgggagttgtgggcgggccaggccatggtcgcctccgcaagactgctgggtcggcacaagatggccatcggagttggaagacggtggctggaccgttgggtccacatcgcgcgggcatga

SEQ ID NO: 2691 - DNA, 431 bp, Zea mays
  Probeset Number=SeqID_17094
ccgaagcggaactggtacagcagctgcgtgaagacggtttactcacgctgggcgtagtggccaccgatgacgaaggccaggtgctgggttatgccgccttcagtccggtgacgttgcagggcgaggatcgtaactgggtggcgctggcgccgctggcggttgatgcctcggtgcgcagtcagggcattgctaaacagctggtgtatgaagggctcgattcgctcaatgagttcagctacagcgccgtggtggtgctgggcgatccgcagttctacaatccgctcggctttgaaccggcggcgcgtcacggcctgcactgccgctggcccggcagcgaagcggcgtttcaggtgtataaactggcggacgatgcgttcgatcgggcagaagggctgatcgccttctcggcacctttcaatcgtatcgactaa

SEQ ID NO: 2692 - DNA, 516 bp, Zea mays
  Peptide Sequence Number=SeqID_8998
  Probeset Number=SeqID_17095
atggtctatttcgaaaatcaggaagcccgggtgtgccttatgtttccctggttcggcaaagtgctggtgggctcccccgatatccgcgttgatgaccctgagggcggggtgtgcgaagccgaagaccagatttacattcttgagtcgctgcgctttgtatttcctgacatcgtggttccagcatccgcagtggtttacaccttttggggcgtgcgcccgctgccggccagcgaggccaaagtgaatggtcagatttcgcgtaacctttcgctggtgctgctgccgcctgaccacgcgcgtgcctggagcacgctgtgtctggtcgtcggtaaatggaccaccttccgccgcttcggggaagaggccgccgaccgcgtgttgcgcctgctgggaaaaaagcgtcgcgtctccagcagcgacctgccgattggcgccgcccgggattttccggcgccgtccgcccagccaaaaggcacagtgcgctggcacagcaatatgaccttccgctggcgcgcg

SEQ ID NO: 2693 - DNA, 334 bp, Zea mays
  Peptide Sequence Number=SeqID_8999
  Probeset Number=SeqID_17096
tcgactctatggatccatctgaatgccttcttttcactcgaactgttctttttatctttttctttctttttgcttttgcttagctgatgaactagaaacagcactcatggaaatggttaagcaagacaatagacgccaattaagtgcaaaggttgagcagtttgaacaagaaatatctgaattcagagaggctttgtcagataagcaggagcaggagcaagcaatgtttcaggtcctgatgcgtgtcgaacaagaactgaaaattgcagaggaagctcgcatctcagccgagcaggatgctgctgctcagagatacgcagcaaatgttctacag

SEQ ID NO: 2694 - DNA, 515 bp, Zea mays
  Peptide Sequence Number=SeqID_9000
  Probeset Number=SeqID_17097
acgacgccatccagcagcagatcggctacgagatcatccgcggacccggcggtaccgcgtggctgcgcctcggcgtgttcgcgctgacctgtgcggtgatctccgcgctggtgatcaaccggcggctgccgactgccagtcgtgacatcgccgcaccggcggcggagatcttcgagctcatcgccgaccccgcgcagcagccgcgctgggacggcaacgacaacctggcggaggcgcccgccggtcaacgcgtgcacgccgtgggtgatgtgttcgtcatgggcctgacggtcggcgccacgcgggagaaccacgtcgtcgaattcgtcgagggccggcgcatcgcgtggaagccgtcagagcccgggctgccgcagccggggcacctgtggcgctgggagctcgagcccatcgacgacgggcacacccacgtcacccacacctacgactggacggcactgaccgacgagaagcggctgaaccgggccaggcagacctccgccgactggctgcag

SEQ ID NO: 2695 - DNA, 474 bp, Zea mays
  Peptide Sequence Number=SeqID_9001
  Probeset Number=SeqID_17098
tcaacagacgcccgcccgattgcccaccataacaccggttcgctttctcgctccaactcccacagaatcggccgccagcgccgcagcgttgatgcccgccgcaccagaggagcgactcggcttcctcaatgtctccgggagaagaccggaatctccgagcccaggcacgccccgtccccgaaccgaactctcccgtatcggttggattccttcgatcttaaactcgtgctgtggtgcagagctggcaggcgccagccgccaggcgatcgcgcgcgagcctgctgcgccgcgcaggaggcactgaggcaggacagcggacagccggacagaacaagcgatcagcgatgtgggcatgtggccgccgggctgggcagaacagcggacgaacggcgatggaagcgggaagccggaacggcggaaggcgggcaggcggctgggcgtcagggcacggcgtctggcggctgcaggcatgca

SEQ ID NO: 2696 - DNA, 809 bp, Zea mays
  Probeset Number=SeqID_17099
gctggcgcagcagcagttcgccgcctgctggcagcgtagccagcagctggggatggcggtcgggttatatcgcgatttggcggttggcgtagcacagcacagcgcggaaacctggcaggatccgcagctgtataagctgggcgcgtcggtgggcgcaccgccggatccgcttggcccgctcgggcagaactgggcgctgccgccgctcgatccacatgtactgcgcgcgcggggctatcagccgtttatcgatctgctgcgcgccaatatgcgcgattgcggggcgctgcgcatcgatcacgttatggcgctactgcgtttgtggtggattccctatggcgaaggtgccgacaaaggcgcgtatgttgcctatccggtgcacgacctgctggcgatccttgcgctggagagtcagcgtcagcgctgtatggtgatcggtgaagatctcggcaccgtgccgcaggaaatcgtcagcctgctgcgcgaccgcggcattttttcgtggaaggtgctgatgttcgagtgcggggaggaggggcagttccggctaccggcagcctatccgcgccagtcgattgccagcgccagtacccatgatttgcccacgctgagcggattctggcatgccgccgatctgcaattgcgcaatcagctgggattgttcgccagacgcagcatgctgaacgcggccatcgccgaacgcgatgggcagagaaaagcgctgctgaaggcgatgagcgaggcgcaggcgattgacgcacgcagcaaaaacagtgcgggtcagcgcctgacgcccgcgctgaatcagg

SEQ ID NO: 2697 - DNA, 507 bp, Zea mays
  Peptide Sequence Number=SeqID_9002
  Probeset Number=SeqID_17100
gcctgcagccgcgcccttgtctgtgtacttacggttacggatgcagcctagagataacagtgtgattcttcttcttcgtggagatatgcagatgtatatattttagttttatgattttctacacatcttaatatgtagcatatatttttctccctactagaccgctgcgctgaagcgaaactaccgagcgctgcactaaagaatgtacctcatacgacatttctcctgacccatgcttgtttcctgttctatcatatggcatcaaatatgacacttcgtagattgcgccactctacagctcatttaccacagtctatttgctggttatttgaagctgcatggattttagcactgtcatacttcatagcgtacctggagaccctagccattgcaaatgtatgttgtagcttatatttaacttccactttgtatagtaatgtgaaatgttgcatatcccttgtttagttcattgggcatttgagaatgattgttgacatagacatgctg

SEQ ID NO: 2698 - DNA, 339 bp, Zea mays
  Peptide Sequence Number=SeqID_9003
  Probeset Number=SeqID_17101
tcgcccacgcgttcgtggacgcgtgggtcaattgtagaatctagttaaaaattgggacggtacaaaatctcttgtgcatggcaggtcataccaaaggaagcttggtgtcctaaagggtggagcaccctccaacagtggataaaccaaatcgacgatcaccagcatttacaggaagaagttctggacttgataaatctcatcgttcaagaaacatgtccactagcccacatcgtccacgtgttcgtgggaaggcttccagccctcaaatatggtaacttctgcctttgagaacacgagccattccaggaaaccttttcccccctccccctgtggggagaa

SEQ ID NO: 2699 - DNA, 235 bp, Zea mays
  Peptide Sequence Number=SeqID_9004
  Probeset Number=SeqID_17102
tccttttgttccaaaacttcttttttcaaaagaactattattgccatatagttctttaccataactcttttgttctatctgactattcttagtttcttgctataaaatggagcacctaacaatgcatcttcactgaccaagaactacaaggtcaccccttccattctagggtgactgagggatcataccattcaatacattttttcattacagaagtttgttgtctttggatact

SEQ ID NO: 2700 - DNA, 366 bp, Zea mays
  Peptide Sequence Number=SeqID_9005
  Probeset Number=SeqID_17103
atgctcaccgttctgtacgtacacgcgatcgccactgttctcgctccactgttggtacgacgctggggacggcgggcgttttatccgctcgcgctggcgcccgcgggctcgctgatctggctggcgtcgaactggcccggaaccggcgagcagacgctgcacatcgactgggtaccgcagctgtccatggacatcacgctgcggctggattcgctgtcggcgatcatgtcggtgctggtgctgggcgtcggcaccctcgtgctggtctactgcgccgagtacttccaccacgccgacgggcacaccgagaaccggctgcccagcttcgccgccgagctcgtcgcgttctcgggcgccatgttcgga

SEQ ID NO: 2701 - DNA, 788 bp, Zea mays
  Peptide Sequence Number=SeqID_9006
  Probeset Number=SeqID_17104
tgcagcaggcgcttggagatgaagtaaaagtcagcccgctgctgtgcaccttctattacgaaatcaataacaagaaagcgccgtttgacgacgtccgcgtacgcagcgcgctgaagttaacgctcgaccgcgacatcatcgcacagaaaattatggggcagggacagatcccggcctacggcctgacgccgccctttattcatggtatttctctcaatacgccggcgtgggcgcagcagacacaggcgcaacgtaacgcggcagcgaagcagctgctggcggaagctggcttcaatgcccagcatccgctgcgttttaccctgctgtataacacttcagaacagaacaagcgtcaggcgattgcggctgcctcgatgtggcaaaagaatctcggtgcgcaggtcacgctgcaaaatcaggagtggaaaacgctactggagacccgtcatcaggcacagtttgatgtggtgcgcgccacctggtgtgcggattacaacgagccatccagctttctcaatctgctgctgagtggctcctccatcaacaccgcgttttatcacagcgccgcatttgatgcgctgatgacgcaaacgctcaacaccgcggatgacgcgcagcgcgcgcaactctatcagcaggcggaacagcagctggatcgggattcaccgatcatcccggtttactaccgcgttagcgtgcggctggtgaagccgtgggtgggcggtttcagcggcaaagatccgcaggatatgctggcgctgaaatactattacataaagaaacattga

SEQ ID NO: 2702 - DNA, 1563 bp, Zea mays
  misc_feature (1)..(46): n is a, c, g, or t
  misc_feature (1515)..(1563): n is a, c, g, or t
  Peptide Sequence Number=SeqID_9007
  Probeset Number=SeqID_17105
nnnnnnnnnnnnnnnnnnnnnnnnnnnnnnnnnnnnnnnnnnnnnncccgtgccggcttgggcagcagttgggctcgctcggcccgcctccttcccgagcacgcacgccgcctcgcttccaattcttccccccctctcctcgtccgctccgctccgctcctgcgttgccgtggagtgccgcccggggctccattccattccacccgtagcccggtccccccgcgccgccggcgcgccggttccttcggttcccgggatcaagatgattggttcattcattaccggaatgctaacgcttgttctcggatacgcgtaccctgcatacgactgctacaagacagtggagctgaacaggcctgaggtcgagcagctgcggttctggtgtcagtactggattttactcgcgtttctcaccgtactggagagagttggggaaactttcgtatcatggttgccaatgtatagtgaagcaaagctcgcatttatcgtgtacttgtggtatccaaagacacgggggcactgcctatgtatacgagtcattgcttcaagccatacattgcaaaacatgaaactgagattgatcgaaatctgctcgagttgaggacaagggccggtgacatggcagttctttatttccagagggttacaaactatgctcagacaaggtcttatgaaatcttgcagtatattgcctcacagtcaccgactcaaagacaggcacatcagcagcagcagcgccccaccaccgccacggactcggcaggtcaaccctgcacctccacctattcccgcaccctccgcgcctccgatgccaccacagcctgcccaagcccaagttcctcccactccaccaaggcccctagttccagtggttcctcctggcgcagtgcctcctgccccgccaccaactgctcctgaagccaccgccaccaacggtcttcaggacaccgaaaccatgcaggtcgacccacctcgtgcttcactgagcggcccaccgccaccactaccacctgaggagacgctcatcgaggaggcgatccggctgacacggggccggctcaggaggcgcttggctgggggatctggaccaccgcaaaattagcgtcgatcaagatttccatctcacgcgaattgcaccacactggtctggttcttggtgattgactgagaagagggggaatgctgagttggttgaacagagtttgggtttcctcgcatgcgttctccgttgtacgaactggaaccggtttggtctcgaattgtgaatagtatcccagaaacagaagtggatgatcaattcaattcacagggtagcgctaggaaatatggttgggaaccattttatgcaagacgcgcattcgcgacatgtctgtatccatgagcatttagcaacgaggatactactggtcacagtagtgtagtttggaattccaaatgcgaagaacaaaaaagaacagcgccatgtatgtgctgcatacattggtaggtaacgactactatgcaattagtccttannnnnnnnnnnnnnnnnnnnnnnnnnnnnnnnnnnnnnnnnnnnnnnnn

SEQ ID NO: 2703 - DNA, 371 bp, Zea mays
  Peptide Sequence Number=SeqID_9008
  Probeset Number=SeqID_17106
cttccgccatcggcgcacgggctggctcaccagactcagtaggcgcaggtgcagccaagcagccttcaccggtttccgggggcagtgccgggtcgaccttagcctcgggcagcaccgggttgacctctgcctcgggccacgcgccattcagatgcccaaagtcttcaacttcctcggcacacaccatatgctccctcgcccggtcagaccgctccctaaccgcctctcgaccataaggaccccggacagtgtccggtgcgccaggctggcgtctgtcaactggctgctctcgggaattcaacggcggtgtacggctataaatcaccggactgtccggtggtgcaccggactgtccggtgagccaacagtcg

SEQ ID NO: 2704 - DNA, 367 bp, Zea mays
  Probeset Number=SeqID_17107
atgattaccctgctggtgtttgtcgcgggttacctgttctgcctcagccagtttcccggctttgcctcaacacgggtgatttgcaacatcctcactgataatgcgtttctcggcatcatcgccgtcggcatgacgtttgtgattttgtccggcggcatcgatctgtccgttggcgcggtgatcgccttcaccggcgtgttcctggcgcgcatcatcggcgactaccatgtcgatccgctgctggcctttgcgctgattctggcggcaggcgcactgtttggtgccatgatgggctggctgattgatgcgttaaaaatcccggcctttatcatcacgctcgccgggatgtttttcctgcgcggctgca

SEQ ID NO: 2705 - DNA, 727 bp, Zea mays
  Peptide Sequence Number=SeqID_9009
  Probeset Number=SeqID_17108
tgcagcaggctgcgctccgccggcgctcttcaccgccgtcccggggaagacgtaccgcctccgcgtcggcagcctcacgtcgctgtcggcgctcaacttcgcgattgagggccattccatgacggtggtggaggccgacggccactacgtgaggcccgtcgtcgtggacagcctctacatctactccggcgagtcctactccgtgctgctcacggccgaccaggacccgtcccggaactactgggccgcgtcccacgtcgtggcccgggagcgcaacacgacgagcgccatggccatcctcagctacgccggcaacgacccgcgggcgccgccgcccacgccgcggccggagggacccgcatgggacgacgcgaggccccggctggagcagagcaggtccctcgccgtcgcgcacccggaccacgtggtgcctgtgccgcccaggcccgaccgcgcgctcctcctcctcaacacgcagaaccggatcgggggtcacatcaggtgggccatcaacggcgtctccctcgcgttcccggcgacgccgtacctcgtgtccatcaagagaggcctgcggggcgcgtacgacgaccagcgtcccccgccggacacgtacgactacaggagctacgacatcgcgtcgccgccgacggcgaacgggacggtggccagcaaggtgtaccgcctggcgctggggtccgtggtggacgtggtgctgcaggtcgactaa

SEQ ID NO: 2706 - DNA, 648 bp, Zea mays
  Peptide Sequence Number=SeqID_9010
  Probeset Number=SeqID_17109
gagacggtgtgccagatctcggacgcggaaaggtctgcggagagctgcgtgacctatgttggcgtggagctgaggcagaggagtgtctccgggggcgggagggtggtggaagcgtccgcggatgatgggaccagcagctacggagacggtgtgcctctctccatggacaccgcagctgtgctcgacgccttctccgccgcgccgcgccaccagctccgcccgacagcctggtgcaaatccacacgcttcacgtcccaggcgtgccgcgccaccgccccattcgcccgcgccgactggcaggccacctgcaccatccttgccagcaacagcacgggcggcggcggccacaatgccagcagcaacacgcagccagcgccgcgggtcaatggccagaagcccccgccagccctggaggcgacgccgacgccgacgctggacgagatggatctagtgcccatgtccaatctcccccgcccgctcagcatcagcgacctgtacccggcgcccatgcacgggtcgcagctccacgtggcgtaccagggcgtgccaggcgcctacagcaaggcggccgccgccaaggcctacccgggctacgacgccatcccctgcgaccagttcgaggtggccttccaggccatcgagctctag

SEQ ID NO: 2707 - DNA, 224 bp, Zea mays
  Peptide Sequence Number=SeqID_9011
  Probeset Number=SeqID_17110
atgctgcaccgaaccgtgcacctggcgcagtggaacgggcggcatcaacggttggtgagggggaaggagctgttcgagacaaggaccactgtgctcatgtccctcttcttgctgaccatggttgctcaccaggatggacatgagggacgcctgcctaacgcccttgatcaacgttctgagcgccggacgggggctccaggagaaagggccaaacctgaccacag

SEQ ID NO: 2708 - DNA, 249 bp, Zea mays
  Probeset Number=SeqID_17111
ttgttcttggtgattcttaagtttttctgtttgcaaactcaaaacgtaagaggtatttccatttttttccgaagccttcaaaggtaaactggaccgcaatgggcagaaagccaacccaaaaaggacattgctcatcaagctgctaagaagaggagacgggctgccaaaaatccttacttttgggccaatggtggtgccaccctgggagtgatcccgggtaagagacccccgaagcctggaggtctagat

SEQ ID NO: 2709 - DNA, 425 bp, Zea mays
  Peptide Sequence Number=SeqID_9012
  Probeset Number=SeqID_17112
atgacagccctcctcatcgacggcaacgccctctcgaagaccttgcgcgcgcaggccgccgaacgtgccgccgccctgaccgcacgcggccaccagcccggtctcgcggtgatcctcgtcggcgcgaacccggcgagcgaagtctacgtgcgcaacaagatcaaggcgtgcgaggacaacggtttcttctcgcagaaggacgcgtacccggacacgctgtcggaagccgacctgctcgcgcgcatcgacgaactgaaccgcgacccgaagatccacggcatcctcgtgcagctgccgctgcccgcgcacatcgacagccacaaggtgatcgaggcgatcgcgcccgagaaggacgtcgacggcttccacgtcgcgaacgcgggcgcgctgatgacgggcaagccgctgttccgcccgtgcacgcc

SEQ ID NO: 2710 - DNA, 202 bp, Zea mays
  Peptide Sequence Number=SeqID_9013
  Probeset Number=SeqID_17113
tgcatgcctgcagaggcttgctgataattggcataggatattacacacgacaacatgtccaagtagtccttaacttgattgatttagctggtagtgagcgtcttgctaaatgtggctccacaggtgaacttagaaagagtgaaccaatgatttgtcatagactacaatcattaactctctttttatactaaatccatattca

SEQ ID NO: 2711 - DNA, 469 bp, Zea mays
  misc_feature (458)..(458): n is a, c, g, or t
  Probeset Number=SeqID_17114
tcgaggccggccgggccgggacttacctggacggggtcgactggggatcaagaagtcctgtggcctaggtcagtggcccgcattgcacatggcgggtgcgctggcttaccatctccccaagtgggagagtggacgtcataatttgtggtagagggggtacgcgttcgcgcggcccctgccaaatctgaaaaatttaatttaggtcctttgtcagttaaaagttgattgtttctcgaattgttgtttactgtactgtaagagtttgaaatctgttaaatttaaattaggtcctttgtcagttgaaagtttggtcgcgacttgcattattgttcactgtactgtttaaagagtttgaatagagaatatctactcataatagcttaacaatcttgactagtggcccctagggcctttgacaccgatattcatttcggctgtgtgattcagcgctttcattntcaggagatcc

SEQ ID NO: 2712 - DNA, 829 bp, Zea mays
  Peptide Sequence Number=SeqID_9014
  Probeset Number=SeqID_17115
ggattaatgagttgcttgggaatattgatgcagacattggtgatcctcaagttgggacacaaattagttcatgacagacattgcagaggctactttggttatgtcaagtctgttaagaatgtgagagccatcttcatgtcttgtaagcaagacaacccttgtgaagatttttttgattggagagtttgagaagaagtatgaacggtttgaaaacatcccaattgtgctttgtgggaacgaggttcacctgaagaatagacaggtgaaagcaaaacaagtgacgttccacaagaaaaaaagcctgtggtactatgactcagcaactacaactttgagaagcctttcttgtaccttgcccagaagcttgttggtgattccaattgtctctttgttgaaactcgtgctctcgctcctcttgatgtcacaattgacattgctacccagcaacagcatgaagccgaactggcaactgcgacaacccaaccattaccaggatggtgcgactctgcgtaggaatttatttattgatcctttgacatacaaggggaacacattgttttagcgttacacataaaaaatatatacaagagtaccttgatcgtattatggaaacaattatatgaaatagattatgtttattttatatttattgatttttgaaattttgtcattaaatctttttgttaaattttatataatacactattaggtgagtgcgtttcaggcttgggtttttctttgatgtcattccggcataatcgtataatacatatttgtatatataagttattgagatattatatattctagatgtaatgcaaaaaaaaaa

SEQ ID NO: 2713 - DNA, 996 bp, Zea mays
  Peptide Sequence Number=SeqID_9015
  Probeset Number=SeqID_17116
atggtggccttcaatggcggcacctactccgtccccaacccgaccgcttcactgacgacctgtgtgttcctctctgcgcaccgtgtcgcctgcatgttccccgtcatctgcgctgaggtgtgcaacatggtaggccggctgggccgcctagccgcgggtggcggcgcacgcgtccagctgagccaatgcctattcgagctctccctcggcgtgctcatggagaccattgcgcagatcaagactttccgctccgaggcgtgcgccgcagacactgacgtgtcgcaggaggtgagcgagttgacacggatctccgaagaggtcatgctctacctcggcacgaccaacctgtgggactacctgccgttcctgcggtggttcgacgtgttcggcgtgaggcacaagctcatggccgccgtgaggtggagggacgtgttcctgtggctgctcatcgacggagagcgccggaggatggacgatgacggcaacggcgagaagaagagcatgactgtcgtgatgctctctttgcagaggttgaagttggagcagtacacagatatcatggtcatggcgctctgctgggacttgtttggcgccggaacagagatcacatcgatcacgacagaatgggccacgtcgcttctgctgaaccacccggaggccctgaagaaggcacagacagagatcaacgcggtggtgggcagctcccacctgatcaccgccgatgacatgcgctgcctcggctacctgcactgcatcatcaacgagaccctgcgcatgtactcgaccgctatgctgttcctaccgcacgagtcggtggtggactgcaaggtcgacggctacgacggtaccctctcggcctctccatggacgatggcctggtcgatggactcagaaaatgtgagaaatggaagtggcaggacatatttgcatcgaaagaaacaaaaacaagttcatggttccacggattcattgggcaagcaacgaaaccagcaatga

SEQ ID NO: 2714 - DNA, 283 bp, Zea mays
  Peptide Sequence Number=SeqID_9016
  Probeset Number=SeqID_17117
atgcggaaaactggggagcagcttacggagtcgaggagggagagcgcctcgcgggtggcctggtgctcgcggccgccgtcgcaagtgatgaagaagcctgcacgccggggcgcagtcgctgctgttaggtctagggacgcacgcacgggtgacggcgcgccggtctgctcgctcgccggcctgctcgcccgcgccggtctgctcgcccgcgccggcctcggccctctcaagcaccgccgcctagtcgtccgtgcaggcctcgcgaccttaatcggcgctgcct

SEQ ID NO: 2715 - DNA, 465 bp, Zea mays
  Probeset Number=SeqID_17118
cccctgggctctgcgccggtcggactccgtgtaggtataaatgacccggcgccccttcttcctcagcactcgaggttctcaaaccaacactataagcgccattatcggaagaagacgggatgggaggtctcggacgagcgctttgctacccgaaaactcgcatcgcgctctggtgggggctgctctgcgtctccgaaatccaccacacgccagccccagcgcgcgtcaacgaacaagcagagacctcgctccaccggatctcgcaggcaaccattccctccggcgagcttcatcaaggtcaaagaatctatacttgaatacaacgtactccctgtgcgagtgttcgtcttgggcctcggccggccgtctgatgctggcgtggcacctaaaccctcccccccccccccccccgagtatggtgagcatggggccgtgcttaggggcggagccaggattgcgatataa

SEQ ID NO: 2716 - DNA, 368 bp, Zea mays
  Peptide Sequence Number=SeqID_9017
  Probeset Number=SeqID_17119
gaggttgtgggaccggctttggagaagctgaatccgacatgggtgcgggcctgtataaacggcagacgttgcggcgggccgaccggccgtgggtggcagccacgccgcggacttttggagcgatcccatcatcgcccgccctttttggggccgccacgacccagcccactaccgcacgctcgcgtggagcggtcagcaccagaggcgaccgggtcagcccatgcgtcttcgccgtccgtccgtccgtccgtcacaagggccgctgtgcgagcatcggaatcttgcaaccaccgtgttgcagctgggaggatttgccgatccacagaacgagaggtgcgaacagggagtaccatgccgccaacactgag

SEQ ID NO: 2717 - DNA, 281 bp, Zea mays
  Probeset Number=SeqID_17120
atgctggcgaaaaacccatatgttgtcgcgcgcgccagcgggagggcgaggcggcggccttggggcaggagcagcaactacaagacgaagttgtgcgagatcttcgtgaagggtgcttgtacttccggcgaccggtgccacttcgcccatggcgagaatgagcaacggagaagttaccagggcagattacttgagtgatcaattttagaactgacggagtcctcgatagagcagcagcgtgggccgatctccgcgcatacacggtgttatcgcgtttcaga

SEQ ID NO: 2718 - DNA, 292 bp, Zea mays
  Peptide Sequence Number=SeqID_9018
  Probeset Number=SeqID_17121
cgtgaatctactcaatttccctctttcttagtcctttttttgttgcatttatgtgacagaccttgtgttggcggcttccaaatatctggggtctatgaaagtaatatctgaggcaagccttgcccctgcattttgtagagaggatgcgtcaaacccaggacctttgacctttggctcggtggaaaagcttccgaccactacgccaggcctgtccttcgcatttatgacgtgccaatccaatagaattccttattttatttccccaaaaagtcctgtttctttcagtttttgg

SEQ ID NO: 2719 - DNA, 539 bp, Zea mays
  Probeset Number=SeqID_17122
atgaacataccgtcgttccaggcgggcacccgcacctcgccgagggaggggggcaacctcaaccggagcttccctggccggcccgatggcagcgtgacggaaaagatcgccgactatttccgccgcaccctgctgccgttggccgatatcgtcctggacatccactccggtggtcgcaccctcgacttcctgccgttcgctgcatgccatgtgctgcccgacaaggcccagcaggcccgttgtgaagctggcatgcaggccttcgccgcgccctacagcatgcgcatgctcgagctggatgcgcaggcgatgtacgacaccgcggcagaagagcagggcaaggtgttcatcaccaccgaactgggcggtggtggcacctccacggcgaaaagcgtggccctggcggagcgcggcgtgcgcaatgtgctgattcacgccggcatcctcgccggcgaactggagcagggcgagacaaccctgctggacatgcccgatggcgattgcttcatcgccagcgagcacgacggattgctggagat

SEQ ID NO: 2720 - DNA, 1783 bp, Zea mays
  misc_feature (1)..(3): n is a, c, g, or t
  misc_feature (1728)..(1783): n is a, c, g, or t
  Peptide Sequence Number=SeqID_9019
  Probeset Number=SeqID_17123
nnngccgggaaccctagctcatttctttcattctctccagccgaaacatctggccggtggcgtttctctttgccgcacagccgccctatggcatgctgttgtccttcgctccctcgtttgtttttggttctagcatctacagtcgaccatcttttctcggttggtactttacgcatggccatctttgccttggtgttgcacctactctctgtttctattttctttcacttcttcaacaattttctagccaacgtgttctctgtacacgtccgcttgcaatggaggtgcgtgctgcatacatgcgcatgctccttttctctctgtttgtgttttttttttctttttttttcttttcttttctttttcttcagctgcgcaagacataccggccgccagggagatttgctcctggccgaacgcgcccgagtgcctcggtacggccgttcctgcgcggcagggcgggaccccgcggactctcccgccggcgagtgcgtcccctaggttgggcacgccgccgtcggtggtccctgccagccggtagttggcaaccgaagcttcatcaagcagagagtatcatatctacttcacgatgaaccgcctcgctttaggtgggatcataactagtggcattgtcatcatcctggtcatgaaattcgtcaccagatggatcgaggtgacacgagaatggcagatggagcgcgcgcggctgcaggccttggagatgcaggcggcggcggcggcggctggcgcgccaatgatccagcagccggcggcgaatggctcggcggcgccgccttacgctattgctgccaaccacgtcgtggagatgggcgccgtgaaccggttcctggacgacatactgcgggagaagcccgcgcggttcacgccggagaacctccgcgagttcactcgcaactacgcggagcggctcgggtccggcggattcggcgtggtgtaccgcggcgcgttcccgaacggggtgcaggtggccgtcaagatcctcaacagcacgctggaccggcgcgccgaggagcagttcatggcggaggtgggcaccgcggggcgcacctaccacatcaacctcgtccgcctctacggcttctgcttcgacgccacgaccaaggcgctggtgtacgaatacctcgagaagggctcgctggaccgcgtgctcttcgacctcgagggcgacgcgctcggcttcgacgcgctgtccggcatcgtggccggcacggcgcgcggggtgcggtacctgcacgaggagtgccagcaccggatcatccactacgacatcaagcccggcaacgtgctgctctgaagctcccacaccccgctcaacctgacatcaagccagtgaactctgcaaaatttttgcaccaaagtcacgtggaacagaaagtagctgactccaaaccaattgcggtgacagtcgacgctgagaagcctgagaaaaccgctgctgtaatgggcaccacagtgcacaggtctatcaggttctcatatcggaaggcaggccttgctttgtgatcaaatcctctccgcttgagatgcacgtggccttcctggttgctttttcttttttggcaacaaccttcctggttgctttgtgtgatggtcagaaaacatagaagaataacctgcaactggagtgacagaatttcttttccccgcagtagacaggtgtgcgttatttggttggaattatctccagtccactatcaattttttttnnnnnnnnnnnnnnnnnnnnnnnnnnnnnnnnnnnnnnnnnnnnnnnnnnnnnnnn

SEQ ID NO: 2721 - DNA, 337 bp, Zea mays
  misc_feature (119)..(119): n is a, c, g, or t
  Peptide Sequence Number=SeqID_9020
  Probeset Number=SeqID_17124
gagctcgcgcgccaggggcatgtgggatcgagcagggagggagcacgcgtgccatgaggagctcggcgctgcaaaaattcgagcagagggcagggcggctaggcatacggcggccatgnctgtgatgtgcagagtgcaggggggcgtcgagcaggaaatcgtggcgccggaggagcagggatggtcgactgacgagctggagcaggagcatcgccggcgagcttgccatgggagggagaatcaaggggcgcgccatggggaagacgccatgggggcgagctcggggcagggagatccggcgcttggggaagagagagagggcgacacggccaggtag

SEQ ID NO: 2722 - DNA, 384 bp, Zea mays
  Probeset Number=SeqID_17125
cccagcatcgacaccgcgccggcccgtgccaactccggagtcgcggatgactccgtgttcaagaccatcgaacccgccggttacgacgaatccaagctgcacgccacagccgtcctcgacgtgctgccccgtgtgcacacgttgggcaaggcacaatgcgcctcctatgccgaccgcctctatgcctccggcacctgcaccgctcccgaccatgcaacgttttggagaggaagcgttccggtcctagtcgacgccatgaagctacaagagcgggacctcgacgcgtacgccaggaagcgctggttcaccatgggcttcctccataaggccgccgccattcccagggggtcggtgccggtgaggagcctctgcatggtgacccag

SEQ ID NO: 2723 - DNA, 248 bp, Zea mays
  misc_feature (202)..(202): n is a, c, g, or t
  Peptide Sequence Number=SeqID_9021
  Probeset Number=SeqID_17126
ctgcagaggaggaaggaagaggaccgacaaagatggccgcagcgaagcgtggtgcttgacatcgagggcacgacgagctccatctcgttcgtgacggacgtgctcttccctacgcccgcgacaacgtgcgcacgcacctggacgccacctacttcacccgcgagaccaggacgacatcgccctgctgcgcgctcaggtcagncttcccgtgtgcattgcatcgctcgacagccaatgagcagatcgag

SEQ ID NO: 2724 - DNA, 277 bp, Zea mays
  Peptide Sequence Number=SeqID_9022
  Probeset Number=SeqID_17127
ctttggcgaccttcttgaaccgggccggccagaatgggccatggaccaagggcaccggtttgccgagggcttccttcggtggtgtgaacttcggggcaagggacggcccgaacttggcaccggtggggttcccgaggttaaacggctgggcgcgcttggggaagacaagatggacttctgtgccaacattaacgggcggggggggatggacaagttcttcttcggctttcacagggaacccctgtgagagagcgagagcgtttgagacacaccaccg

SEQ ID NO: 2725 - DNA, 306 bp, Zea mays
  Peptide Sequence Number=SeqID_9023
  Probeset Number=SeqID_17128
atgagtgtgcttccggtatttgtcgtattcgggctgtcttttccgcccatcttcattgaactactggtttcgctggcgctgttctggctggtgaaacgcgtgctgacgcccagcgggatttacgatctggtgtggcacccggcactttttaacacagcgctaaaaatcgcgcgttacgccattacgctcctgctggttatcatcgctgttattatcatcttccgcgcctgggtgttctataccgaagtcgcgtggacgcgtgaacgccaattcttcgccgacgtggtggggatctccccggacgtg

SEQ ID NO: 2726 - DNA, 252 bp, Zea mays
  Peptide Sequence Number=SeqID_9024
  Probeset Number=SeqID_17129
atgcacgacgacggtgaaacaggcgtcgaaacgtatgacgacaccacgaggccgaagaatgagatccggctcagcctgtctcttgggacgaagcttcggaaatgggggagacccctgaagaaagaacgcatcgagaacaacgcaactcccaccgccacgatcatcgccaagctcaggaacgcgagcgggagtaggcagaacaagacactcttgtcacacccggttttagaaggcaaaccgaatgcgaaccat

SEQ ID NO: 2727 - DNA, 238 bp, Zea mays
  Peptide Sequence Number=SeqID_9025
  Probeset Number=SeqID_17130
atctcattgtctgatttctgcattccattttgtgttgttattggttggatgatgggacaaaggatggacttgaattttcagctatttgagacagcaactctcttcataacagtgcttgtggtagcatttatgctacaggtaggttcttaaggtggatattaataaaaacttttataaaatgtgtctgttgttgcctgttggtaaggtttattgatgccatcatatggactgtgaaaat

SEQ ID NO: 2728 - DNA, 216 bp, Zea mays
  Peptide Sequence Number=SeqID_9026
  Probeset Number=SeqID_17131
atggacaccgaaccgggacctggcagtggcactggcacggtggcaccgaccgcggcgctgactgcaagaaggcccatctgcttgtggcccagagaagcccacagtgctcagcgcgacagcggcctccccacccccgggggccgtagcctccgctccacctgcgtgcgccgtcatcgccagggctccccacccccgcgcgccacgacctccacaggg

SEQ ID NO: 2729 - DNA, 367 bp, Zea mays
  Probeset Number=SeqID_17132
catcctccaagacgacagattctgcaccaagatctgcaactatgggctgtcgtatatcatctggagggacgagacccagttggtgacgaggatacgaggcacccgtgtgaacctgactcccgtgtggctgacgtcacagatcaccaagaaggcccacgagtacagcttcagggtggccgcaatggaggacgatagcaggtggaagcacctcaactatgtccagacagatgacggtgttcatctcatacaagttctgcctgagaaagcaagggacgggcagatggtagatctggtccaggctaatggcaaccacatgctgggtcttcataaggaaggagcgattcaaatggtgaagctcaccatgtga

SEQ ID NO: 2730 - DNA, 270 bp, Zea mays
  Peptide Sequence Number=SeqID_9027
  Probeset Number=SeqID_17133
accagcactttatgcaactcaaaagctagtagaaatgtggaatcaaggcacactgcacgcatgctagcttgacactggacgcacgcatacaacgtagggactggaaaaaccgtgacgttacccaacatagttgatttgctacacatccatattctaccagctgaagtaataccaaacaagctctgaccgatcagacttcccaacaattgcgcaacctgaatggcaaatggtgcctgatgcggaatccatccatacgcatttgtgcggtat

SEQ ID NO: 2731 - DNA, 244 bp, Zea mays
  Peptide Sequence Number=SeqID_9028
  Probeset Number=SeqID_17134
aggaggttgatcctcgggccgtgtgacgtcgcgcgggtgggccgccccttcggtgccccgggcgcccgaagtgggagcggcgctgaagccggcagtggggccaacctcgatggtaccttcggggatcgaggctcgagagacctccccacaggcacgattgatcatggcccgtacaaacggaggcatggctcgaccggtctggctccccggaaggccctcaagacagcgccggcttctgcagcca

SEQ ID NO: 2732 - DNA, 500 bp, Zea mays
  Probeset Number=SeqID_17135
atgactagctgtttcatcgaagcgcgcaacatcggcaaacgcttcggcgcgttaacggcgcttagccaggtcaatctgtcgatccatcgcggtgaagtgctggcgctgctgggtgacaacggcgcgggcaaatcgacctttaccaaagtgttatccggcgcgtacagcgccagcgacggtgagctgtgggtagacggcagggcggtgaaattcacctcgccacgccaggccgccgagcacggtattgccaccatctatcaggagctggcgctggcagagaatctgtcgattgccgagaacgtgtttcttggccgcgagctgaagcgccgcgtgctcggcattccgtttctgcgtcgccgcgcgatgcgcgaaacggtggatcgactgctgaccgagctcgatgcgcacatttccgatgccgaagcggcggtcggcagtctgtccggcggccagcgccaggcagtagcgaactccgcgcactcaatctcaacgcgcagctg

SEQ ID NO: 2733 - DNA, 270 bp, Zea mays
  Peptide Sequence Number=SeqID_9029
  Probeset Number=SeqID_17136
cccggaatggaagaaggtcgcaattgctatgcagatgagcattatctgccgaccctattccacatgatggaccctgctggcattgcaaactggtcagtcacctacgttgactggtctgaaggaaagtggcatcccagatcttttcgtgctaaggatgtcacttatgaacgcctgaagaatatgactgtatgtttacctttattttgtcattttaacatgataaatatgatccttttatgcctctaacttccgttttgctgcaggcatgca

SEQ ID NO: 2734 - DNA, 246 bp, Zea mays
  Peptide Sequence Number=SeqID_9030
  Probeset Number=SeqID_17137
tgtctggggtgtatttttggtggccagaaaggaaggagcaatgacaccagttcggcgtggccggtgacgaaccccgtcatgacctgcggtattgcgacgaaggcggggtacccgagcaactttgtcgccgacccgttcctctacgtcgaggtgaggcagaggcactgctgctgcttgttctgccgctcctccccggggtggaactctgcttcgcgtagatgtagggatggtttgcaaattgcctaa

SEQ ID NO: 2735 - DNA, 609 bp, Zea mays
  Peptide Sequence Number=SeqID_9031
  Probeset Number=SeqID_17138
tcgcggacgcgtgggcggacgcgtgggcaagcctagctgacccatctgcgaacataattcttcggtgctgccgacgatgaccgcctcactggtgagatacatgtgacaatcatttgcacaggatcttcacagacctttcagaaatacctttcggcggatccaaagggagcacgtatagtgaaatccatagagactgcagctaccctcgcccataaagcagcagcagctgcagttcaaccggtccctgcttctagttggtctcgaaaactcttctcctgacaagctcatttggtgaaccgtgactcctagtgcattagatgtgcatttagcgaggtgagggcagtccctaaggtgatctactgatatctcgagatttatagcctgcgctagggttcggtagtgggacaataagtttcatgtgcatgtatcgtggctttgctttatgtttttgaggatcaggcggtgaggctgagagaagtgctcagcaactcaacattgaactgttgtagaagatgctttgattgcttttattgctgcgacatgccaacaaccctctgttggattcaaaaaaaaaaaaaaaaaaaaaaaaaaaaaaactcgagagtactt

SEQ ID NO: 2736 - DNA, 380 bp, Zea mays
  Peptide Sequence Number=SeqID_9032
  Probeset Number=SeqID_17139
atgggattaagtcttccttttcttaaccccaacaccattggaggtggttcttttaatcttcctctggggttggttttggaagggcccctaaaaaaaggttaacggtaccagcaaaaaggctccaacagtggggggggcttggccattattgggccacctcccatggttgatgggttctaagtcacctaataaagccttgggtgctttggctgaaaagcatggaccctggttcaccatcaagctcggtgccaagaaggctttggtagttagcgactgggaaatggctagggaatgcttcacaacgaacgacgttgcagtttccgttcgccccaagcttctcgtcgctgagctcatgtgctacaacaacgccatgttgctcg

SEQ ID NO: 2737 - DNA, 976 bp, Zea mays
  Peptide Sequence Number=SeqID_9033
  Probeset Number=SeqID_17140
atggacgaagcagagccagtgaagaagacgatgctaagagtgagggggtttgacgtggagagggacctccgggctgtggaggagctggagcgtctgtgccaggtcggcctgtctggcgaccaaggctctgaccctgtcgccgaccttgatggcggcgcaaagaagacgaggagcagcaagaagaagaaaggcatgtcgctctacgtcgagcagatcggtgacccgtttgcccgggtgcgccatgcgacggacaacgtgatgctggttgctgagtatggggagaaagacgaggtcgtcggagtgatcaaggcgtgcaccaggatggtgagcagagggaagaagcagcaaagcttcagcggcagctcaaagcagtttgtcaaggtggcatgccttcttggcctcagggtgtccccctcccacagcgcgctgacaggcccttcgacgatcgtgtccgcgtgcaggcgcctcggggtcgcgacggagctggtccggcgtgccgaggcgtggtgcgcggcgcgcggcgcggcgtacgccaccatggccaccaccgagtccaacgcggcgtcgctggcgctcttcaccggccgcttcgcgtacgcgccgttccggcggccggcgttcctcggccgccccgtgcaccgccaccgggtgcgcgtcccgcgcgcgcaccgcgtgctgcgcctgcccccgccgctcgcctcggccgcctacgccgcgctgctcccgccctcggccgccgagttcctccccgccgacctcccggctctgctcaaccacaagctcaccctcggcacgtacctcgccatccagcgcggcggccccgaggagccggcgcgggcgccgtcgttcgcgatgctcagcgtctgggacgccacgcgctccctccgcctccgcgtcggcggcgcgcccgcgctcctccgcgcgtccctggccgcggcgcgcgcgctcgaccgccacgtgccgtggctgcaggtcg

SEQ ID NO: 2738 - DNA, 260 bp, Zea mays
  Peptide Sequence Number=SeqID_9034
  Probeset Number=SeqID_17141
ctgcatacatgtttgctcttctgatcctatagtgaaattttcgggaacagcatcagtggaccaatcccatcagagttcggtagcctggcgaacctaatcagcctggacctgtccaaaacagcatctcaggagctatacccgcagccctcgagaacgccaagcgtttggatcacaatcgcctgaaggggccgatcccaagggagcttgctgggctgcccaatcttggaattgtgtgagtactatctacgtgagctgtgcag

SEQ ID NO: 2739 - DNA, 507 bp, Zea mays
  Peptide Sequence Number=SeqID_9035
  Probeset Number=SeqID_17142
gctgtggctggtgccctctattgagggccagttggttttgattgtgctgagcggcgtgctgttttttgccttccgccagattcagtacgcgcaggcgacgctgttcatcaccctgctggtgctgctgtgcttcaatctgctgggtgaaggctttgatgtcgccctgccgcgcgtggtggataccttgctcggctgtggcctcgcctggctggcggtggcgtttgtctggcctgactggcgtttccgtcagctgacgacggttgccgatcgcacgctgaatgccaactgtcgttatcttgatgccatcctggaacagtatcatcagggtaaagataaccgtctcgcctaccgtgtggcgcgccgtgacgcgcataacgccgatgcggaactggcgtccgtggtgtctaatatcagcggtgaactgaagcaacagccgccgctgcgcgagaatgcgttccgtctgatgtgcctcaaccactcgttcctcagttacatctcggcgctggg

SEQ ID NO: 2740 - DNA, 660 bp, Zea mays
  Peptide Sequence Number=SeqID_9036
  Probeset Number=SeqID_17143
acgccaactcggtgccggggtacgaggtcatcgacgccatcaaggcccgggtggaggcgtcatgcaacgccaccgtctcctgcgccgacatcctcgcgctcgctgcccgggacgctgtcaaccttctaggcgggccgtcgtggacggtgtacctcggccgccgcgacgcgcggacggcgagccagagcgacgcgaacgccaacctcccggggcccgggtccagcctcgccaccctcgtcaccatgttcggcaacaagggtctgtcggcgcgcgacatgacggcgctgtcgggcgcgcacaccgtcgggcaggcccggtgcgccacgttccgcaaccgcatctacaacgacggcaacatcaacgccaccttcgcgtcgctccggcagcagacctgcccgctggccggcggcgacgccgcgctggcccccatcgacgtccagacccccgaggcgttcgacaacgcctactacaagaacctgatggccaggcaagggctgttccactcggaccaggagtctttcaacggcggctcgcaggacgcgctggtgaagaagtacagcggcaaagctgcccatgtttcaccgccgactttgccaaaggcgattgttaaggattggcgccaatcagcccggttcacggcgaagcaagggaaaagtcaag

SEQ ID NO: 2741 - DNA, 364 bp, Zea mays
  Peptide Sequence Number=SeqID_9037
  Probeset Number=SeqID_17144
ggacctactccctccccatcccccttcctcccaagttctcccgccatggaacacaggtacaaataggacaccgcctctaccatgactccgtagcctccagagatgagagggacacccgcgccgttctgcttatggacgccatttttactctcgcggcgggaccccgggcgcgagtcctgcagcgcgcagcggctcgcatccccggctgcctgtacatctgcctttgggcgccgatgatcgccggccagcagctcccttccaggcatttgttttgcgtggacgcgtggatctccaacggcagcgtcgctcgcgcaacggcggtgtttgatgagtaccggagagcgctctgcggcatcgtgagcgg

SEQ ID NO: 2742 - DNA, 631 bp, Zea mays
  Peptide Sequence Number=SeqID_9038
  Probeset Number=SeqID_17145
tgcagcggtacggcgctcacgctggtgagcagcggcagctgtgtactgctgcgctgggacgaaaacagtaacggacgctgggaaggcgtcggtcacagtgaaagcgattattacggctatcgtctgcgcaacggacagctggagatgcagcgcggcgtggacgagtgcaacagcaacggctgggagcgcatcaccgatccggcattcctcaccctcagcaccttccgggttgagcctggccgccacggcgggccgccagcaggcagagctgacgatgatggcggaggggctgaatctgtgaagcagcgcggcaacagcacgctaggcatggtcgtgatgttactgctgatgggcgggctcacgctgcacgccgcgcgcacgcaactggcgcagggcatggcgctggtcgccgacgagcagcagcatcagcaggatttctggcaggcgcaggccgctttaacgtggggccggcagcaaaactggccgcaggccgcgggctggcagtgtcagaccgctctgaccgacgcgtggcaaagctgtctgctgcggcaggaggagaatcatggcttattattggcgcgcggcaccggacgtgcgctcgtgctctatcagtgggtgtcgctgcgcaacg

SEQ ID NO: 2743 - DNA, 322 bp, Zea mays
  misc_feature (1)..(1): n is a, c, g, or t
  misc_feature (3)..(4): n is a, c, g, or t
  Peptide Sequence Number=SeqID_9039
  Probeset Number=SeqID_17146
ncnnggccgggggggccgctttggcggcgaagagagcgcggcggcgccctccgattacactcacagccagctgggacagctggccgaagtgattcgtcaggcaatggcgaaagagaagcactggattcagggcaacaccgtgaccgtgacggacagcctcggcctggcgcgcggcggtgcggccaacgaacgtgaatggccgggggtaatcaaccggctggtgtcggcggccgataaacacctttacgttgccaagcgcaacggccgcaatcagacctcaccggcaatcgcgccgcgcagcatggcgcatgacgtggcctga

SEQ ID NO: 2744 - DNA, 369 bp, Zea mays
  Probeset Number=SeqID_17147
tgcagccggtgcagctggaggataaaaccgtccggcgggtcaatctgggctcgttgcgtcgctggaagcagagcgatgtgatcgccggcgatcaggtcacgctgtcgctggccggtctgggtattccgcggctggaacgggtgatctggcgcgtggcgcagcgcgactatccgtcgccgccgcaggaagatgcattcaatccgctgagctgcctgcacttcagcgcagggtgtcgcgcgcagtttctgtcgcgcctcagttggctgagtcacaagtcagtgctggatattgctggcatgcagatcagtagctggcagcgtctgctggacggtggcagcatcaaccacctgttctcctggctgacgctca

SEQ ID NO: 2745 - DNA, 441 bp, Zea mays
  Peptide Sequence Number=SeqID_9040
  Probeset Number=SeqID_17148
ctcggtacccctggagatagtgaccgccttgatgcgctgctggatcgtcttgaaaaaggtgagacgctgtcatctgaggatcagggctggctcgacgtctccctggatcgcattgacgaactgatggaacagcttggcattgagatggacgaagaagaggacaaggaggcggaagaagatatgtaccgcctgcttaaaggagtaagcatgtcagcaatgcagcttgagtgggacccggcgttaattgaaaagtataactatgccgggccgcgctacacgtcttatcccaccgcattagcgttcagcgataactttaccgccgatgacttcagacgtgcgactgagcgctatccacaacgttcgttatcgctgtatatccacatcccgttcagtcatcgcctgtgctatttctgtggctgcaataagattgtcacgcgtcag

SEQ ID NO: 2746 - DNA, 614 bp, Zea mays
  Peptide Sequence Number=SeqID_9041
  Probeset Number=SeqID_17149
atgctgacgctgctcagcccctgtaccttaccgattattccttttatatttgccagcgtacgcggccgtcgcggacagttgctggcgctgctgagcggcatggtcctgatgttcacgctggtggcgctgctggtatcgcttaccagccactgggtcagtcaggtcacccgcattggtcgcgacctggcgctgctgttcctggcgatagccgcactgacgttaatctccacacgcatcgcccaacgcgttacccggccgtttgtcgcgctgggtaatcgcctcaacgatgccagccagcgacgtagcggggtgctcgctgcgctgctggcgggcctggcaaccggtctgctgtggtcgccctgtgccggaccggtgctgggcgcgatcctcagcctggccgtcgtgggcgatcatccactgtcggttggcgtgttgctgctggcgtatggcagcggtgccgcgctgatgctggcgctgctctatttcgccggacgctcgctggtagcgcgactgcgtccggggctggcgatgagtgcgcggctgcgtcaggcggcgggcgtgctgatgcttgcctcggtgggcgtgattgttaccggctcacagagccagctgca

SEQ ID NO: 2747 - DNA, 917 bp, Zea mays
  misc_feature (1)..(246): n is a, c, g, or t
  misc_feature (847)..(917): n is a, c, g, or t
  Peptide Sequence Number=SeqID_9042
  Probeset Number=SeqID_17150
nnnnnnnnnnnnnnnnnnnnnnnnnnnnnnnnnnnnnnnnnnnnnnnnnnnnnnnnnnnnnnnnnnnnnnnnnnnnnnnnnnnnnnnnnnnnnnnnnnnnnnnnnnnnnnnnnnnnnnnnnnnnnnnnnnnnnnnnnnnnnnnnnnnnnnnnnnnnnnnnnnnnnnnnnnnnnnnnnnnnnnnnnnnnnnnnnnnnnnnnnnnnnnnnnnnnnnnnnnnnnnnnnnnnnnnnnnnnnnnnnnnnnncatcaacaagaggaggaggaacgagcagttcagggtgattggtagcatctccggccacctgttcgcggggttgcaaggcctgctcaaggagcttgcctgcatcgacaccaacttgaccaggacctacaaggcctcggatgaagacggtgacgttgcggagctgtacatgtacaagtggacgactctcctgatcccgcccaccaccaggcgggggcagcaacctggtcggcgtcgccgccggcatctcctacgccatcaacagcgggtaccagtcgtggggcccgctcttcggcaagctcttcttcgccttctgggtcatcgtccacctgtacccgttcctcaagggcctcatgggggttcgtaaggggccccgaccatcgtcgtcgtctgggccatcctgctggcgtccatcttctccttgctgtgggttcgcatcgaccccttcaccacccgcgtcactggcccggatacccagacgtgtggcatcaactgctagggaagtggaaggtttgtactttgtagaaacggaggaataccacgtgccatctgttgtctgttaagttatatatatataagcagcaagtggcgttatttacagctnnnnnnnnnnnnnnnnnnnnnnnnnnnnnnnnnnnnnnnnnnnnnnnnnnnnnnnnnnnnnnnnnnnnnnn

SEQ ID NO: 2748 - DNA, 410 bp, Zea mays
  misc_feature (187)..(187): n is a, c, g, or t
  misc_feature (225)..(225): n is a, c, g, or t
  Peptide Sequence Number=SeqID_9043
  Probeset Number=SeqID_17151
gacctgcagccgccgctctcggcgcgacatgggcagcgacgggggactccatcaaggcatcaggattcgggctatgggtggcagagtcgctgcggaggctcggatggcccgacgacaccgtcgtgttcgcgctcgcgacgctgccggtgatcgagctgcggggggcgatcccgttgggtattggtcngacagatccatggctccacagatccagcaccatccagncacgtgaatcatgtttcttgtactatggcccgagatcgcgtgaatcatggagctggatgaggttgctgttaccaccggagaggaagacgatacagtgcttctggacatgtgagtcatctacaaccgctttgattctctccctccacgatccgaccggcaacaaggaggagcaccagtggcaatga

SEQ ID NO: 2749 - DNA, 246 bp, Zea mays
  Peptide Sequence Number=SeqID_9044
  Probeset Number=SeqID_17152
ggggggccccacaacaaccgccagaattgggccagccgggccggggcccgttacatgccaaaactccgggtttcccggcgcggaatgccccccccgcgaatgcggggaacaaccaccctgcacccccgtttggtccaccccgtcaacctcttcggcggccacaaccgggcaacgcccaagtcggtgctgaagctgatggacgtaaaggatctgacgctagcgcatgtgaagagtcatttgcaggtt

SEQ ID NO: 2750 - DNA, 455 bp, Zea mays
  Peptide Sequence Number=SeqID_9045
  Probeset Number=SeqID_17153
atcgagtggcgcgcagcaggccacagtgtgcacctccctcgccttcccagacggataatgagcgtcgatctccttcgtgctgccgttggtgaagccgctcttgtttatggcactggacgcgcgacggccaccgtagcacctagcctgttttcttacaaatccttcctcgcatgccagtgccacacttacaaatacgcgccctccaaaccgccatgattcactccgattgcgcgccagatcaagccgcgagtcggcggcctcgatgatgccgccgccgccgccgtcctcgtcgtcttcgccctcgcaggacgccggcagccccaagcgagccgcggggcgcaacaagttccgggagacgcggcacccggtgttccgcggcgtgcgccggcgaggccgcgcggggggccggtggcggtgggtgtgcgaggtccgcgttccgggccgccgcggctgca

SEQ ID NO: 2751 - DNA, 678 bp, Zea mays
  Probeset Number=SeqID_17154
atggatgagctgcgctggcagctgggccagacgctggcgctggcgggcgtttcgctgctgctggcgttgctgctgacgctgccgctcggcatctgggccggttgccacgccaacggccggcttgaccgtgcgctgttctggctgaccgccttgctgaaatcggtgccgcattttgcactcggcatgttgctgatcctgctgttcgcgctgcaactcgactggctgccgagcgccggtcacggcgagctgcgccatttcctgttgccggcactgacgctggcattgtcgctgacggctgtcggcgtgcgcgtggtgcgcgaagccacctggcaggtggtgtcgtccggctactatcgctggggagcgcaaaagggactgtcacccgcgcgcctgctgctgcgtcacggcctgcgtaatctgagcgcgccggtgctgacgtggtttggcatgcagtttgtctggctggtggaaggcgtggtggtggtggaaaccctgtttgcgtggccggggatcgggcacgctctggtgcacgccatttttgcgcgtgacgtgccggtaattcaggccagtgccatgacgctcggcctgctgtttgtcctgctgaacatgctggtggatgccggttgtcatctgctcgatccccggggggcgcgcgcatgaagatgacgctttcacgct

SEQ ID NO: 2752 - DNA, 320 bp, Zea mays
  Peptide Sequence Number=SeqID_9046
  Probeset Number=SeqID_17155
ctgcaggcggtgcgccgggcgctcggcgagaaggacgcggacgacggcggcggcgtcccggcggcggccgggatgatggccggcaagggggagaccacgcccaggctgcgggtcatcgaccagtgcctgcggcagcaccgggcgtaccagaccggcgtcgtcctcgagagccagccgtggagaccgcagcgcggcctgccggagcgcgccgtctccatcctccgggcgtggatgttcgagcacttcttgcacccgctaggaagtaacattttaccccgtgctctgttatatatgacaccattaattctgagccatataca

SEQ ID NO: 2753 - DNA, 473 bp, Zea mays
  Peptide Sequence Number=SeqID_9047
  Probeset Number=SeqID_17156
tgaagaagtactacttcaagaagaagacgagcagtagtcatagcagaaatggtaaggatgatgtcaaccacgactccacgattcaacccaggtcgcccctgagcagacagagcctgaccttcgacgccatccccacataccacgctggagctttctacgagatcgaccacgataaattgccccctaaatccccaatccatctgaaatccatacgggtggttaaggtgagcgagtgcacgaacctggacatcacagtgaaattcccgtcccttcaggcgctgcgcagcttcttctcctcctacccggcacccggcaccggaccggaactagacgagcgcttcgtcatgagcagcaaccacgccgcgcgcatcttgcgccgccgagtgaccgaggaggagctcgagggcgaggtgcagcaggacagcttctggctcatcaagccccggctctatgacttcgccgcacctcagcag

SEQ ID NO: 2754 - DNA, 297 bp, Zea mays
  Peptide Sequence Number=SeqID_9048
  Probeset Number=SeqID_17157
ctgtccttccgccaggctccagcgctcctccgacggccacgacatctcatgaacagggtgccaaaacctctccggctgccacgacggcatggaccccccggggtcgaaacgccgacatcgggcgtcgacctcacgtttgagacaaagacgagcgtcgtttccctacgacatgccaaccccaagcagacggacgacgccagcacgctcgcaaaggacatgctgggcgttagcctcgtacctgagacaacggtgcagtccatccctgacgcgaaatggtcgccatccgtcgatcaagag

SEQ ID NO: 2755 - DNA, 325 bp, Zea mays
  Peptide Sequence Number=SeqID_9049
  Probeset Number=SeqID_17158
cgatctgctggaccgtcttgccgccactctgctggccggtcacctgacgggacagcagctggtttcgctgataaactacctcgtacaggcgggcgaaactgacgacgccgaagcctttgtacgcaacctggcgcagagagtgccgcagcatgaggacgaactgatgacgattgcacagcagctggagcagaaggggcgggagaaagggcgcatggaaggaaaaatggaggtcgcccgtaatctgcttgcaaaaggtattccgcttgaatccgtgagggagcttaccgggctgtcagacgacgatctcaaaaaaattcgccactga

SEQ ID NO: 2756 - DNA, 435 bp, Zea mays
  Peptide Sequence Number=SeqID_9050
  Probeset Number=SeqID_17159
gcaagagatttctccaacaacaaagggttcatttatgtttttaagaaactggagtggcaatcactgtcagttgatctgttgcctcatcctgatatgttcgccgatgcaagatttaactcttctagtagtcaagacgacaaaagagatgatgatggtgcaaaacgaatgttttttggtggtgaaagatttttggaaggaatatctggagaggctaacatcacggtccagcggacagaacagaataatccacttgggcttgaggttcagctacatattacagaagctgtctgtcctgccttaagtgaacctggcttacgggcctttcttcgatttatgactggggtatctgtgtgcctaaacaggggagatatagatccaaaagctcaacaggtttacttctgtgtgcttttgatattgtgttgcctgcaggcatgc

SEQ ID NO: 2757 - DNA, 692 bp, Zea mays
  Peptide Sequence Number=SeqID_9051
  Probeset Number=SeqID_17160
aggtgcctcgatttcagctaagagcgctcatgttatcagggtgtgaccttgacaacagcatcatcacaggaccaaatctcctcgctacgcagcgccgcctgtaaatccttgatctgtctaacaacaacctgtcaggaagcatcgtccccagctggatctttacagatggatcagcgttagcttacctgaacatcgcgagaaactcgctcgccgggccactgggttcgatgtggcagcacgcatcggtgctcctccgagtcatcaacatgtccgcgaactgtttcgacggacatccgccaggcaatatcagctcagtgttcccgcgtctagtcgttttagacgcttctcataacctcatcagcggaagcataccaccgtcactgtgtgacatcgctgggatggaacttgtagacctgtcgagcaacaagctttcaggagaggtgccgagttgcctgttcacgaagaactctgccccgcgggtactgaaactgtccagcaatggtctcgggggcgccgtgttcggcggggccagcaatctgtctgtggcgagggcagtgtaccttgacggcaaccgttttgaaggaaccctccctggcaatctgtcggcgggtggcctggacgtgattgacctgcatgacaacagactgtcggggcgactggacgcgtcgttctggcacctcccttcgctgcaa

SEQ ID NO: 2758 - DNA, 735 bp, Zea mays
  Peptide Sequence Number=SeqID_9052
  Probeset Number=SeqID_17161
ctggcgctactgcgcatggaaaatctcaacgaagagcgcctgcaccatatctggagccgctgccgcgccgactacttcctgcgccatacgcccaaccagctggcgtggcacgcgcggcatctgatcaatcatgacctcagcaaaccgctggtgctggtgagcccgcaggccacgcgcggcggcaccgagatcttcatctggagcccggatcgcccttacctgtttgccgccgtagccggagaactcgatcgccgtaatctgagcgtgcacgatgcgcagatctttaccagccgcgacggcatggccatggacacctttattgtgctggagccggacggcagtccgctggcagcggatcgccatccgctgattattcaggcgctggagcaggcgatcacgcaaacgcagtgggtgccaccgcgtacgcgccggccgtcgtcacgtctgaaacacttcagcgtcgataccgaagtcaactttttgcccacccataccgaccgccgcagctatctggagctggtggcgctggaccagccaggtttgctggcgcgcgtcggcgaagtgtttgctgacctcggtgtttcgctgcacggcgcccgcatcagtaccatcggcgaacgggtggaggatttgttcatccttgccaacagcgaacgacgtgcgctggatgccgaaatgcgctccgtgctgcaacaacggttgacagaggtacttaatccaaacgataaaatgtga

SEQ ID NO: 2759 - DNA, 284 bp, Zea mays
  Peptide Sequence Number=SeqID_9053
  Probeset Number=SeqID_17162
atggagaccagggaaggcgtattggaacttctgttggtcagcgccgagggcctcaagcatgctcatcaccacccgcgacgatcaaagaggcattacgtgaccatcgagtgcggggacaagattgcgacgagcaaaatcacacaaggcaggggtaaaaagatctggtggaacgagaagttcaggttcgcgctgtcggacgccgagcgcagggagctggcgaaggtgacgctgacgatcatggagatggacaggttcacagaagacacctccgtcggcgaaaccaa

SEQ ID NO: 2760 - DNA, 455 bp, Zea mays
  Peptide Sequence Number=SeqID_9054
  Probeset Number=SeqID_17163
atgtatgtccccgccgatttcgccgaatcccgtcccgacgtgctgcgcgagctgatcgtccagcatccgttcggcagcctcgtcacgcacggaaagagcgggctcgacgcgaaccacatcccgttcgagctgctgccgggcgacggcggcctcggcgagctgcatgcgcacgtggcccgtgcgaatccggtgtggcaggaggtcgcgaacggcgacgaggtgctcgtgatcttccgcggcggcgacgcgtacatttcgccgaactggtatccgagcaagcacgtcgcgcaccggcaggtgccgacgtggaattacgtggtcgtgcatgcgcacggccgcatcacggtgcgcgacgacgagaagttcgtgcacggcgtggtcgcgcggctgacccgcacgcacgaggcgtcgcagccggtgccgtggaagatggccgacgcgccgaaggacgatct

SEQ ID NO: 2761 - DNA, 764 bp, Zea mays
  Peptide Sequence Number=SeqID_9055
  Probeset Number=SeqID_17164
tcaaggcgcgggagcccaacgtcccgcggtcttacgcgacggcgggcccagtggcccacgcagcgaccatccgcttcccgaaaatgcatccttgcggcggggacagaagcgtccccacgtcgcgtcgcgcacgccgtactgcccgccagcccgcccgacccttttcacagccccgacgcaaccgcttcgccgtcctgcccggctgcccgcctccctccctccctctatatcctcccctccgccaccgccccccctctctctcctcagctcaccagacgccgccgccgcgaacgacgaatcctcagcctcccagtcccagcccagatgttcctcgccgacaagtacaggtcgctgctgccctcctcccaccagcagccccactccaagcccagccgccgccgccagcagcagcagcagctgctgcagcaggagggggaggcggaccggttcggcgcggcgcgcctcgggagcctgcttcctttgccggtctcgccgctcgcggagctagcgagggcgaccaatagtccacacgaaacgacgggtatgtgctacacggcttacccgggggtcccaccatgaaggagtccacctcggcgttgcggaggcccagcgcggggcggaacacgccgtcgacggcgtcagagaggtggtgcagcagcgggacgacctcctcggcgggcctctccgcctcctgggccgcgcggcgcacgggcggcgtcggggcggagacacctcggcggaggggcggagcagccagcggagcc

SEQ ID NO: 2762 - DNA, 207 bp, Zea mays
  Peptide Sequence Number=SeqID_9056
  Probeset Number=SeqID_17165
cttgcatgcctgcagatttcgaattgcatggcatgcttgttcaatccccatctggtcgtttcacttcaattctctctataggaattggagggtcagctttgggccctcaatttgttgctgaggcacttgcacctgataaccctccactgaaggtatgcccctaagtcagaatcctagcaatgcacaaaaaatgcatttgtctagctt

SEQ ID NO: 2763 - DNA, 307 bp, Zea mays
  Probeset Number=SeqID_17166
acagcggcctgcagaaccttggccattcttgcagttcgagtacacagtgatagctctgatcgtgctaccggagctatcgttgtgctctcgtgtacgggacctgccgcacattatcccggaccggctgcagcaggatgaccgggggacacgtggcgccaaggtatggaacgcgactgctctcgtgtccgaggttcggggtatgacgcggcgcagcgcgggcgcccagcacgccgaatcggggcctcacggcacgggcgggagcggatcatgggcggcggcgcatgtgcgtgcagggcgacgtgcatga

SEQ ID NO: 2764 - DNA, 209 bp, Zea mays
  Peptide Sequence Number=SeqID_9057
  Probeset Number=SeqID_17167
aagtatggtagtttgtttggtactgataatgtgtttctgagtttttctttcttttggctgtgttagctttattgtgagaaagacagccttacggaggaccaatttgagcaactaaaggcgtttattgatattggtgatatattaggtgcaagtggatccattaaaaagacagagaaaggtttattatctctttcagtcgattcctgcag

SEQ ID NO: 2765 - DNA, 623 bp, Zea mays
  Peptide Sequence Number=SeqID_9058
  Probeset Number=SeqID_17168
atggactggacctaccggctgcgattgcggcacctgcaagtgctgctgagcctggcgagcacgggcaacctgagccagtcggcggcggcgctcgcgaccacgcagcccgcgctgtcgaaatggctgaaggaactggaggaggacgtcggcctgccgctgttcgagccggcacgcgcgcggattgcggccgaccgcgtacggcgacgcgctgatcgagcatgcgcgccgcgtggaggcgcagctcgacgtcgcgcgcgacgacatggccgcgctgcgcgaaggcggcagcggcctggtgacgatcggcacgtcgggcgtcgcggcccgccgatacggtgccgctcgcggtgtcgcaattgctgaagcggatgccgcgtgcgcaggtgcggctcaccgaaagcacgatgaatcaattgatgccgcaactcgcacgcggcgagctggacatcgtcgtcgggcgctcagggtcggcgtccgtcgatccgcacctgcacgccgaggcgctttatgtcgatccggtggtgttcgtcgcgcggcccgatcacgcgctcgtcggcgccgcatcggtgggctgggacgaggtgctcgcgtactcgtggatcgtctggccgtccggcacgccc

SEQ ID NO: 2766 - DNA, 211 bp, Zea mays
  Peptide Sequence Number=SeqID_9059
  Probeset Number=SeqID_17169
ctgagtgatatccatagggccacacaacagtgtgagagctgccttcatcattggttccccaaactgcttgagatttggcaagaactcggtgacgggagagaagtggtcgtgcttgatcatgttgccgagcatgacgaacatggagagggtgaggaagcccgccaccaccttccgcaggtcgaccgccattggttcggccttgccaagctgt

SEQ ID NO: 2767 - DNA, 761 bp, Zea mays
  Peptide Sequence Number=SeqID_9060
  Probeset Number=SeqID_17170
atggatgcggcgcagcagggctacggcagtgacgctcagccgctgacttccgggcgtatcaccctgcgcgatgtcagctttgcctaccgcgacaaccgcgacgtgctcagccatatcgatctcgaggtgccggcgcgcggcttcgtggcactggtcggccacaccggcagcggcaaaagcaccttagccaatctgctgatgggctactatccggtgacgcgcggcagcattgagctggatggccgcccgctgcgccagctgacgcacgatgcgctgcgcggcagcgtggcgatggtgcaacaggatccggtggtactggccgatacgctgctggccaacgtgcgcctgggacgcgatatcagcgaagaggatgtgtggcgcgcgctggagaaggtgcagctggcaccgctggcccgcgcgatgcgcgacggtattcatacccggctcggtgagcaggggaacacgctgtcggtcgggcagaagcagctgctggcgctggcacgcgtgctggtgtcgctgccgcagattctgatcctcgatgaggccactgccaatatcgactcaggcaccgagcaggcgattcagcaggcgctgcgcacgctgcgccagcacagcacgctggtggtgattgctcaccgtctttccaccatcaccgaagcggatcagattctggtgctgcaccgtggtcaggtagtagaacgcggcacacacaccgaactgctggcgcagcagggccgttactggcagatgtaccagctgca

SEQ ID NO: 2768 - DNA, 734 bp, Zea mays
  Peptide Sequence Number=SeqID_9061
  Probeset Number=SeqID_17171
gtcggggtcgccgctgctccagctgggctgcccggattggcctcgccggtcgccgcggcactgtccctagccagcggtgagcggtccaggcgtccagctaggcgacggctcggcgcccagcagctccctcccagccggccagctgcccagcctcaacagttccaccaccacacgtcgtcgtgagttcgtgacgcgctgtccctccactgctccacaggaccacaggccatggctcgtcggctccttcggtccctcccagccggccagcctccacagtctagctccaccacatgccgccgtcctccactgctgctcggctgctccacaggccacagctccctctgtccctcgcggtcgcagcaccagcacgacattcttgagatgcctccggttggaaataatcctcgctcaggctcagccatcagattggtccctctagttactgcgacttggaaaggtgtttgccagcatccagttgaggacagagctcgacgataccggcgcactgcgttttcgaagtctcatggctcttaggagcttgttatgtagacagcagcccttagtttgggttcaggaaagcaaatctggaacttcagcgttgcagctcgcaggctgctgagctcggctagcagcgactagacacagggccaggggacaggggacagcccgcgggcgcgccggcggggacaggggacgaggccccgggcgcactgcgttgccgttttgcaggtgtc

SEQ ID NO: 2769 - DNA, 204 bp, Zea mays
  Probeset Number=SeqID_17172
ctagaagcagcgcatcgccattgcccgtgccatgctcaagaaccctgacatcctggtgctggacgaggccaccagccgcgctggacttcgagtcggagaagcttgagcaggaggcactggccgtttcatgatcaggcgcaccaccttggcgatcgcgcacatgtgtccaacatccgcgaggccgacgtcgtggccgtgctgcag

SEQ ID NO: 2770 - DNA, 276 bp, Zea mays
  Peptide Sequence Number=SeqID_9062
  Probeset Number=SeqID_17173
ggcgttttgaatcaggtagccatccacctgaaagcacaggcagctcaggtgctcgtacaaatatctttgtcacagtgggatcctactattcttcagaagcggatagatgacctaaaggctgctaacgatgctatgactcgatggtgctttgatgccgaggagaggtgcgcccgaaaccaagaagagcttaatcaagttaacagattccttgatggtgcccgcaccatgaactcctccctacagtcaaagttagacatggaaaataaaactcatgag

SEQ ID NO: 2771 - DNA, 659 bp, Zea mays
  Peptide Sequence Number=SeqID_9063
  Probeset Number=SeqID_17174
cccggcgggctgccgctggtggccaccatcaccgacgaaaactatcgtccgctgatcagctcacgacgcggcggacccggttattcgctggacgatctgccggataacagcacctggtttggttatcttgacggctatcgtcagctggtgctgaaaaagccgctgccgccgtccagcctcaatgtggtgtggtcgctgtcgaccgatgtgctgatggatcagctcaagctgatgctgattaacgcgctgctgctcaatattctcagcgcgctgattctgtttaccctggcatgggtgttcgaacgccgcatgttcctgccggcggaagacaacgcccaccggctggaggagcacgagcagttcaaccgcaagattgtcgcgtcagcgccggttggcatctgtattttgcgtaccagcgatggcaccaacatcctcagtaatgaactggcgcataactatctgacgctgctgacgcaggaagatcgcctgcggctgaatgaaatcatcggcggccagcaggttaattttgtcgatatgctgaccggcagtaacactaacctgcaaatcagctttgtgcattcgcgctaccgcaacgagaacgtagcgatttgcgtgctggtcgacgtctcggcgcgcgtgcgcatggagcagtcgctgca

SEQ ID NO: 2772 - DNA, 207 bp, Zea mays
  Peptide Sequence Number=SeqID_9064
  Probeset Number=SeqID_17175
atgcagattcgcaaagtggcattatcgcttctgctgttgggcgcagcagcgggcgcggcccaggcggaagatctcaccggcaccctgaaaaaaatcaatgatagtggcgtgattgtcgtggggcaccgtgagtcatccgttcccttttcttactacgacaaccagcagaaagtggtgggctattcgcaggactactccaacgccatt

SEQ ID NO: 2773 - DNA, 618 bp, Zea mays
  Peptide Sequence Number=SeqID_9065
  Probeset Number=SeqID_17176
ccttttggtttacctgcaggtgctcctgtggcaggccggccggcttctgcgccagctgtggtggcagccccgacggctggagcgggcgctgcgcgcacagggcatccgcggcacgccgtaccgcttccccgccggcgacctcagggaatacagccggctggccaacaaggaggcatggtcgaagcccctgccgccgcgctgccacgacatcgcacaccgggtcacgccgttcctgcaccggcttgtcctggagcacgggaagacgagcatgtcctggttcggctccacccccagggtgaccatcgtcgaccctgcactggccaaggacgtgctgtccagcaagttcggccacttggagaagctcaacttcccggcgctggccaaggtgatgggcgacggcctggcgagccacgagggtgcgagatgggccaagcacaggaggatcctcggccctgcgttccagcttgagaagctcaagcgcatgctgccagcgttctctgcgtgctgccaagagctggtgagtaggtgggcggagtgcctcggcccggacggttcatgcgagctggatgtatggcccgagctgcagaacctcactggagacgtcatttcgcgcaccgc

SEQ ID NO: 2774 - DNA, 907 bp, Zea mays
  misc_feature (1)..(15): n is a, c, g, or t
  Peptide Sequence Number=SeqID_9066
  Probeset Number=SeqID_17177
nnnnnnnnnnnnnnnagagatgtcaatgaggacccgatacccgataacccatgaggaattcccctattagggtacgggtatgagacaaaaattgtcccatgggtatggatatgggacaaaatctccacccattgggtaaacgggtatgggtttgggaagcaataatccgaacccgattacccatgggtatttcatacgcgtacacctgtcctgtttgtatgaatgagttgaggccgagtcggccatcaaacccggcaggctccatttcttatattggtcccaagtactgatttcttttctgatggatggatgaatggataatggttcatggtaatccaaagttgacgatatgcaaggctcggtttctgtagatatcgattcccgggtgaaagtccacattatatcggacaaaaaaatgggagaggattttaactacggcgtcgagtttatgctgctggtgtctttcttgaagactgcgtctagagaggcaacggaggacgcattagcgtctcttgacaagttgatcagccaatgcagcgcttctattgtgcaggcaacatgtggctgctgtttggatcgtccggataacgagtacagtcatgctgcagtaatccgtttcccatcatgatagcgaggagtacaaggatatgtgggcgtccaagttccgcccgatcgtggagagatccctgcacctgcacttcaccgttgaccccgtggggaaccagctgatgtagaccgaccgagtggtcatccctatacatgggaccaagagcatctgtactgtacagtgtaaaacagagagatgggggtaatatagaggataccgctagggtcaacaagtgacagtgctcggttacgttacattacatcacggcaaaaaaacaaataaagaaaaacaagagaaaat

SEQ ID NO: 2775 - DNA, 469 bp, Zea mays
  Peptide Sequence Number=SeqID_9067
  Probeset Number=SeqID_17178
tcacgcgtgcggtggaataagccagatggaggcatttggttggtctcactatcccacgagaatccggggaaaaatcaaatcattttcgacagatgggggggtcggaccaaagctagttaagccaatggtcaagaatatgcaatattagatcacagctgcaaagaaagcattggagaatgctggaatcactgaagaagtcatgaatgagttcgaaaaatcaagatgtggagtcctcattgggtctgctatgggtggcatgaacgttcacagcgatgcaaatgaagctatgagggttgcatacaagaagatgaacccattctgagtacctctggcaactacaaacatgggtgcagagattcttgctatggatctgggcaggatgggatcaaattactctatctctactgctagagctactagcaacttttgcattctggatgcatctaatcatatcagaaaaggggaagct

SEQ ID NO: 2776 - DNA, 524 bp, Zea mays
  Peptide Sequence Number=SeqID_9068
  Probeset Number=SeqID_17179
tgcagcatcgtgcgcttacgccgcttgagccgtttcgcgttgacgtctgcgccagtctgcaattcaccgccattccgattctcagcaatgcgccaccgtattcgccgtatcgcgatcgtccgctgccgggacataacgtggcgctgtttatcgaaaacaccgccagcgggcagacgctgctgtatgcgccgggcctcggcgaaccggatgcggtgattatgccgtggctgcaaaaagccgactgcctgctgatcgacggcaccgtgtggcaggatgatgagctgctgaccaccggcgtcggcaaaaataccggcaaagctatgggccatctggcgctggcggaagagcaggggctgatggcgctgctggccgcgctgccggccagacgcaaaattctgattcacattaacaacaccaatccgattctcaacgagcattcgccgcagcgccagttcctgacgcagcagggcattgaagtgagctgggacggcatggcgattcatttgcaggagtccgcatcgtga

SEQ ID NO: 2777 - DNA, 385 bp, Zea mays
  Peptide Sequence Number=SeqID_9069
  Probeset Number=SeqID_17180
tgcatgcctgcagaacagcggtttgatccgccatcgcggcaagctggaagccatcatcaataatgccaaagcactgctggcgctggaggccaccggcgaagacttttcccgctttatctggtcatttgtcgataaccagccgattttgcaccattacgcggattataagctggcgcccaccacctccgaaccggccattgcgctgtctaaagcgcttaagaagcgtggttttaaattccgtgtactggcgctggccttgttaatgagcggcagcgtggcgctgtcgggttgtaccaccaatccttataccggcgaatcgcaggccgggaaatcgggcatcggcgcgggtctgggcgcggtactgggcgctggcgttggcgtgctc

SEQ ID NO: 2778 - DNA, 395 bp, Zea mays
  Peptide Sequence Number=SeqID_9070
  Probeset Number=SeqID_17181
ccccccgcccccgcgtccgctcgtacgccgtcgcttcctgcggttcttactttctgtccgcagcgttcctccagctgggagcggtagcagctagctagctagctagcaactggccatcggggctgctagcagcgtacgtacatggagcgatggctcctacagctgaccatacgctacgacccctggtgcagccccgccctgttgtcaccgtccaacatgggatctcattgacgaaccgacgacagtagatgctacgctgccggggctgcaatacacgcacaccaaggccgacgggacgctcgccatcctcagcgtcggagactggagccggcgtggacagttcaaccagaccttggttgcccagcagatggccgtggtggggcagaagctggaca

SEQ ID NO: 2779 - DNA, 469 bp, Zea mays
  Peptide Sequence Number=SeqID_9071
  Probeset Number=SeqID_17182
gagcgtgctgcgccacgtgcgcgcctccaaactgcgcaccaaaatcgccaccattggccgtgaacacccggacgatgcgctgattgaccacgtttttgtaccggtacgccagcgtctcgggctggatcaaaataccgcccgcaccatgtgcagtctgctggacggcgcactgattgattatgtcgcgttctgtctggcaggcgcgcgtaaaaaagccggtaaagatgccttaatgattggctggggcgtagaagatcgcacccgcatctggctggaagcctggcgcttagcgcagcagggctggcgcattgatgtgctggcggaaccgctggatatgccgcgtccggagctgtttcccggccagcatctgtttatctggaccggtaaaaagccgacgcgccgccagctggagcagttcgaacactggcaggctcagggcttctcgattcacgtccacgaacccacctga

SEQ ID NO: 2780 - DNA, 243 bp, Zea mays
  Peptide Sequence Number=SeqID_9072
  Probeset Number=SeqID_17183
gtcgacctgcagctgagcggtgcgtcaaaggaagcgagcctgaacgcctgggcgaagaaacagaatttgagcggttatcacgtgtataaaaccacgcgtaacggccagccgtggtacgtgctggtgagcggcgcttatgccacaccggccgaagccaaacgtgcggtagcttcactgccggcggaagtgcgtgcggcgaacccgtgggttaaaccgctcagccaggtgaagaaagagagccag

SEQ ID NO: 2781 - DNA, 830 bp, Zea mays
  misc_feature (1)..(229): n is a, c, g, or t
  misc_feature (830)..(830): n is a, c, g, or t
  Peptide Sequence Number=SeqID_9073
  Probeset Number=SeqID_17184
nnnnnnnnnnnnnnnnnnnnnnnnnnnnnnnnnnnnnnnnnnnnnnnnnnnnnnnnnnnnnnnnnnnnnnnnnnnnnnnnnnnnnnnnnnnnnnnnnnnnnnnnnnnnnnnnnnnnnnnnnnnnnnnnnnnnnnnnnnnnnnnnnnnnnnnnnnnnnnnnnnnnnnnnnnnnnnnnnnnnnnnnnnnnnnnnnnnnnnnnnnnnnnnnnnnnnnnnnnnnnnnnnnnnngcatgaacatatgaatgaacacagggatggtaacagtgatcaacagactagggagacttattatgctggagaagctaataatggagatggtttaagggcttctctgctttctcaggcagcaaatgttgaagtaaatgatacaaatacctcttttacttctgaagggagctcttcatatttaagaaggcatggaacatcagtgcttgcacaagagtttatggcgtctatacatgattatgacattgaagaagaagaagaagaaatccataggtttgcattgcctcaccagtctgcacctcgtgatatggaaagcaccgggagacatccattcagacatcaaatagtccggttatctgaaacagctgatataaagtttaaatggtgggtgcttcttcaaccaggaattaggcatgccttatgttatggcatgttaattcaagcccttcagcaagtacgattatgtgttattgtagattatgtattcagttcagcatggatacaacaatccacggttggtcgctaaatataccatattagcaacggacggtcggtcgctaaaaagatgtcggtcgctaaagcctttagcgacggcacttacagn

SEQ ID NO: 2782 - DNA, 294 bp, Zea mays
  Peptide Sequence Number=SeqID_9074
  Probeset Number=SeqID_17185
acagaaatggggtacgttgacattacaaattctggagtcgctgctaactaagggtacgctggttgatttgtatgcgctatgctggacagcgccagatcagttgtaatccgttcagtatggaagcagtctctgtctgcaacgttttggtggattcggtgacacccgcaacaagcgatgttaatgttttgggcaccaccggtgttggggcagcagtatgcttcggtcaagtgtccccaattttttcttggcactggctgctcaccccgtcgctatgggtgtttatactcacaaaaa

SEQ ID NO: 2783 - DNA, 219 bp, Zea mays
  Probeset Number=SeqID_17186
ctcgatcgatctcctctggatctggcagaggacgctaggagcacactattgcctcctgctctagctcctcacgtcaccatcgccgtctcagctcaactgtacgactccgtatatattataaccatcggttgtcatcaaaaaaaaaaaaaagaaaccagagaagaacgaaacgagcggacgcctgggaaggaccagaaaaaaacagttccttgaggggcg

SEQ ID NO: 2784 - DNA, 286 bp, Zea mays
  Peptide Sequence Number=SeqID_9075
  Probeset Number=SeqID_17187
ggagggctcggcaagcagggggtcggcgtgtagggagggggacgacgaccgagcaggggtagtggtggtcgtcggcttcggctccggcgtggacgcggacgaaggggcgcggcggcggctagctccagcgaggtcagagtacggtgagcgtgagcgaggaagagagcgcgaggagggagggagagagctcgggcaggggagagaagggctcgaaccagttccatttatagagagaagagagggagggggagggatgctggggaggaggtggtcggccggccattaa

SEQ ID NO: 2785 - DNA, 341 bp, Zea mays
  Probeset Number=SeqID_17188
agcgtgctgcgcgagctggaaagccggctggacgggcagaagctggatcttgtgctgttctttcatgtttctccaatatgagcggggtggccctggccgaccagatccgggcgatggacctggccgagttggcgctggatttttcccggcaatggctgaagccgggtggcgcgttcctgatcaagctgttccagggcgccggcttcgacgattacctgcgcagcttgcgcgccgagttctcgcgcgtgaccatgcgtaaacccaaggcctcgcgcgcgcgttcgcgggaggtatatgcgcttgccacggggcgaaaggccccgggcgggcagaacggcgag

SEQ ID NO: 2786 - DNA, 371 bp, Zea mays
  Peptide Sequence Number=SeqID_9076
  Probeset Number=SeqID_17189
gccgcagctcgtctgcgtgaggatccccgtggcgtgtcgtccatggggtcattcctggaggagttcttcccggacgtgtaccgccggatgaagggcgacgtgcgcgtgagcaactactgcaagttcgacagccagcccctgacgctcttcacgtcgtcgctctacatcgccggcctgctcaccgcgatgctcctctcgtcgtggttcacggcgaggcgcgggcgccgcccgtccatggtcatcggcggggccgcgttcctcgccggtgctgcggtcagcggcggcgccgtcaacgtgtacatggccatgacgtgcgctgaccactgctctgacgtggttcatcaccgttcgttacctgctggtgcattcga

SEQ ID NO: 2787 - DNA, 262 bp, Zea mays
  Peptide Sequence Number=SeqID_9077
  Probeset Number=SeqID_17190
attcggctcgagggcagattgctatcgagcggttttcaacgtcgcgggcaggctgggcagcgccgccaggcgtgtctatgtctagagggcagtgtatgacgctcggctgctggccgtcttgtgcaccacccacctcgccctttgtggcctaactgagaactatggggccttcagggatccatcataagctcgtgctccggtgtgcactgcacagaccttctctcacaccgtggcccccgcccggcctcctgtaaagcacaag

SEQ ID NO: 2788 - DNA, 598 bp, Zea mays
  Probeset Number=SeqID_17191
caaatcaccataggttaggcaggatactactcacagaggatactatagccatgacaaatgacaatcagctacgataattattatacaaaatactattcagaaacataatatacatgaatgacattaacaatataatatcattcttattcttattatcgaaggtcttattcccacacccctcattgaattcttcaaattcgacacccgctcctttgcctctggcacactcgacataatcgttagcctccgtatacgtggctcctccctcgctgtccgcgaccgcatcctcgtctccagcatcggtgtcaccaacagtggcactatcttctcccgtgttgtcgacagcactttccacagctctggcatcttcttttgttgtcttaattgctccagtcttcctggccgcagctttgccagcggcgtatctactattggctccgcctctggcctcttctttggctttacatttggtttctttggcttctccttacatagtcttcacacgggtcttctgcgcatgggcaagggccggcaccacaattgtcgcttcaaggttgctactttcccccagttatgacggtgacactccttcttattc

SEQ ID NO: 2789 - DNA, 274 bp, Zea mays
  Peptide Sequence Number=SeqID_9078
  Probeset Number=SeqID_17192
cttacggggataacagggccaggagccagcacaaaggctagacgtacagcgatcttttacaggcacgcctccacggaccagaatcacatatgacgacgatcacgccagaggtgacgcaacccggcaggcctatacagataccagcgcattttccgctgcaagcgaccaactgcgctactctgttgcgacagtgtcgcttaccccagtcatgtacacctttatgcgttcggaaagcgggcgcttaatcatagcccacgctgtaggcagctcaaaa

SEQ ID NO: 2790 - DNA, 341 bp, Zea mays
  Probeset Number=SeqID_17193
ctgacgctttggcgatcgggcggacgcaggtcggtgaactcgctgggctcgccgtcggcgccaccgtcctgctcaacgtcctcttcgccggccgccggatttttcttttatttggcgcggcgcacaggcccatcacaggagcgtcgacgaactcggcgcggtcggaccttgggcccggcgatcgtggcaggccggtacacgagcatatggttgggccggtgtgcgggacggtggcgggcgcgtgggtctacaacttggtccgcttcaccgacaagtcgccgctgcgcgagatcaccaagagagcggctcgttatctttcctcagtgcagcggccagcacaa

SEQ ID NO: 2791 - DNA, 563 bp, Zea mays
  Peptide Sequence Number=SeqID_9079
  Probeset Number=SeqID_17194
atgcctgcagcgagcaacaatttcgaactggccattgccgtggccatcgccaccttcggccttgcctcgccggtcgcgtttgccaccgtcatcgggcccttggtggaagtgccggtactgatctccctggtgggcgtggccttgtggctcaagcgccgctggttcgatcagccatctggcgccttgactcaggaccgcctgctgacggaagaagcggcacgcctgctggagcacttcggtgccgagacgcggatcttcaatccgaccgggctgccactggcggatgacgtgcccgatgaccaccccatagtcaaggagctgcgcgacctggtgctgtggtcggaaggcatggtctggtgctcgccagagcgccacggcgcgatgactggcgtgttcaagtcgcagatcgactggattccactgagcatgggcgccgtgcgccccactcaaggcaaaaccctcgcggtgatgcaggtctgcggcggctcgcagtctttcaacgtggtcaaccagctgcgcgtcctcggccgctggatgcgcatgttcaccatccctaaccagtc

SEQ ID NO: 2792 - DNA, 214 bp, Zea mays
  Peptide Sequence Number=SeqID_9080
  Probeset Number=SeqID_17195
tgcaggcttctcacccgctgcgcgacgcgaaggtggtagtggaagatatcgacgacaacccgggcttcttccgcgtcaggctgtacgccatcccacacttccaggtagagggcatggacgtcaacctgtcactggtttcccagatgccgaaggcgaaatcgggcgttatggtctctccccagcacttccagcaacaggtcgcctatgcggcctg

SEQ ID NO: 2793 - DNA, 320 bp, Zea mays
  Peptide Sequence Number=SeqID_9081
  Probeset Number=SeqID_17196
ctggaaatgtttttactgccccctctgctctatgtgattgggatgacatggatatttttgggggcggactagagcccatccttcaacagacagagcaagactttcaagtggaccctcctctaacaattgaagattacggttatgcccgtccatggttaaagcaggactgccagttaaaagcgcaacaaaattgcaaaaatccccaatatgctgatgtcataactgaagcatgagcggtggtacaaaagaattttgtccaataacgtaagtggataaaggtgctttgcaattaaaaagccctttgcgctgtgttcttttcc

SEQ ID NO: 2794 - DNA, 374 bp, Zea mays
  Peptide Sequence Number=SeqID_9082
  Probeset Number=SeqID_17197
atggccaccagtaatattcgacacccaatgctctctgatgcatttgagcagcaggtgaaatccctgattatggaagggacgctccagccgggtaaaaagctgcttcccgagcgtgaactggccaaacagtttgatgtctcacgtccatcggtgcgagaagcgatccagagtctgaaagccaaaggcctgctgctgcgccgtcagggtggcggcaccttcgtacagcagaatctctggcaaagcttgagcgacccgctggtcggcctgcttgctgaacatcctgaatcccagtttgacctgctggaaacccgccaaacgatggaaggcgttgcggcctactacgctgcgctgcgcggcaccgatgaagatctgca

SEQ ID NO: 2795 - DNA, 248 bp, Zea mays
  Peptide Sequence Number=SeqID_9083
  Probeset Number=SeqID_17198
atggaggtgatcaaatccgtggcgcatcgcgtggccgtcatcgacgccggggagattgtcgagcagggcccggtgtggcaggtgttcgcccatccgcaatccgcgctgacgcgcacgctgctgccgcagctgccggaaaatctcgcagcgcggctcagcgaacagcgtgaaggtgaggcgatctatagcgttcactttgctggcgtggcggcgcagggggatttgctgacgcagtttgccagcgctct

SEQ ID NO: 2796 - DNA, 427 bp, Zea mays
  Peptide Sequence Number=SeqID_9084
  Probeset Number=SeqID_17199
tgcagaccaccggaggattgtggtttggctggaacggagagatcagtgagttttccggtgaagaagatgaggaacttacccagatcgaacaagacggcattacctatgcctcattccccctcaatcaaaacgattacgatcagtactactgccagttttctaacacggtgatctggcccgcgttccactatcgtcttgatctggtgcagtatcagcgtgaagcctgggaaggctactgccgcgtgaataccctgctggcgcagcggctgaaaccgctgatcaagccggacgatatcctgtggatccacgattaccacctgctgccgtttgccgctgaactgcgtaaacagggcatcaataaccgaatcggattctttctgcatatcccgttcccgacgccggaaattttcaatgcgctgccgccgca

SEQ ID NO: 2797 - DNA, 217 bp, Zea mays
  Peptide Sequence Number=SeqID_9085
  Probeset Number=SeqID_17200
atgacggccccacatccgtggctcaacaagactggattctcgacgtgtgctgagactgttcttgttcttgtcgacagcgtccaccgcggcgccggcctccaggagtgtctgcgtgcactggagttcgccgtgtcctccttcagggggcgttcggttctctcggaacggtttggaattcaacgtggcagcagctcacaacaggattgcgattcgaatg

SEQ ID NO: 2798 - DNA, 759 bp, Zea mays
  misc_feature (631)..(631): n is a, c, g, or t
  misc_feature (686)..(686): n is a, c, g, or t
  misc_feature (721)..(721): n is a, c, g, or t
  misc_feature (733)..(733): n is a, c, g, or t
  Probeset Number=SeqID_17201
gtgggccttgggggccggtgggagggttcctccgcccctttcgggtttggatggtcttcttgggcacaggccttgtgtggacgtctgggagggctcgtgggaggcctgtcgcggctctgtacagatgggcggtcggggagggggcgtagtgggttctcgagtcgcagcgggggccccttctggggtgcctggtgatagccgctcggcgctgcagtttcccgtggtgagtttttgtgtgtgatagatggatggggcctcatccgtttgcttggcagtgttttttttgggttgagcggtgttttcttgttgtgttcgccaggtcgcgggccgccattggcgttttggcggtgcaggcgtgcgacgtcgctgcccggttcacacggcggcggcggggcgcgctcgctgggctgtgggtctcggtcagggggcagccggtccggcgcatgcttggcatgtcggtgcgcgggaagctgggcgtgtgcgccttcgtgttcctcctggaggtgtgctcccgcgcggagctgtgcctccggcacagcgtgggcggcggcggggatcgtcgcgcgacgcagtggctgggctaggccgtgcgtgtgtgtgatggtttgtgcctttggcttcgtcagcgacncggcgtgggggttgtttgtggttgctttttcgttgtgcccccgggggccctggcntttcttccccgtggccgtgaatatgcatggatgtncgttacgtgctnctgcactgaactcgtgctgtcggctc

SEQ ID NO: 2799 - DNA, 224 bp, Zea mays
  Peptide Sequence Number=SeqID_9086
  Probeset Number=SeqID_17202
atgggggtcgattactactcggcatctaccgcgccgacgatggagacctcaagaaagcctaccgaaagctcgccatacggtgctaccccaacaagaacgcaaccaacaaggaggcagaagccaagttctaggatatctctgttgcatatgaggttacccgcccctccctctcactctctatttacaagcagtattttgtttattatttaaaaaaacaaaaacag

SEQ ID NO: 2800 - DNA, 768 bp, Zea mays
  misc_feature (29)..(29): n is a, c, g, or t
  misc_feature (622)..(622): n is a, c, g, or t
  misc_feature (647)..(647): n is a, c, g, or t
  misc_feature (661)..(661): n is a, c, g, or t
  misc_feature (680)..(680): n is a, c, g, or t
  misc_feature (713)..(713): n is a, c, g, or t
  Peptide Sequence Number=SeqID_9087
  Probeset Number=SeqID_17203
gcgagcggtacttcgagccggagctgacncgcggaggaggcggccgcgcgcatccggcagccggccgagggcatgcgcacgctgcggcccatgctcgagaccatgtcctggaagtacgtgctcttctacgtgcgcctcaagtccaagtacctcggcctcgacctcaccaccgccatggccggcgtccccgcgggccgccgcgctgactacgtccgcgtcgccaacgagctcgtcgacaacatgacggagttcgatcgcttcgtgcggactcccaaggtctacgagtcctacctcttctacgagaaaacgttgaagtcgctggatgacgtggcagagttcctcgtttgatgcagacccatgcacgaatgcagccgtagaagtggtgccagtcaaactgatttaaagtttgacaaaatttacaataatgatatcgatattctctatctctaacaaatttactatatacactgtaattagtttgatggtacttcttttatgtcataaatattaatatttttatgaattctttgaataaaaaaaaaaaaaaaacctgcagtagtttctcgactcctgtagcaagaaagaaaccatgttcggggtatggtgttcgaaggacggatcntttcggcgtgcggacagtgacccgncgaataaatgtacncgagaacgccgccgccgtngcgtcgcgatgctcttatatatccggatttganggggtcttgaccttagattagtactttctaaatcccaatgggtgggatttaggac

SEQ ID NO: 2801 - DNA, 586 bp, Zea mays
  misc_feature (427)..(427): n is a, c, g, or t
  Peptide Sequence Number=SeqID_9088
  Probeset Number=SeqID_17204
tgcagaactacttccggctctacgacaagctctccggcatgaccggtacggcgatgaccgaggctgccgagttcgacaagatctacaagctgggcgtcgtgccgatcccgaccaaccgaccgatggctcgacaggaccaggccgacctcgtctaccggaccgaggaggccaagttcaacgcggtcgtcgaggacatcgccgagcgacacgccaccggccagccggtgctcgtcggcaccacgtcggtcgagaagtccgagctgctctcgggcctgctcaagcgcaagggtgtcccgcacaccgtgctcaatgccaagcagcacgccgacgaggccaaggtcgtcgcgctcgccggccacaagggcgccgtcaccgtcgcgaccaacatggccggccgcggcaccgacatcatgctgggcggctcggnggagttcctcgccgaccaggagctgcgcaagcgcggcctcgacccggtcgagaacgccgaggagtacgacgccgcgtggccgggccaccgtcgagaagatccaggcccagggtcgccggggaggcatgacacaggtcaaaaggaagcccggcggggccc

SEQ ID NO: 2802 - DNA, 275 bp, Zea mays
  Peptide Sequence Number=SeqID_9089
  Probeset Number=SeqID_17205
tgcgccggcgtaccacgtcgggagcgggaacgtcgccgccgccgccgcgccggggcatggcgcgccgagcaagacgcggatccggtggacgcaggacctccacgagcgcttcgtcgactccgtgaaccaactcggcggtgccgacaaggcgactcccaaggggatcctcaagctgatgaactccgatggcctcacaatctaccacatcaagagccaccttcagatctatgggcttactaataattatgtaaacttatatgatcaatcttttaaaa

SEQ ID NO: 2803 - DNA, 278 bp, Zea mays
  Peptide Sequence Number=SeqID_9090
  Probeset Number=SeqID_17206
aggcctgcgaccttacgcggggccaatgggtgccggacgacgtggcgccgtactacacgaacctgacgtgcccgttcatcgacgacctccagaactgcatcaagttcggcaagccgagcctcgagttcctgcgctggcggtggcagcccgacgggtgcgacctcccccgcttcgacgcggcgcggttcttggaggccatgaggggcaagtctatggcattcgtcggggactccctcgccaggaatcacctcaagtctctgctgtgcatcctctcccag

SEQ ID NO: 2804 - DNA, 398 bp, Zea mays
  Peptide Sequence Number=SeqID_9091
  Probeset Number=SeqID_17207
ctgttggccacagattggcaaaagtacaaggatatttattcagatctgcattccttcggcgtattccgacctttacacgtctcattattgaaaatcttcttctatgctttctccaatccacgttatatcagacatcaaagtacttaacagggtctttaggcctgcgcttcaagaaaatcttgacagatcttgtccatgctgattattttgagaacatggtgtactacaagatctcacatgttgatcatcggatcacaaacccagagcaaaggattgcaagtgacataccaaagttctgctcagaattaagtgaccttgtacaggatgatctggctgcaattgtagaagggttaatatacatctggcgcctctgctcttacgcgagtccaaaatatgtg

SEQ ID NO: 2805 - DNA, 350 bp, Zea mays
  Peptide Sequence Number=SeqID_9092
  Probeset Number=SeqID_17208
tgcagatccgccagctggagaagctggccgacggcatcaatgatgcggcggtgatgatcgtgcgcgaacagatgcgccccggcgatcggcaatcggaagaggtgctgctgcgtaatcgcgagaaaatcgcgcgcggcctcgacgcgctggaaaccgctgccgcgcaaggtgaattgctcaacagcggcacgctcaacctcgccgatatcgccaccggctgcaccctgggctatctcaattttcgccgcgtgctgcccaactggtgcgtcaatcgcccggcgctggttaaactggcagaaacgctgttcgagcgggaaagctttgcccgtacggttccgcccacccactaa

SEQ ID NO: 2806 - DNA, 224 bp, Zea mays
  Peptide Sequence Number=SeqID_9093
  Probeset Number=SeqID_17209
atgaacgacagcgacaaccatgctcggcacgacgacaccgacccccagccggacaaagcatgtgccagaccaccagcaccacacaaggagaaccgaacgaccgaagaacacggccatgagcgacagcaagcaacgaagatgagaacaaaaccgacagactggaggcgccagggcacggcccccaagaccgccgggaagcgccgaaggacaccgaccagtcacag

SEQ ID NO: 2807 - DNA, 635 bp, Zea mays
  Probeset Number=SeqID_17210
ctggcaggtgcgcatccaaatcatagcggaggtttgctccgcgctgatcttcctccacaagcacaagcctcacccggttgtacacggagacctcaagccgggcaacatcctcctggatgcgaacttggtgagcaagctcagcgacttcggaatctcccgcctcttgctggagtccagtgccaccggcagcgaggcacacttcaccactcagccgatgggcacgccggcatacatggacccggagttcttcggcacgggggagctgacaccgcagtctgacacgtactcctttggcattacgatcctgcgactcctgaccggaagggcgcctctacgcctcgcgagggtggtgcaacaggcggtgagtgacaacgaccttcgctcggtgttggatcactcggcaggtgagtggccgctggcgcaggcagagcagcttgcgcggattgggctgcgctgctcggagctcagcagggagaaacgccctgatcttgagctcgacgtgtggagggtggttcagcctatgaaaaaggaagctccttcgccgttgtcgcaatcttttcggtccatctccgatggaagcagtagagctgctgccacaccatcctacttcctctgtccgatttctcagggggatc

SEQ ID NO: 2808 - DNA, 471 bp, Zea mays
  Peptide Sequence Number=SeqID_9094
  Probeset Number=SeqID_17211
caaaaacaggggaccgggggccagaacgggcgagggacccgccacccccccagagatcgtgttgaccaatggggatgaccacataccacgtgcaagagcgggcgacccagccccagagactgcggaacggaacgcgagcaccagcccaggagcaggcccagcaggggcacgggagagcgcccagagggcgacgcaaacaagaaggcccagcaaaaggggcgcgggacaaaacacaagcacacggaaaagccctggtcgcaagaccaaaaaccacacccgcccacctgcaagccgccgaaagcgaagcgaacgaccaacccagccccggacagcacggagagcccgccccccagcgccgggaaccccaaagctctcacacaccgctcggcagacagaaaccacccggctgcctgggagacaacacaagaagacccccaccccgcagtcgacgcagaccaacgccccacccgg

SEQ ID NO: 2809 - DNA, 396 bp, Zea mays
  Peptide Sequence Number=SeqID_9095
  Probeset Number=SeqID_17212
ttctgcatgaacacgtagctttttaaccaaattaacgtcatctatctttctaaagtgaatcttttttttcagtctacattgagattagagcagcttgacaagattgcagaaagattagcgcaccatgttatgggtcatcatgaagaaatggtgaaggggatgcagttagtgatggaattagaacatgacttaaaggttgcaaatgtaatctgcatgaatggatgaaggcatattacctcttcgaagaattaggtgtcgagggatctggttgtcaatgtaaaatcaaaaaagaaacaagctttgctgggatgtcttcctatccttacagagcttcgtcatgctctagacatgcagatggaacttgaaacatttgttgagaaagacaattactttcag

SEQ ID NO: 2810 - DNA, 826 bp, Zea mays
  Peptide Sequence Number=SeqID_9108
  Probeset Number=SeqID_17213
tgcagcgttatttggctacagcaaactgtatggtggcgtgccgggcggccaggcggaatatgtacgggtgccaaaagccaatgtcgggccatttaaagtgccgctggcgctaccggatgagaaagtgctgtttctctccgatatcctgcccaccgcctggcaggcagtgcaaaatgccggactggataaaggctccagcgtcgccatttttggcgccggcccggtcgggttactgagcgccgcctgcgcgcgcctggcaggcgcggaagagatctttatgattgaccacaacgcttatcgactggaatttgcccgccagcgttatggggttacgccgatcaattttgatgaaatcgacgatcctgctggctggatcattgatcatacccagggccaccggggcgttgatgcggtaatcgatgcggtaggttttgaagccaagggcagcctgacggaaacggtgatgagtaatctgaagctggagggcagcagcgggaaggcgctgcggcagtgtattgcggcagtgcgccgtggcggtgtggtcagcgtgccgggcgtgtatgccggctttatccacggcttcctgtttggcgatgcattccataaaggactgacctttaaaatgggccagacgcatgtgcaggcctatttaccgcgtctgctgtcgctgattgagcaagggctgctgaccccggaagagattgtgacgcaccatatgccgctgaaagaggccgcgcgcgcctatgaaatctttgaaaaacgtaaagaggattgccgcaaagtgattctggtgcccggtatggccagtaccacgccggcggcctga

SEQ ID NO: 2811 - DNA, 409 bp, Zea mays
  Peptide Sequence Number=SeqID_9109
  Probeset Number=SeqID_17214
tgcagtgggatcacaaactgcattacgttgactatggccagcaaaaagcgcacgggctggtattcagaaacggcaggcgctacgaagccgatatcgtgattggtgctgacggtgcctggtcgcgggtccgccgttatctgacaccggtacgtccggtttataccggcattacctttttcgaaggctggatagatcacccgtccgaccaaatcaacagcattgccggcaacgggaccgcgttcagcttcggcggtgcgcaggcgctggtcacgcaacgcaacggcggcgggaggatttgcgtctatgcggcgatgaagcgcgcccctgatgtcatcgatcaacacatagcctcctccggtctcaccgcctgggtgcgcgacagctaccgcgactgggccgcttccctgca

SEQ ID NO: 2812 - DNA, 516 bp, Zea mays
  Peptide Sequence Number=SeqID_9110
  Probeset Number=SeqID_17215
ctccgctgcggcctgtggcttgcccgggaaaagccggaaatatgcgaaccgtctgactggacaatggaaacctgcgccagctttattgcaatggttggccgactgaaagtggacgagctgtcgctggacacaaataaagggggcaggcgttcaaaccgctcaggaaagcccctgatgccgcattcccgcagccggtttgtttatgcagttcgccgttttatgcttgattatgaaagctggggctgggggaaattaaaattcagtccggcccgtcatttgtcctcgcctgacacaccgctgtttcgtcagggcgtgaatccccgcgtcattgatgatccggtatggctgaaactggtctgggcaagcctgaatctgcgtaaagaagatctgctgagcgaaattcattatcccctgtctatgcttcaggctatggcggttatctggacacatgcagggctgcgacagaacgagctgatgcgtctgacaatgaactgtattactccacaggcggatgac

SEQ ID NO: 2813 - DNA, 919 bp, Zea mays
  misc_feature (1)..(318): n is a, c, g, or t
  misc_feature (919)..(919): n is a, c, g, or t
  Peptide Sequence Number=SeqID_9111
  Probeset Number=SeqID_17216
nnnnnnnnnnnnnnnnnnnnnnnnnnnnnnnnnnnnnnnnnnnnnnnnnnnnnnnnnnnnnnnnnnnnnnnnnnnnnnnnnnnnnnnnnnnnnnnnnnnnnnnnnnnnnnnnnnnnnnnnnnnnnnnnnnnnnnnnnnnnnnnnnnnnnnnnnnnnnnnnnnnnnnnnnnnnnnnnnnnnnnnnnnnnnnnnnnnnnnnnnnnnnnnnnnnnnnnnnnnnnnnnnnnnnnnnnnnnnnnnnnnnnnnnnnnnnnnnnnnnnnnnnnnnnnnnnnnnnnnnnnnnnnnnnnnnnnnnnnnnnnnnnnnnnnnnnnnnnngcgctcgccgttggcgctgcctgtcgtgcccctctgctacctccacgcccaagctccagctctatccaagccaccgcgccgagctccctctacgtcgcgcccacccccagctcggtctctagctccctcgtccgcggctccctgtgctcgctggactcggctccctgcgctagcgtgtgtcctctccagcgcccagctcaccgcttccacgccattcttgctccttcgtctatcgttggagaggaatcccgggatttgatggtgtgaagcgaggctcgtgtgcatcactagccaggtgttcagtcgaagatttcaatcaaagaacgtcatcgttcgtgtgattattgaggtacgctaatgatcgtgcgagatgaagggtgtggaccggcgatatctcagcaactatgtcgacagaagatgaatggattgaccataccaggatttttgatgttcgccaaccaaatgtctctaacaacactaacatagtgttttatcccaggttatagttttgttctgttgtggatggtgctaagtgcgagtgggctcagccttcttatataagtatatcccgtctttatcttctgtatgaggattgtcactn

SEQ ID NO: 2814 - DNA, 513 bp, Zea mays
  Probeset Number=SeqID_17217
atgcaccaagggcaaggcactcctgctcctcctaccaccgccagccacgcccgccgcatcgcccgccgcacccgggacagctgcgccgcagccctcgccaacactctatgctccctcctcctgggcctcctcctcatcgccgccgtcgtcgtcttcgttatctggctcggcctgcgcccacaccgcccgcgcttcaacatggcctccttctctgtggccggcggcctcgacccggactatagcccggccggcgccagcctctccttcaacgtcaccgaccgcaaccccaaccggcacattggcatctactacgacgccatgcacgcatccgtccacttctacgacgcgctcgtcgcctccggcccggccttcgccgacggttggtaccagcccaacaggaccaccacctcaatcacgggactcctcgacttcctcggccccgtcaccaccgacgcctcctggccctccttttccgccgcggttcgggccggccgcctgccgctgcgcctgcag

SEQ ID NO: 2815 - DNA, 613 bp, Zea mays
  Peptide Sequence Number=SeqID_9112
  Probeset Number=SeqID_17218
gcgcggggggagacaccgaccaagaggaccctccagaccccaccgacaggcgggacatcaaccaagccgggacccaacaacagcacagaaaaccccacaggtcaaagacagcggagctccctccagcctccagccaagaacacgagcgaaccaccgcccaaccgaaaccgggccccaccggccgccccgacgccacgaacgcggccggagcgccccagacaagcgccacgccgagcgccgacacgccgacgccgcgacccccacggcgctacccgcagcctccggcgagcgagaaagcccacccgccgaccgccacccccagggcaccccgcggcaccccctccacccacaaccccccgaggaccccgacgccgccgaaggccaaccacaggcccgcgcccaccgccccgccgcggacccgacgcccaccatggccgaccccgcgcccgccgagacagggcccgccacgacgccgacggccctggaagactacaacgcgcccccgccgccagaggacgtacccccccgggcccccggcgcgcggccccaccacggcgacccgcagccggagccaccccgctgggccgcccggggacccaaccccccaccaccc

SEQ ID NO: 2816 - DNA, 1182 bp, Zea mays
  Probeset Number=SeqID_17219
acacatttttcttctaaaatctacagtacactacatacaaactctagactgtacgtcggcacatgtgaatacattgagcgtacaagcggccatcactgagtagcaagatcgttgcacaccgctcggaagagaaatgattgccacgaccggcggcagctcggcgaaggcggcggcggcggtgggcggcaaggcggcgcgcgcctgtgacgggtgcctgcggcggcgggcgaggtggtactgcgcggcggacgacgcgttcctgtgccaagggtgcgacacgtcggtgcactcggcgaacccgctcgcgcggcggcacgagcggctgcgcctgtgcccggcgtctccgctgcagacgccgccagctcgctcggcggcggcggcagcgacggcgactaataagcgcgagcgtcacgacgaggtggcggtgcccgcgtggttcgggcgcaaggcgcgaaccccgcgcggcgggcacgccaaaagcgtcggccaggtggcgttgtcgcggcgcctcgtcgtaccgcatgcggctggcggggactcagactcacccgatgagcgaaacggcggcgaggaggagcagctgctctaccgcgtgcccatccttgaccccgccctagccgagttctgctcgcccccgcctctcgaggaccccgcgaagccggatcctgcggcgccgctggcccagttctgccccgtcggcggccatttcaacttcggcccgaccgacgccgagctcagggagttcgccgcggacatggaagccctcctcgggcacggcctggacgacggaaacgaggaggaatcgtcgttttacatggagacgctgggcctcctcgaccaatggaagtgggcgacgatgccacgcaagtcaaggtggagaccgacggcagcagtgcgtgctgcgaagccagtggcacgctggcctgtggcctggagctggacttagaggcatctgacgagatgctggacatcgacttcgagtacgcatcgcctcaggacacggcgacggacgagagagccgccagcagcgacacgggagccgacgcccagttcttgcagacgagcctctcgctcaccctcaactacgaggccatcatccagagctgggggagctcgccgtggaccggtggcggtgagcgaccacacgtcaagctcgacaccaggtggccccacgactacacg

SEQ ID NO: 2817 - DNA, 357 bp, Zea mays
  Peptide Sequence Number=SeqID_9113
  Probeset Number=SeqID_17220
attcggctcgagctcgctctggatcgattgttttttgtaactggtgagggactgagggtctcggagtggattgatttgggattctgttgcaagatttgcggaggggggcaatggcaaccgcggcgaaggtgatcaagtgcaaagctgcagtggcatgggaggccgtcaagccactgttgatcgaggaggtgggggtagcgcctccgcaggccatggaggagcgcgtcaagatactgttcaccttgctctgccgcaccgacgtctacttctggtaggtccaggggccgactcccgagggccctcggatcttgggccacgaggctgtaggcatcatacctagtgactgagagggtgaga

SEQ ID NO: 2818 - DNA, 411 bp, Zea mays
  Peptide Sequence Number=SeqID_9114
  Probeset Number=SeqID_17221
ggcttggaagagagggagcacgacggctcgctggccgtggtgctgggcgccctgcagcgcatccaccagggtttcttcgacggccaccgcgcggacgtcagggaggtgatcgcgaaggtgcggagccaggtgctgcccgagtgcacgctggcgttcagctttctggagcaagtcatggaggactaccccgaggccaccctcccgtggaggttggccgaggcgttcggcgccgcctgcaggaaagacgtcgacgaggaggtcacccatgtcgtcgcggaggatccggcggccgagaaggcgcagtgggcgcgggataatggcaagttcctcgtcaacacagagtgggtcaaggcggcgagtttccggtggtgccggcaggacgagcaagcgttcccggtgaatctgctgtag

SEQ ID NO: 2819 - DNA, 231 bp, Zea mays
  Peptide Sequence Number=SeqID_9115
  Probeset Number=SeqID_17222
ttggtcattcactattagtatagcattattaagttaaattctggattgtactggtcttggaaatatttgagagctttatgcgttcatcagaggaaatggtcagaggctatacaaagccttcagcatggaatacgaggttacccaacatgtgcagatttatgggaggcacttggtctggcataccaccgtttgggcatgttcaccgcagcagtaaaggtttgctgttttcag

SEQ ID NO: 2820 - DNA, 518 bp, Zea mays
  Peptide Sequence Number=SeqID_9116
  Probeset Number=SeqID_17223
tggaaaaagtgctgggacgggtcccgggggtgcaggcgccgagtgtcaatctggcgctggagcgcgcgcatgtcagggtcaccgccgaggtagggctgtaggcgttgccggcggcggtggagcgggcgggctatagcgccggtccggtgaaatccgtccggccggatgccagctggcgcgaacagatcgagctgatggccgccttcctgctggcggtgccggtggtgctggacagcatggtgatgccggtgcccaagctggtgccgctgatctgcgccgcgctggtgcaggtctggctgggggcgcgcttttaccgggccgggtttctggccctgcgcgccggcggcggcaatatggatctgctggtggcgctgggcacctccgccgcctacgggctctcgctttgggatgtcttcgccggcgggccgctttatctggaaagttcggtggcggtcatcgccctggtgcggctgggcaaatatctggaaggccaggccaagcgcgatgccgccaaggcg

SEQ ID NO: 2821 - DNA, 594 bp, Zea mays
  Peptide Sequence Number=SeqID_9117
  Probeset Number=SeqID_17224
tgcagcgagccatcactggctttggattcgaacggtggaaaagtgggatcgacgccaaaacgcagcgtctgctgcgccgcagccagttggctaagggcgctgagggctcatgccgctgtcagcctcggttttctatggtaacccgcgttatactgcccgccatcagcaagcggccgccactgccgggagatcgcatgaaaatattggtgatagaagatgaagccggggcgcgtgattacatgcgcaaaggattgaccgaggccggttttatcgtcgacgtggcggaaaacggtcaggatggcctgttttatgcgcaggagcaccattacgacctgattctgctggatgtgatgatgcccggcatcaatggctgggaggtgatggcgcagctggataagcaattgcaaacgccggtgattttcctgactgccaaaggcacggtggaagatcgcatcaaagggctggaactgggtgccgatgactatctggtcaaacccttctccttcgccgaactgctggcgcgcgtgcgcacccaattgcggcgcggtagccagcaaaagctgcccgacatcctgacgctggccgatctgcagg

SEQ ID NO: 2822 - DNA, 568 bp, Zea mays
  Peptide Sequence Number=SeqID_9118
  Probeset Number=SeqID_17225
atggctgttgtttgtttttgtttttttgttctgcaggggtgactactggtacgccaattcttgttattgtcccaaacacagatcaaataggcagtgtgagtagtatatatatacgtactgtatttttttatggacaactctactcaacatttataagagcaaggattttgttaataaatatatgtttttcataaccatgttggtccacaggatcaccgtgaaatagccaatgtgtaccgaccttctcatgcagacgcaacttatgacttcaagtacggcgttagagctgtacaggtagaattttttttctctataccacttgaagagcctcagttttttttttaaaaaaaataacactgaaatgtcttggacacatgaagtattaccgaatgaacaacacccactgtccaaaactagcatgttctggtgctaatattgtgaatccaccggctatctcctcctctccttccctcaactagcactagtacgtggacaagccccttccttatggcagaggcgcagagctgtagaggccatacagcagattccttttgatggcattttctgc

SEQ ID NO: 2823 - DNA, 296 bp, Zea mays
  Peptide Sequence Number=SeqID_9119
  Probeset Number=SeqID_17226
tgcagaatgaggtcatcaccctgtgcggcggtcgcaatatctttgctgacagcatcgtgagctggcctcaggtgagccgggagcaggtgctgacgcggcacccgcaggcgattgtcactggcggtgatgccagccgcgccgccagcgtcgcgcgcttctggcagccgcagcttaacgtgccggtgattgcgcttaacgatgactggctgagccggccgggtccgcgcctgctgctggcggcaaaacaattgtgcgaagctttacatccgacgaaaaataaagcattaccagactaa

SEQ ID NO: 2824 - DNA, 306 bp, Zea mays
  Peptide Sequence Number=SeqID_9120
  Probeset Number=SeqID_17227
ctgtgcctcatgatctcaccatcccgtgtcctagtcctaggccaacgcacaggtgtcgtcgagccccacggctcaagacgtgtccggcggtgcgcccgtgtccgtcggcgatctggtaccaacttgccggctcggccggcgtgcaccatggcccttgcccttcccggcggcgcgcgtcggcatggcagcagccagcagcgaaagggagcgagcctgcagctggtccttccgccgtgaagtcgaccgggccaccgtcgagaccttcctcctcatggggctcacaccgatcctccaccggtacctcgg

SEQ ID NO: 2825 - DNA, 649 bp, Zea mays
  Probeset Number=SeqID_17228
ttagcccacacgcatacgccgccgcctgcctcgacgttcgctggagcggaagatcgatgcgcacgggctctcctttgctacgccgctgcctgcctcaaggttcgcttgagcggatgatgcacccgagctctcctccgacgattctggccgcgcgcaaccgtcacccctgcccccgcctccaaccaaccccgctccgctcgcgccgaaatcatcgcgctttcgcccatgccgccagatgccgcgccggccaccatcagcgtccctccccacaactactgcctccatttgtgtgttcacatcttctccctggcaactgcttctatcatctccaccaccatccccacgttctcctcgctccgcctctcgcgtcgaccccgcggaggccgctctcggggacctcctcctcgccgccctacaccacttcgagctcggccagccgccagacccctcgatgctccgatccctcctcctccaaatcggaatctccgacgccgcttcttgccgctccgaaatcgagtacctggaggagcaaatcctgagccaagaggaggacgccgacctccccctcattggcggcgtcgtcgccttgctccggtactgcctcttctcccttttcgaccccagcaacacaaaggcgttgcgtgtttgg

SEQ ID NO: 2826 - DNA, 411 bp, Zea mays
  Peptide Sequence Number=SeqID_9121
  Probeset Number=SeqID_17229
ctcctccagctctcgtgcccccgagttcttccgttgccggcgcctggtgccaacgacgagcttgtggagagaagagattcaggtcttcagaatcggactagtgagcctctatgtcgcacggaatacattcgttacctcgcttgggtggattcacgtcctgtgccgccagaatctttcgccgtgttcgtcctccgtcgtggatccgcatcacgccgtgggcagcgatctgcgctacgatcactgggtaggcgcgtggggtacaggaacatcggaccgggtgtctccggccatggcaccaccgcggggcgcaagcgcgccgccgcttggccaccgctgggttgggtgatggaaccgatcgtcggatccggatctaacggcgctattctgcggcggggatcggatctggtcatc

SEQ ID NO: 2827 - DNA, 296 bp, Zea mays
  misc_feature (60)..(60): n is a, c, g, or t
  Probeset Number=SeqID_17230
ctgccgcgccaaaccggctcaaggtgcgggcgggcgtcctgaccggacgcgtcctcggcnacgtggtggacgcgcgcgcgaaggcggatgcgctccgcgagtgggcggcggcggacgacgtgccgctcgtccggacggtggcggtcggtgacggcgcgaacgacctcgagatgatgcgtgtcgccgccctgtcggtggcgttcgacgcgaagccgcgcgtgcgcgaggaggcggacgtcgcggtggtcgaccgcgacctgtccgccgtgctcgcgacgctcggcctgcggggctga

SEQ ID NO: 2828 - DNA, 429 bp, Zea mays
  Peptide Sequence Number=SeqID_9122
  Probeset Number=SeqID_17231
atgggcggcgggggcagcgcccaggagaacgagaccatcgtgtcgtgcctcgcggacgtcatccgcggagccgcgccgccgccgtcgccgtccccgtggccgccagtagcggcagccgcaagcgacgctgccgcggcgtcgtacgggcccgcgccgatgcagatgcagatgcagatgatgcaggcctccggctccgggcactcggcgagcgtggcgcaagatggtggggccacgatgatgacgacgatgatcggcacggacgacacggacttttcctgggatccctcgctggccgatcatcagatgatggagcaggtccaccgcgacatgctgcacgtggtgggtgtcgcccggctcgcggacacggtgtggccgcggcacaccacccccgcgggcgcttggcactgtccgctgtgcccgcagatatag

SEQ ID NO: 2829 - DNA, 677 bp, Zea mays
  Probeset Number=SeqID_17232
gacaagcaggtcagcttctcggcgggctgcatcaaagagaaccgtctcaccgcgccgctcggttcggcctccaccaacgattactacgcgcgcgccgaacagcagcgtcatttctggcgtgactggcacgatggccagcagtgggatcgcgtgcagagcgaactgctgcaacgttaccaggcgcagtttggtgagtcggtaaaatattacgccatcgatcagggcaactggccgccaatggcgatttcgcagcactggcataacggcgtgtggtatttcttcacgctcggcatgagtatccggccgatgccgcaggtggattacctgtttgatgagctggcaccgcagtaccggcgtgtagagctggcgatggcggtggatggcgaagtgatgaccgagaccaacgcggtgcagatggccagcgcgctggcggagtttgctcatctgccatgggcgcggctgacgtggattggcgaagggcacacgctggcgtcggaagttgcgccggtcggctttgaaagcttcctgctggccaacgggctggcgggcgaaaacgcgcaactgcggctgccgaagcgcgacggcgatcggccaaatctgctgtgggcgacgccgatcaccgaagccgagcggctgtttgcccaggcggacgatcgcggcggccagcagctgctgca

SEQ ID NO: 2830 - DNA, 346 bp, Zea mays
  Peptide Sequence Number=SeqID_9123
  Probeset Number=SeqID_17233
ctaaaccctaaactctatccctccccccagccggccaccacccagcccctggccgccgcctctgctctctccctcccccgccggccgccgctgttccctccctccccaagccggccgccgctgctccctccctccccttccctccggccgctgcccgcacagccagcccgtggccgcgccgccgctgccctttccttcggccgccgcccgcccgcctagccagcccctggccgtcgccgcatcctctttgctcaccagtccggccgccagccagcccagctcgccgccggtcgtcctctgcgcgcggccgtgtcctgccatcggctccccggcgccgccggcaccc

SEQ ID NO: 2831 - DNA, 222 bp, Zea mays
  Probeset Number=SeqID_17234
agcctaatagtagccagctatacgtgatccaccacagtgtgcagtgctgagtgcgctcgggtgcgcgtttccttatcggctctgccgcgtcgatgtccagttaggtcagacagtgtggttcaagccttgtgtcacagcatatttagtaagggtaggtttaactccctcgtcattccgaccctgatccatgcgcatagcatcctgcccatctgggcgtgccag

SEQ ID NO: 2832 - DNA, 424 bp, Zea mays
  Peptide Sequence Number=SeqID_9124
  Probeset Number=SeqID_17235
tgcagtgcagatgaatgcagatgcgctgggaacctgggacgacgatcatgcattgcggcccggcccggcccaccgggagtccgggacacaaagaccgtcgccacgagtgacgagaacacggagcgaggccgatggagggacgcacagcacagggcgtgccgcgtgcgtggcttgcctgaccaaccggagtggtgtgatctgcccgacgacgaacagggtggtgctgtgctgcccggctggtcagctgtgtatggagaccctgtcggctaaggatcaacaagagtaccaggagcacacgaagcagctgatcaaggaggcccaggcgatgtttttggccaacttcaaggtggaccaaaatcaaaaggtcgtccggcagcgggtgactgatctggtttcgctccgacctattacaactacccccaaa

SEQ ID NO: 2833 - DNA, 256 bp, Zea mays
  Probeset Number=SeqID_17236
atgcgggctggaacctccacccgcttggtgcttgtgggcttgcccggcttctcacgcgctaggagcgggctcccgtccgccactccgacgccgactcaagctgaccggcgctgggcgaccggctggcgcgctctcgtggcgctcgccgtcgacttaggacgggttaactggaaacactctgggggagccgagcgcatgcgacctgctacacatcctactctacacacctggctgactggggaatcgcaccggaccc

SEQ ID NO: 2834 - DNA, 379 bp, Zea mays
  Peptide Sequence Number=SeqID_9125
  Probeset Number=SeqID_17237
actcccgcgcgatcgtcaaccggacgatgaagagcgtgaagaaagctggcagcacgttgtggcattggctaccacgctcttggctgatgagtgggcgctggacaacgaaaccctgctgcaccgcctgtatcatgaagatgccgagcgcctgttcgatatccagccgctgcgcttcaagtgcagctgctcgcgcgaacgttccggcaatgcgctggtcagattgggcgagcacgatgccaaggcgctggtggaagagtgcggcgggcaggtggagatcgattgccaattctgcaacgagcgctatttcttctacgccagcgatgtggcgcaactgtttgccggtggcggcactgacgtagcctcagaaactcgtcactga

SEQ ID NO: 2835 - DNA, 290 bp, Zea mays
  Peptide Sequence Number=SeqID_9126
  Probeset Number=SeqID_17238
ctccacagggctgaccctagatagcctcgtggctgcaggctgccttggtgctgacgcgttatgtcatgcggtgtgtggtaagtcggtggattacagtacaccaactgatgagttgtcttggtctagttcccgcacagctacagagatgcgatgggagtgagtgagacatcaacctgaggagaggcctgatggtcagaggacgctccccgggtgatgattcaatgcatatcgcagaggggttgacagcgtttagcctgttgtggaacgacagatgaatgcacgccaaacaa

SEQ ID NO: 2836 - DNA, 660 bp, Zea mays
  Peptide Sequence Number=SeqID_9127
  Probeset Number=SeqID_17239
atggatccgcggcgcatccgccgcatcatccgcaacctcatcggcaacgcgatcgagcacggcgagggcaagccgatccacgtcctggtcgacagcaacgcgggggccgtcgcgctcgccgtgcgcgaccacggcatgggcatgagcgagggcgacgtgggccacgtcttcgaccggttctggcgggccgacccctcccggcgccgcaccatcggcggcaccgggctggggctcgcgatctcgcaggaggacgcgctgatccacggcggcgtgatcgacgtgtggtcgcagctcggcgacggctcctgcttccgcctgaccctgccgcggcgccgcagcggctcggcggcgaactcgccgatcccgctgccgccggccgacgcgctcgatctcgccgagctggaacgcgaggccaacgccgccgccgaagacctcgaggagggcgaactcggcgacgtcgtgcgcggcggctcggtgtccgcgcaggacaacggcttcgaccagctcgacttccacccgaacccgcccgcgaagggcgagagccagcaggacatcctgaacggcttcatcgacgccgcggtgagccctgacggcggctaccagatcgcgcgcgcgttcctgtccgactcgaaccagagccagtggaaccccgactactcg

SEQ ID NO: 2837 - DNA, 235 bp, Zea mays
  Peptide Sequence Number=SeqID_9128
  Probeset Number=SeqID_17240
ctaattgcacttgatatgggtgcattgattgctggtgcaaaatatcgtggagagttcgaggatagactcaaggctgttctcaaagaagttacagattctgatgggcagaccgttcttttcattgatgagattcacacagttgtcggagcaggtaactatgcaggatatcttgatacgaacagcctgcggagccccttgaggaaacagggcgacataactaaaaacagggtcgggg

SEQ ID NO: 2838 - DNA, 624 bp, Zea mays
  misc_feature (595)..(595): n is a, c, g, or t
  Peptide Sequence Number=SeqID_9129
  Probeset Number=SeqID_17241
atggcttcgccgttggtcactcatgccgtcatgcgcgttgttgctctgcattttggctccggccaatgcaacccctcgcgcacggccacaccacacagccaaacttcattcacaaaccgacgagtcgatgcgtgcccggttgctacgcactattgcccttttctcccccagtcccgacctatctcagttgactcagctgagtgcgagtccgacgcatgcacgccccggcgggcctttttccgtttcgtgccgagtaggcgcgccgccgatgagtcgtccctttcgcgtcgccttttgctggaaaagcacatgcacgtagtccccgccgaggcacgagcgccacaagcaatagctccctctccctctgccagttatgttcaatgcgtgcgacggcggcctgactcggagcaccatgatccttcttccctcgtacgtgttgccgtgttggctacccagcgaaagagagagaaccagagccgggggcggccgggcggggcacgagcacgactcgtctcactcagcctcgccgctcacggtcccggcgtcgttttcggccgaaagagatggtcggatctcacacgcgacgaccgacgcnagggcgagacggcaccgacgggaatctgc

SEQ ID NO: 2839 - DNA, 582 bp, Zea mays
  Probeset Number=SeqID_17242
acctgctccgcgacgaacgcccggacatcgtcgtcgtcgtcggggccgaccacgtctaccggatggacttccaccagatggtcgtggcccacatcgcgtccggccgcagtgccacggtcgccgcgatccgccagcccatcggcctcgccgaccagttcggtgtcatccaggtggcggaggacgacccgacgaggatcgacgcgttcctcgagaagccgaaggacgccgtcgggctcgccgactcccccggcgagatcctcgcgtcgatgggcaactacgtcttcaacgcggacgccctcgtcgacgcggtcctccgggacggacaggtcgagacgtcgaaccacgacatgggcggcgacatcgtcccggacttcgtgaaccgcggcgacgccggcgtgtacgacctccagcgcaacgacgtgcccggctcgaacgagcgggaccggtactactggcgggacgtcgggacgatcgactcgttctacgacgcccacatggaccttatcgggcccgtgcccgtgtttaacctgtacaaccaggactggccgatctttaaccagcagacgaacctgcccccggcga

SEQ ID NO: 2840 - DNA, 347 bp, Zea mays
  Peptide Sequence Number=SeqID_9130
  Probeset Number=SeqID_17243
tgcagctgctgttccagctggctttgcagttgttgctgctgcgcgctgagctgcgtcagcgtttgctcacgctcttcaagccgggcgagttcggcctgccagcgcgccagttcgccgccccagcgggcgacagcggcttcactcaggcgaaacgcctgctgctgcgccagctgctgttgtaagcgttcacttgcctgctgatgctgatccagcgcctgctggctgagtaacagggttttttgctgttcgctcagcagcgcctgctgctgctcaagctgctgtgcacggctggcgatctgctgatcgagcgggatcacctgttcgctcagcagcgtctccagctgttg

SEQ ID NO: 2841 - DNA, 298 bp, Zea mays
  Probeset Number=SeqID_17244
ctttcagcaataagtcatttgagaatgcatgcatggaatttgatgaagagaatctaaagcctacattcaagattctgtggggaataccaggtcgctcgaatgcaatcaatattactgaaaggttgggtttgcctttggatatagtagaaaactccaggcatttacttggaacagctggtgcagagataaatgctgtatgctttttttgggcacttttctgtacttagaacttgcacatggttttgttgtccaaaatatcttgttatgatcctaagttctcgaagttcatcttctgcag

SEQ ID NO: 2842 - DNA, 247 bp, Zea mays
  Peptide Sequence Number=SeqID_9131
  Probeset Number=SeqID_17245
acctgcagaactggcgcatggagctgcttaacctgccctcttacacttgcttgcgggttgggcccgaccatgcgccgagagagaaggcatcggtgaactcaaagggggagcaactcaagagtcccaagattctcaagcacgcaccaccaagcacaccactccgccgcgaaggagcagatcgcccaacaacggcgacacagtgcgtactcccaagatcttgacgccgtaccgagccagacgggcacaa

SEQ ID NO: 2843 - DNA, 289 bp, Zea mays
  Peptide Sequence Number=SeqID_9132
  Probeset Number=SeqID_17246
cctgacggcgccgataaagccgccaccgaccaaccaatctgtcgcacatctccacccgtgtcctctgtggccaggatggctccaaggctatggcgagacattctccgaatgcacacgcgacgaccatgacgcagaccttgacctcgccgaactctactacatccctatgatgctttccgtgggtgctaacgtccctgacaccatgctgaaggaggccgcgcccatgaccataatggcgcccgtcgcagcacaccacttcatgaacgctgtagctctacggtcgccctga

SEQ ID NO: 2844 - DNA, 1166 bp, Zea mays
  misc_feature (1)..(303): n is a, c, g, or t
  misc_feature (1151)..(1166): n is a, c, g, or t
  Probeset Number=SeqID_17247
nnnnnnnnnnnnnnnnnnnnnnnnnnnnnnnnnnnnnnnnnnnnnnnnnnnnnnnnnnnnnnnnnnnnnnnnnnnnnnnnnnnnnnnnnnnnnnnnnnnnnnnnnnnnnnnnnnnnnnnnnnnnnnnnnnnnnnnnnnnnnnnnnnnnnnnnnnnnnnnnnnnnnnnnnnnnnnnnnnnnnnnnnnnnnnnnnnnnnnnnnnnnnnnnnnnnnnnnnnnnnnnnnnnnnnnnnnnnnnnnnnnnnnnnnnnnnnnnnnnnnnnnnnnnnnnnnnnnnnnnnnnnnnnnnnnnnnnnnnnnnnncgatcgcgcagacgctcacgtcgctggacttctggctgatgttcgcgtcgttcctgatgggcgtgggcatagggctggccgtgatgaacaacctggggcagatgggcgtggccatgggctacgtcgacgtctccctcttcatctccatgaccagcatctggggattcttcggtcgcatcgcctccggcaccatctccgagcacttcatcaagtaagttatttattacccgatttggcaactggcaaggaatggaatcatataactcatgcgctacccggtttagcagcgggtcagtgacatccgacgactcgccggcggtgacgcccaggctgctgtccttgatgtccagctccagccccgaaaactgctcaggctgtacccactccatctgtgcccactggttcgttcctggctccgaatttctttcccatccatctcccttgcgcttcctggtcccttgttgtacatgggtcgccgtgtatgtgatgcgcttgaactggtaggcttctaagtgagacttgtctgcattctgctcttcgaaagccatcatatcctccgtagcagtccctggttgaaggttggtttcatatttacttccttgattagcaccattgtagcttatagaaagtaaaacattggcggatggcaaagtcagatccccatgaatatggtccttttccagatatacctcctcatctaggatgagttgatccttaaaccaagcacccctaatactgtctatgcctagatcagtgatgtcgttgtcgatcttacgcttggtgcccctaataacaatcttattaggtccatcagcctttcctgttctgagcaagttgaagtaggcatnnnnnnnnnnnnnnnn

SEQ ID NO: 2845 - DNA, 460 bp, Zea mays
  Peptide Sequence Number=SeqID_9133
  Probeset Number=SeqID_17248
gtgcaaacgcgctgaacgcgcacacaatataaaaggcgcgcggcgccgagtgcgacctggtcacgcagagggaatccagccggctggagatgatgtcccccagcctgaaacagcgcctatcctccaagaccggtgttgctcttgtactgatcatgcgcgaatatagcccgactgcgatggtggaaacgctgcgccataagctgtcgatctcccgatacaactcgattgtgccgggcggcggttatcataacttcaaagatttcatcggcctcccgaacgtgggcgaagcccatctggaaaatcgtccgctgccgcagattcgtcatatcgggtgttcatgggttccgcaccggccttcattgccatcacgcaatgctcgatgatgctgcttcattgtccgcgccgctccagtggggaggagggggacctttgtcgtcaaaaaaaaaactcccccccccgt

SEQ ID NO: 2846 - DNA, 426 bp, Zea mays
  Peptide Sequence Number=SeqID_9134
  Probeset Number=SeqID_17249
gcatttcgggttggtctctgaggtcgtcctgagtttctccttaggtctgtgacctcgccatttgtggttgttaaggtgcttagcatagtatctggatatgcctttcgtctccaaggctgctcgatactgttttattcaggactgaccccgagacatacggatagttcttgcagtcactattgcgttggatatatggcatgttcatggataaacgtccgttcttcagtaagtctgttagccgcttcttctttaggtttgcgttcgatatgtctcaccacattgggattgccgaactacgtttggtcttcggcagtgtgattagtgggtttgcaccgccattgaaggagaaacattagttgctcctatggtaagcacttatgcctcttcatgtgccgaggtcactgggcgtggataaacctcaggggg

SEQ ID NO: 2847 - DNA, 379 bp, Zea mays
  Peptide Sequence Number=SeqID_9135
  Probeset Number=SeqID_17250
atggacaaggaaggtagagacgactgcgttcgcacgtctgacagtttccaagccgtagcgattgctagcacgctagccttccccgttgtgtcggcggcgttggtgcggacctgcggctctggcttcgcctgtgtggcagcgacaaaagcgctcgcgagcggtggctcggacaggcggggctggattatctatgaggcgacgtgggcttacggcacacacgagcggcggtgcaccaactcaccatcaaaggtgcggcggcggctgacgcgtcggctctggtcggcgacgtatgtgagtgacagccgcacactgtggctttggctggcggcgcgggtttcctgcgaggcggcagcacgatccaacggctcaagctcacaac

SEQ ID NO: 2848 - DNA, 453 bp, Zea mays
  Probeset Number=SeqID_17251
ctacagcagctcaatctccttgcccagggtatcgatttttcccttcttttcatccaatgctgccttcagcttcctgatgtcaccatctttctcaccactgcagttctctagctcctcaactttgcttagcctccagttccctgtattagacacagcagcagccagctccgactccaaaatctgcaccctcgaatccacctctgcctccttagcactcaggacctcttgttcctccaactttgccttcacctcgacctccatttccaaccggcaagcctcagccgccttccagaactccagcggactcctttccacctccaccttctcgctggacaccatctgaaccgcctccttggcccgcaccaatttcttcgccaattcacccttctcgccaaagagctcggagttcctaccctccagctcggccaccactgcctccagtctcgtgacctt

SEQ ID NO: 2849 - DNA, 416 bp, Zea mays
  Peptide Sequence Number=SeqID_9136
  Probeset Number=SeqID_17252
atgatcggcgcgaacgagaagacgggctacaccgcgctcgcgacgatgctgctcggcgtgctggccggcgtgctcgcgcgcagcggcgacctgggcagcgcgatcgcgatgggcgggcaggcgtatgcggtcgacaaccagttgcgcttctcgcggtcggccgagcgcgaggccgatcgcgtcgggtttcagctgctggcgggcgccggctacgacccgtacgggatgccgggcttcttcgaacggctcgaacgcgcgtcgatgggcgacgcgggcgtgccggcctatgcgcgcacgcacccgttgacgggcgagcggatcgccgacatggaggatcgcgcgcggcgtgcgccgtaccggcagccgcgccagtcggccgaatacggtttcgtgcgcgcacggctgcgcatcctgca

SEQ ID NO: 2850 - DNA, 297 bp, Zea mays
  Peptide Sequence Number=SeqID_9137
  Probeset Number=SeqID_17253
ttcagagttaagccgacaatgtcgttgcaagaatcgagcgggtatcgtcgataacttagtattcggatgtagaggcgtcttgtctcgtcaagaactgcaagggcgcgacagctccgacaggctggcggcgtacggtgacccggcgtccacactcatgatcagcacccagttgcagcaaacgatccacacgagcagcgccgatggcagcaacactgcccagcatcctgccatcctagcctcgagccggaattccgggagacttaccggtaacagccgtaggcagttgccgggactatg

SEQ ID NO: 2851 - DNA, 482 bp, Zea mays
  Probeset Number=SeqID_17254
cggtgcgcccgtcggcgtcgcgctccgtgcgctcgccggcgcgttgcgacgctccgcggcgtcggaccgggcgatccgtgtcgcgatcgccggtccgcgcgcgagcgcccgggtggtgctggcgctgccggtgctcgggctcgcgctcgggtcgacgtggggtgccggggccgtccaggtgctcgtcacgaccccggtcggctgggggtgttgcgtggtcgcggccgggctggtggccgtcggacgttcgtggaccgcgcggctcgtgcgcgcggcgaccccggacgggcgcgtgcccggggtcctgctcgacgcgtgggccgttgcggtgtcgggcggcggatcgtgggcggccggcggcgaggcggtgcgagcggcgttcgacggcaccggtgccggtgctgtgccctacgagggggaacgactgcgcgaggtcctcctgctcgcacagcgtgcccgcggccccgcgagggagctcctgc

SEQ ID NO: 2852 - DNA, 363 bp, Zea mays
  Peptide Sequence Number=SeqID_9138
  Probeset Number=SeqID_17255
tccgatcggcccctgggttggcttccagtcaccgttccacgatcagcgcagcgtggtgggcgttgctggctgcaagcccgcgcggctgggatttgctgaatgcagcgatgcgggacagcggcaaacggctcggcgatgttcggttctgtcagcatcgtccgggagtccggcgttaacagcgtgcgcgtgggcgatacctactttgtcgggcatctgccgtggtgggagcggctgtggaatctgctggccacccatccggtatggctgaccgtgtgtgccgtgctggtggtgatcctgttcgccctgatggcctggcgcctgatgcgcatggtgagccgtcgtcgcctggctgagctggatgcc

SEQ ID NO: 2853 - DNA, 396 bp, Zea mays
  Peptide Sequence Number=SeqID_9139
  Probeset Number=SeqID_17256
atgggcgcggacggcatgctgttccgcgcggtgggccagatcgatccgcgcacgctcgcgccacaggtggcgctggccctgctgggcgcgtggacggtggtgctgatgctgtggggcaacttcggtcagctggtggactacaccacggtgggcgagtggctgggccatgcgttcggcatcggcacgctgttctggtaccgctggaagttcgtggacgagccggcgccgtaccgcgtgccgttgttcccgctgatgccgctggtgttcgtggtcaccgtgctgggcgtgatcgacgtcaccgacatcgccaaccccggcgacgccggcatgagcctggtgatcattgcgctgggcgtgccggtgtactggatctggcggcgctggcagcgcgcctga

SEQ ID NO: 2854 - DNA, 330 bp, Zea mays
  Peptide Sequence Number=SeqID_9140
  Probeset Number=SeqID_17257
tgcagctggcgcaaatcaaggcgcgccatggcgaagacaagcctttcagtgaggtcaacctgagcgacatcgtgcagcaggcctgttttagcggttatgcggcggcgcggcgtaaacagatcgacctggggtttgaagagcagacggcgagccaggtgcagggcgatgcgctgttgctggccgagctgtgcgccaacctgctggacaacgccatcaaatacacgccacacggcggcacggtgaccgcgcggctgaaacaaaaggtgaaggagattgaagacagcgggccgggcatcgcggcggatcagcagcggcaggcgaaacaggtcg

SEQ ID NO: 2855 - DNA, 315 bp, Zea mays
  Peptide Sequence Number=SeqID_9141
  Probeset Number=SeqID_17258
caggggccatgggcctccacatcgtggccgcccgtcctgcaacctgaacctaaacgcccaacaaccgcgggccgcccgccggcaacaatccggttaatggttccaatgggggaatgggcggcgcctgtcccgaaaataatgaaccagaaccactaccagacccagcaggcttccaactcttttgcaaaccagtggttaacgaaccccttggtcaacaacagcgtaatgtggaacaaggcgccgaacgccgcccatggaagcgccgcctacgggggagggcccgacccggaaggtgccgccccaagcaacgttggc

SEQ ID NO: 2856 - DNA, 273 bp, Zea mays
  Probeset Number=SeqID_17259
agggtgcaggtccacgtgaccgccggcgccggcgatgtcggcacgtcggcctcgtcgccgtcagcaggcccgccgccgccggccagccgggaggtggaggagaccgtgcgggtgcacgcgcgggcggcgcggagcgacgtggcggagctggtcgcccgcgcgctggccgcgatcaaaggcatggggcgcttcacggtggtggccgttgacgccggccggtccagcgatggcggcggtgactttgctcaagccacattcacgctgcgagcgacg

SEQ ID NO: 2857 - DNA, 463 bp, Zea mays
  Peptide Sequence Number=SeqID_9142
  Probeset Number=SeqID_17260
tgcagtcgttcccgccgctgctgctgtcggggctgcgcaacctgctgggcggcatcggcctcttcatcttcgcgctgcgccgcaagcccgaatggccgactttgctggaaatccgcaactcggcgatcgtcggcacgatgctggtcgcgctgtcctcgggcacgatcgcgctcggcatgcgcaccgtcagcagcggctcggctgcggtgatggtggccacggtgccgctgttcgcgaccgtgatcgcggcggtcgccggccggccggtgacgaagggcgagtgggcggccgtcgcgctcgggatggtcggcatcgtcgtactgaactcgggcggcgcggccgccgcgaactcggcgctcggcacgatctgcgtgctggccggcgcgctgttctgggcgggcggcgcgcatctcgcgacgcggctcaagctgccgtcggacctgttcctgtcgacgtcgctgca

SEQ ID NO: 2858 - DNA, 554 bp, Zea mays
  Peptide Sequence Number=SeqID_9143
  Probeset Number=SeqID_17261
atgctgatcggcggcgaacgccgccattcgtccagcggcgcgaccttcgtgcgccgcaacccgctcgacggcgaagtcgcgtcggccgcacccgcgtgcacggtcgacgatgcgcgcgcggcggccgacgcggccgcgcgcgcatttcccgaatgggcggcgctcggccccggcgcgcgccgcgcgctgctgctgaaagcggccgccgcgctcgaagcgaagcacgagcagttcgtcgccgcgatggcggccgaaaccggcgcgtcggcattgtgggccggcttcaacgtgcatcttgccgcgagcgggctcgtggaggccgcgtcgctgaccacgcaggtcggcggcgagctgattccgtccgacgtgccgggcgcgctcgcgatgggcgtgcggcagccggccggcgtcgtgctcggcatcgcgccgtggaatgcgccggtgatcctcgcgacgcgcgcgctcgcgctgccgctcgcatgcggcaacacggtcgtgctgaagggctccgaactgtgtccggtcacgcacgggctgatcgtcgaggcgctgca

SEQ ID NO: 2859 - DNA, 267 bp, Zea mays
  Peptide Sequence Number=SeqID_9144
  Probeset Number=SeqID_17262
gccctcgtggcccgcgtggccggtgtcgcccgccgcgctccgcgccgtctggtgctgcccgccgtggccgggtttctcggggttggcgcccccgtcttgcgtattccggctctgcgcaggctcccccgctcgttttcgggcggctccctcctgccctccggtctggcggtttggctctcctccccctggctgccgcgggtgcgtcccctctccccctgtctctctgtgtgcctgcccccggccggggcccttgccccgtccgcctgg

SEQ ID NO: 2860 - DNA, 250 bp, Zea mays
  Probeset Number=SeqID_17263
aaccctgccattgaatccatacaagtctatcatccaatatcggaaatattgttctgtttagcctcaacaacataatccaggagtgtctttaccggttgatggttctagtgaactaaaacccaagaggacaaagctgaaaggaaggagggcagtgacaagatttttgaaaaccttgagatggaaaaagaaaaaggagtttcaaagaatgactgcagaggagaagattttgtacaaactgaagctagtaaga

SEQ ID NO: 2861 - DNA, 340 bp, Zea mays
  Peptide Sequence Number=SeqID_9145
  Probeset Number=SeqID_17264
ccggatgcgctcggcggccggctgggcccgacaccaatgccacggtggcgcggcacatggtggcagatcgcctgggtgctgtgccgtcgcactcacccggtgagatgagctgtggatgcggcgcacttctggacgtgcatggaaagcgaaccgcggatctaccgcgaatgatcagggccagctgcacgcaatgtcggcgctgtgcccgcacctcaaatgcgtcgttcaatggaacgggcatgagcgcacatgggactgcccctgccacggcagccgcttttcagccaccggggcgctgatggagggatccgccacgcagggcctcacaccggaaccgact

SEQ ID NO: 2862 - DNA, 263 bp, Zea mays
  Peptide Sequence Number=SeqID_9146
  Probeset Number=SeqID_17265
ctggtgcccagcctgtcgcgaggcatggaccaggaccagtcacgccattcactccgacagcgcccgccgtggagacgaagacgccggcatctgttccagcgcaggccactctgaccagtcacgccggcatctgttccgccgtggagacctgggtgcacgcacacgatgtcaaggcgcagctcctgcacgacacggtgaccaagaggagcttgtcgatgtacggccatctccgttgccctggcgtgcacgagcatgttggctga

SEQ ID NO: 2863 - DNA, 666 bp, Zea mays
  Probeset Number=SeqID_17266
atggccgccatggtcaacgccggccagctgatggacatctccggctcgatcgggaagaccgccaagagcgagatcagcgacggcacgttcaagggctacgagcaggacggcaagacgtgggccatgcccgtcgacgtcaacccggagggcatctggtacagccaggacctcttcaagcaggccggcatcgagggcacgcccaccacgatcgacgagctgaacgccgacatcgccaagctcaaggccgcgaacatccagccggtcgccgtcggcgccaaggacgcctggccggccgcgcactggtactacaacttcgcgctccgggcatgcccgagcagcgtcctgaccaagacggcgaaggacctgaagttcacgaactcgtgctgggaacaggcgggcaaggacaccaaggcgttcttcgacacgaagcccttcaacgacggctacctcaccaccgccgcccagcagggtgccggcagctccgccggtctcatcgcgaaccacaaggccgcgatggagctgatgggcgcgtgggacccgggcgtgatctcctcgctcaccccggatggcaagccgctcggggacctcggcttcttcccgttcccggaggtctccggcggcaagggcgctcccggctcgatgatgggcgccgtccgacgggttact

SEQ ID NO: 2864 - DNA, 704 bp, Zea mays
  Peptide Sequence Number=SeqID_9147
  Probeset Number=SeqID_17267
gctctggtgggcgttcttcctcctgctctccctcctggcggtggccgaccacgtggcgaccaggctcgacgggctcctggtaccggcgctctcgtgggcgttcgacgccgtctcggttgctgctgccgtggttctgctctgcgctgggctcgtaggccggagggagggaggcggctctgcggccgaggagcctctgctcaacggcacgcatgagtctgccgacggtagcggccgcggcgacgccgaggcgtccaggttcaccggcgccggctttttcagcttgctcaccttctcgtggatgggcccccttctcgcggtcggccacaagaagaccctcggcctggacgacgtcccggggctcgaccccggcgacagcatctccagcctgctcccgatgttcaaggtcaacctagaggcggtggccggcgacgtctccggctctggccggaaggccgtcacggcgttcaagctcactaaggccctgttgcgcaccgtgtggtggcacgtcgcggtgaccgcgttctacgcgctggtctacaatgtcgccacctacgtcggcccgtacctcatcgactccctggtgcagtacctcaacggcgacgagaggtatgcgagcaaggggcagctccttgtcctcgcgttcattgtcgccaaggtgttcgagtgcgtgtcgcagcgccactggttcttccggctgcaggtcg

SEQ ID NO: 2865 - DNA, 342 bp, Zea mays
  Peptide Sequence Number=SeqID_9148
  Probeset Number=SeqID_17268
tacccgcgatcctctagatacgacctgcagggctgtgacgcgtatgagctcctcaactccaccgcgggtaaccgcctgtctgagatggacgccactccgcacaggagcctgccaggcttcggttccgtcgacagggtgaaggccaagctggaggccgcctgccccaacacggtttcctgcgctgacgtcctcacgctcatggcccgcgacgccgtcgggctggccaagggccccgtctgggccgtagcgctcgggaggcaagaccgcagggtgttcacacccaccgaagcgaaccaggtggagcccttggtgctgcccttctactatcagctgatcttcttt

SEQ ID NO: 2866 - DNA, 545 bp, Zea mays
  Peptide Sequence Number=SeqID_9149
  Probeset Number=SeqID_17269
atgccacgtccacttaacgattcccagacggcgcttaacgccacaaatctgctgccgctggcgcagcgctacagcggcccgttctgggcttacgatgccgaaatcattcagcagcgtattgcgcagctcagcgcgtttgacgtggtgcgctttgcgcaaaaggcctgctcgaatattcatattctgcgcctgatgcgcgctgccggcgtcaaggtcgattcggtctcgctcggcgagatcgaacgtgcgctggccgccggttttcagccgggcggcgaggatattgtgttcaccgccgatgtgctggactcaccgacgctggcgcgcatcgccgagctgaaggtgccggtgaatgccggctccgtggatatgctgcatcagctcggcgcggtttcgccgggtcacagcgtctggctgcgcattaatccgggctttggccacggtcacagccagaaaaccaataccggcggcgaaaacagtaagcacggcatctggcacagcgatctgccgctggcgctggcggcgatccagcagcatggcctgca

SEQ ID NO: 2867 - DNA, 203 bp, Zea mays
  Peptide Sequence Number=SeqID_9150
  Probeset Number=SeqID_17270
atggccaatgaagattctgcgcggccgagcgccatgggtgagcataggggattcaacgagctggagccggcggtcaggagagtgagcagggggagcacgactagaggagctcggggcgcgacggttggagcaggcggccatgggcaggggcacgcggcgatgggagccggcgtgatagagaaggcgctggaagcaggcgtcgg

SEQ ID NO: 2868 - DNA, 463 bp, Zea mays
  Probeset Number=SeqID_17271
gacattgaataagacattgccgccaaggtgcagtgccatttctgcaacaatttgatacaggtgagcggcagccatgcccgacaaccagcactgccccgcttgtggcgccctcaaccagtgcagcctggccgacccgcgccgggccacccaggcctgctggtgttacagcgtgaccatcgaccctgccgtgctcgaggcactgcccgccgagctgcgcgacaaagcctgcctgtgcccgcgctgcgccgccgtcgaagagcaacttcgctcccccgcttccgactgaccgtttgccatgcgcctcgaccgtttcctcgccaacctgcccagccacaaccgtcagcaagtccgcctgatgctggcgcaacgccgcgttcggttgaatggccaggtagtcagcgacccgctggccgaagtgcgcgaattcagccgctggagctggacgaccaactgctgcaggcat

SEQ ID NO: 2869 - DNA, 721 bp, Zea mays
  Peptide Sequence Number=SeqID_9151
  Probeset Number=SeqID_17272
atgaattacttgctaccgagcacgacggaggccggggagcaggaacgctgcgcagcgaaacccacggttgcgcgcaggggtgaactcggttgggcgcggcgattggagcaggcggccactggggcagcgcccaggcacgcacgacgagaatccaagcagggccagtgcgcagcgaccatggaaaagatccgagctgggctacggaagctggagggcgagcaggaaaatccgggctggggcatcacggtctgctgcgcaaccatggagacaagcaaagggagcagggcgccgcagggaaggagctggggactaggcacatggctggaagaggctcggcgcgcagaggaagctccggcaccagggaggaagacgcgcatggcgctgggcgcggtccgagcagaggctagccagacacgcggagcgagcagggagcaagcccggcgcgcgacgcagaggaaaatcaagctgaggagcaccgagctggagctccgaacaggagcaaggagaagggaggggcgcgacgctgggcaggagcagggagggaactccggcgcagggagcagggcgcaggaggaacagaggccgagctcggtgagctgcgcgcagggaagttaggcgccgagcaaaacgcggcaaactgagaagtcgcggcgcaggaagtttggccggtgagagcgcgcggcaggaggaacgagcagggaggagggagaaagagaagggc

SEQ ID NO: 2870 - DNA, 561 bp, Zea mays
  Probeset Number=SeqID_17273
atgagcaattacacagaagccggccgcccacccgacgtggcggccgacgcgggcaacacccagcgcagcaagggcctggccaccggccggctgggcttgctggccagcgtggtgctgggcatttccaccatcgccccggtctacacccttaccggcgcccttggcccgaccgtgcgtgaagtgggagcgcacctgccggcggtgttcatcgtcggctttctgccgatgctgctggtggccttgggctaccgcgaactgaactcggcggagccggatagcggtacttcgtttacctggtcggcgcgtgccttcggcccgatgatcggctggatcggcggctggggcctggtggtcgccaccaccatcgtgttgtcgaacctggcaggggtggcggtcgacttcttctacctgttccttggccagatcaccggcaagcacgagctggcggccttggccgacaacctgctcatcaacataaccacctgttgcgtgttcatcgccctggcggtgtggatctgctgtcgcggcatgaccaccaccatgaccgtgcaatacggcctg

SEQ ID NO: 2871 - DNA, 221 bp, Zea mays
  Peptide Sequence Number=SeqID_9152
  Probeset Number=SeqID_17274
cctacttgctgcctgcagtcgataacctatccagagggaacatggcaaatattagagctctttgatggctatttcctagaacacccagagggcttaagtttatttatgctgatttaggcaatgccaaagctatatccttcttctgaagtttaataacccagtgcctccccttgccttacatttatatgttgatgagatttttttgcttaaccaataatcag

SEQ ID NO: 2872 - DNA, 376 bp, Zea mays
  Probeset Number=SeqID_17275
ctgcagtgtcagatttttaactggccactccagaaatggtgggacagatccactatatgtagctggaaatgcggctgatccagacactactttggttgtgtatatgggtttgacaacacttacatcacttgctccaaagttaatgaatcacggcctgccaccagatacccctgctgttgcattataacgcggcactacaccccagcaacgaacggtcaccacctcattgaaggatcgtgcggataaagtcaaagtacccgatctatttagtccaactctaatgattatctgtgaaagcggtatacttgacacccttctgagctgagtcctcttcacatgaggcactgtctgcctacagatcacctgctgatgctgc

SEQ ID NO: 2873 - DNA, 323 bp, Zea mays
  Peptide Sequence Number=SeqID_9153
  Probeset Number=SeqID_17276
tggcgccaagcaaccaaccacccatattagctcatggccggctctagttaatcgtgcatgcatgccatgcctaacctacttaccacactactgcaaggttactcatatatactctatgcgacaatgcatcgatcgatcgaacaagcatgcatgcatactcgatctatatatgtgtgatgatgatcttgatctttgtttgattcatcagaccctgacgcggaggtgatcgcgctatcgcccaagacgctgctggcgacgaaccggttcgtgtgcgaggtgtgcaacaaggggttccagcgggagcagaacctgcaggcatgcaa

SEQ ID NO: 2874 - DNA, 215 bp, Zea mays
  Peptide Sequence Number=SeqID_9154
  Probeset Number=SeqID_17277
tggtacgtacggttcgacaagatccagggggttcacaagtcgaggcagaaggatgccgagatatcgagttaatggagtggatccagggtttcacatgcccctgatcaccaacggcatgcctttcttcctcagaaacgcggatcagaatgagtgagaaagcaatgcccatactgtgtatacggtagcatcacttgagagtgctaaggcccctgcag

SEQ ID NO: 2875 - DNA, 751 bp, Zea mays
  Probeset Number=SeqID_17278
tgcagggcggcggcatcgccgagaacgcgatcgtgccgatgaacctgctcggtgcgcgcaagacggccgacttcgtcgtgacgggctcgtggtcgcagaagtcgttcaacgaagcgaagaagtacggcacgccgcatctggccgcgtcgggcaagacggccgacggtttcacgcgcgcacccgcccgcgacgaatggcagctgtcggacgatccggcctacgtccatctgtgcaccaacgagacgatcgacggtgtcgagacgttcgagattcccgacctcggcgacgtgccgctcgtcgcggacgtgtcgtcgcacatcctgtcgcgtccgatggacgtcgcgaagtacggcgtgctgttcggcggcgcgcagaagaacatcgggatggccggcgtgacggtcgtgatcgtgcgcgaggacctgctcgatcgcgcgctgtcgatctgcccgtccgcattcgaatggaaaaccgttgcggagaacaactcgctgtacaacacgccgcccacctatgcgatctacatcgcgggcctcgtgttccagtggctgaagcggcagggcggtctcggcgcgatcgaggcacgcaatatcgagaaggcgaagctgctctacgacacgatcgatgcgagcagcttctatctgaacaaggtcgagccggcggtgcgttcgcgcatgaacgtgccgtttttcctggcagacgaaacgcgcaatgaagacttccttgccggcgcaaaggcgcgcgggctgct

SEQ ID NO: 2876 - DNA, 252 bp, Zea mays
  Peptide Sequence Number=SeqID_9155
  Probeset Number=SeqID_17279
atgcacacgggtctctcgccgccggccgggcgcctagcgatagcgcgagatgccatccggccggatgcaccgacgatctctgcgtgcgggctagcgatggcgtcgttctcggaggctcccccagggaacccgaaggcgggcgagaagatcttcaagaccaagtgcgcgcagtgccacacagtcgagaagggcgccggccacaagcaaggtgagctacaccccgcgcccttagtggatcagatccgagctcgg

SEQ ID NO: 2877 - DNA, 341 bp, Zea mays
  Peptide Sequence Number=SeqID_9156
  Probeset Number=SeqID_17280
gatatctatcctgctcttctaccgccgcatggtcaagggaacgttcagacgacgctggaagtggtctgtgtgggcagccatcggcatcaccgtttgctggacgctcgcattctgcattatgctgatcgtgacctgcaacccgactgaagcatcctggaaggtctacgatctcacctacacaaaggactggaagtgtgccgacacacgaacatcaagcttcgttgccggcatcttggccgtgatcagcgatacttattcactggtactgccatggtctatgatctggcccctggagatgccgaggcgtcagaagcttgccctgaacatggtgttcagcttcg

SEQ ID NO: 2878 - DNA, 594 bp, Zea mays
  Peptide Sequence Number=SeqID_9157
  Probeset Number=SeqID_17281
cacgaggtcgctagcgtgaaggacaacggttaccagattgagatctattcccgagcttcgaggaatcgacgatcaagatttggtgaaccactggtcttgagatcaagctcttcaagttctacgagatcgaagaccctgagcatctgtttggtgaaggttgcctttggtgcaatctatgctcaggtaaagaagaaggcgccgaggctaatctccgggagttccaggacttcggcaagttcgaggattagactagcgacctcccccagtcagctgcccatggtgggtttatttacgttggctacgtttcgattctgtgtactttgatttatattatctaaatgactctagtctttaatatcattacttacaactttattgtaattcgaagcattgtgctatgatgagtcatttatgtaatcgctgtgtacgtgaatttctgatcctggcatgtacatggttcgcattcggtttaccttccaaaaccgggtgtgacaaaacataaagggcatggatgtaattttacacaggctgtgtcctgtgcctataaatagaggaacagtaacaccgtaaaaaaaaaaaaaaaaaaaaaaaaaa

SEQ ID NO: 2879 - DNA, 937 bp, Zea mays
  Probeset Number=SeqID_17282
cgcaatagctggggcactgctcgctcgctcgctacgcggacctgtggcgtacgcgtaccactccgagacagcaggcgcgtgcgagagcagcccggcgaggatggggcggatcccgtgctgcgagaaggacagcgtcaagcgcgggcagtggacgcccgaggaggacaacaagctgctctcctacatcacccagtacggcacgcgcaactggcgcctcatccccaagaatgccggactgcagcgatgcgggaagagctgccggctccggtggaccaactacctgcgtcccgacctcaagcacggtgagttcacggacaccgaggagcagaccatcatcaagctgcactccgtcgttggcaacaggtggtcggtgatcgcggcgcagctgccgggtcggacggacaacgacgtcaagaaccactggaacaccaagctgaagaagaagctgtccgggatgggcatcgaccccatcacgcacaagtccttctcgcacctcatggccgagatcgccaccacgctggcgccgccgcaggtggcccacctcgccgaggccgcgctggggtgcttcaaggacgagatgctccacctcctcaccaagaagcgccccaccgacttcccgtcgcccgcggtgcccgacatgaactcggggagattgtcggctatctatcgggggcgagggagtgagacgagggaggatagcaggtatccggaagggggcgacaatatcatggggagggagcggtgtggggggaggacggcgggctcacgggagccgcacgaaacggagggggcgcccgggcaggggcgtctattgcagggggggagggggcgggcattgcgtggcgggcgggacaggcaaagcgaggcaggggtagggagcgctgcatttgataaggcaggcgccgggcccctggcgacgaggtacgtggaggccgga

SEQ ID NO: 2880 - DNA, 362 bp, Zea mays
  Peptide Sequence Number=SeqID_9158
  Probeset Number=SeqID_17283
ctgcagctgcgttcaagaagtacgacgctaatgttagctgtgttgaaagtggcaaggatgctatcagtctacttcaacccccacattgctttgatgcatgttttatggatgttcagatgctagagatggatgggtatgaattaaataaatataaacgctcaacatttgtcgagtaccatttgcgtattcttgcaatgacaaccgatgttatccgggcaacttatggggagcgtatgaaatttggaatggacggatacttgattaaactctgcgacgaggagcaggtataccaagcagtctccagattagtagagggaacgacagatttagctaggtaatgtccaagctgctatggatctgac

SEQ ID NO: 2881 - DNA, 360 bp, Zea mays
  Peptide Sequence Number=SeqID_9159
  Probeset Number=SeqID_17284
ctattgccatgcgtagtgcagagctttccgccctccagcatgcgcatgcctcccctgcctgctcttgatccctggcgtgcctgcaccctgtgtttcccctccctgtccctcctttgctttcgtttttttcccatctccgtcgccgctgttggctctcgtggccctcgggtccccctcgttggccccgtgttgcccttctgttcttccaatcctgcgctcattgctgtgggcttgcctgctgcctgtctttcgcccggggtcggtcctcctcccttgcctttttgtttccttctcgtttccggcgcctccggttttgggcgttgggggctgctccgcggggcccccttcgccgtctgtcct

SEQ ID NO: 2882 - DNA, 299 bp, Zea mays
  Probeset Number=SeqID_17285
cgccgctcagcctcgatgtcgagatccacaatccccaatccttgttcgtcgccatgagcctcgccaggaagatggaactccgggaacaaatcacagcgcaaaccacgccgcaatgggccacgggccgtggtatcctgccgacgtcgcgggccacctaggcgccaccgacggcgacgacggttcccccgaacaccaccatcaccattgaaggtcggccggtcaagaagctctctcatgcggagatggaggaacgccgtcggctcggcctttgctacaactgcaacgataagttcagccat

SEQ ID NO: 2883 - DNA, 464 bp, Zea mays
  Peptide Sequence Number=SeqID_9160
  Probeset Number=SeqID_17286
atgagcgcaggacaagcgcaaagacgcaggagaaacgcgacgcgggaagccaaccaggccgagaccccgagagacaaggacaggcacacccgccacagcgccggcgacgaggccaacgccaactcctacacccggaaccagaccgagagccaggacaccaaccgggcgccgccgccgacggagacgacggagaagaagcgcgccacggaggcgagcgaggcggccaccacacacaacgacatgcagtgcagctgcaagggggacgcggcggccggcgagggcgcgcgcgggaacctccacacgggcgccggcaaaaacaagcccaaggggcaccaggacgaggccaacgccggcaacgcgggccaccaaggcggggccgaccacgcctacagccagccgctggcaccgacaaggagaaaagggccgcgccacgggggccggacccggcgaacatcaccgggggg

SEQ ID NO: 2884 - DNA, 372 bp, Zea mays
  Probeset Number=SeqID_17287
ggcatcattcgcaatgccagtcgtcagatctttcttgcccagcgcgcagcaagctcccacatggccaacaaatgggagttcccgggcggaaaaattgaacagcacgaaagcgcagaacaggcgttaaaacgtgagctgatggaagaaaccggtattgaagtgacggcggcgaaagcgattggtcaggccgaccacagttacgatgacctgcgtgttacgctgcatttcttcctggtggagggctggcagggtgagccgtggggacgcgaaggtcagccgcagcgttgggtcgagcagcgtgatttgctggccgatgaatttccacctgccaaccacgccctgattgcccgcttagtggcgggcgagatttaa

SEQ ID NO: 2885 - DNA, 575 bp, Zea mays
  Peptide Sequence Number=SeqID_9161
  Probeset Number=SeqID_17288
ctcagcggactggtccacccggagctgagtcggagtggcgagctggcggtgcgggctctggagcagttcgccaccgtggcggaggccatgctgataatgcacaagaaggggatcgtcaatgaacagtttctgctgcagcggctggcggacggggccatcgacctctatgccatggtggtggttctctccagggcctcaagatccctgagtgagggccaccccacggcccagcatgagaaaatgctctgtgacacctggtgtatcgaggctgcagcccggatccgggagaacatgactgctctgcagtctgacccccagcagcaggagctctttcgtaacttcaaaagcatctccaaggccctggtggagcggggcggcgtggtcaccagcaatccccttggtttctgagtactctcaattacagcctggcccaaaatgtgccttttctcaagccaaagcccagacccctttcctgcccatcctggttctaccttgaagggggccccggcccatgactgtgcctgctctcagaggaagcacttactgcctcacaaataaagtttctaacaagtcaa

SEQ ID NO: 2886 - DNA, 338 bp, Zea mays
  Peptide Sequence Number=SeqID_9162
  Probeset Number=SeqID_17289
tgcagagcggtatggattatccgcacgatccgcatcatgtatttgtctcagatttcgtggacttttcgatatatgtcgatgcgccagaagacttattagagcgttggtacgttaatcgctttcttaaattccgcgaaggtgccttcagcgaaccggactcttatttccaccactattctcagctgcctgaagaggaagcagagagtattgcacgtgggttatggaaagaaattacctggctgtatttaaaagaaaacatcttacctacacgtgagcgggccagcctgattatgaccaagtctgctgaccatgccgtgcaaagtgtgcggttgcgaaaa

SEQ ID NO: 2887 - DNA, 484 bp, Zea mays
  Peptide Sequence Number=SeqID_9163
  Probeset Number=SeqID_17290
atgggctgcttctgtgcgtcttgtgcctcccgagcctggatgggcctcctgctgtctttgggtgtgctggcgctcctcgcattcgccgctggctggcgcccgtgttgtccggctttcgtctggttttggcctgtgtgcctgattggtggtggctcgtcttcgtttggctggccttcgccctttcgctggccggcgcgcttggtgtgttccgccgggtttccgtggtctgggcgcgccctggagcttctttttgtgtctcggccagtgcggcgtctggcgccccggcgttctgttggctctcctcccatgctgcgggtgcgcccgcttggtatatccgttctgccgctgcctgcttgtcctcaactttgggggtctgggccgctccgccagctccctgcggccctgtcctgttatggcttgtcgccccgcccggcagaaaatacggcctgcgcctttcgctcggaggcgtttttttcctctggct

SEQ ID NO: 2888 - DNA, 494 bp, Zea mays
  Peptide Sequence Number=SeqID_9164
  Probeset Number=SeqID_17291
ctctgatcccagcagcacaatcagcgcgcgcgtgagggatgttgcgcgctaagggcgagaacaagcacgggaaggcgatcgtgcctgacaagcgcaaggagggcggcagctgcaccaacgagagggtggcccgcaagatcaacgagaacaaactcctatccaagaagaacaggtggactccatatggaaacaccaaatgcataatctgcaagcaacaggtgcaccaggacgcaaaatattgccacacctgtgcttattcaaatggtagtgtgcgcaatgtgtgggaagcaagtgttggacacgaaactctacaagcaaagcaatgtgtgatgcatagctttactaaactgctaataacttgtatgaaatcttgtactcgcaatacaatcaagctattgataatagttaacagaaattatgtacttgactaacaattctggaatggaacacaaaatgtctccaaaattaaagctcaaaaaaaaaaaaaaaaaaaa

SEQ ID NO: 2889 - DNA, 737 bp, Zea mays
  Peptide Sequence Number=SeqID_9165
  Probeset Number=SeqID_17292
tgcagcttaaccgcgagcgcgcccggctgatttacgacaccgtgtatcaggaaattgccacggattatcgtcgtcacattgtgcgcgccgataccttccatctcagcgcggtgaactggtcgaacattatgatgctcggcgcgattggtattgtgttcttcatggctaatggtctcggctgggccaataccgctgtcgccgcgacctattcgctgacgctgctgttcctgcgcacgccgctgctggcggcagtaggcgcgctgccgacgctgctcagcgcacaggtggcgttgcggaaaattaataccttcgatctggccccttatagcgccggtttcaaagcgctgccgacggtgagcgactggcagacgctggagctgcgcgacgtctgtttccattatggcgagcacggttttgccgtcgggccgatcaacctgacgctgcgccgcggtgaactggtgtttctgattggcggtaacggcagcggtaaatccacgctggcgatgctgctgaccggcctgtatcagccgcattcgggccgcctgctgctggacggtaacgaggtggactggcataaccttgatgcttatcgccagcacttctcggcggtgttcactgacgtgcacctgtttgaccgcctgattcgtcgtggtggtgagccggctaatccggcgctggtgcagcagtggctggaacggctgaaaatgcaggacaagctgaagctgcaaggcaaccgg

SEQ ID NO: 2890 - DNA, 505 bp, Zea mays
  Peptide Sequence Number=SeqID_9166
  Probeset Number=SeqID_17293
gaccaccgcgccaaccccaaggaggccgccgtcgtgccacaggcacaccaccaccggggcggcggcggagacgcacctcccaccagggaggaagaccactcccccaaagccgaagccgaggccgggggcccacagggccagcaggcacacacagccgacaaccgcggggccccaacgcgcgccaccccaggcggccgcgagacaggagccccgccggacgcgacaccacacagcacaaggccccgcgccgccgcggggccgcacaagagcgcctaccaccacagggggcggagggcaggacacacggagcccggcggccccccggaggagataccgcggcacggcaccaagacccgggagggccgaaccaggagccagcaggccagacgacacccagaggcaggacctgcaagcagaccggagaggatgccccggcacagaggcagccagaccaaagcgcggaacccggacccgtgggggacaccgagcaacgctcacaatggga

SEQ ID NO: 2891 - DNA, 741 bp, Zea mays
  Peptide Sequence Number=SeqID_9167
  Probeset Number=SeqID_17294
ctgcagtatccctctcggaaggagagcgttgtcatcttaatttcggctcacatccattcaggtatcctgttgatgggtttgatccattagaggcgccaccacgctcttggtcgtttgtcacataccttcttagatgcctgttccggttgctagaagttcacaacctggagaaatctgaatcagcatacttcgagaaactgaggagggtgaaaaaatttgcaccactacaagaactctttggacccatttcagaagggatctgtgcagaaattttcagtgctattgaagcaagccaggggtgccttgagtatattgcctggggctcgttgatcactctactcttagatgttttcagaactcgtgagccgcatgatttctcatgccttgatcaggttcttgaccttttcctccggttcccaggttgcacttcattatttcaggagctcattgtggccctttcttgcatgtgcaaagttgcaccacttgtgttgacagaatgcccatattctgggtcatatccatttttagcgctggtttgccaccttcttaggcataaggatgtaatgtgtttatggtggaaagcagaagatttcgttttctcgtttgaaggcttccttacaaggaagattccaaataagcaggatctacagtgccttgtgccatctgtttggtggcctggttcttctgaggatgaagttagcatgacactgacgatgacaacactctcagatgcaataaaaa

SEQ ID NO: 2892 - DNA, 415 bp, Zea mays
  Peptide Sequence Number=SeqID_9168
  Probeset Number=SeqID_17295
gtgcagagcaatgtcgccgccgcgcaggtgagcgcggccgacctcgccaatgccacgctgagtgcccaggccagcctggcgcaggattatgtgtatctgcgcacggcggatgcgaatatcgcgctgctgaaccagaccatcgccgcctaccaggatagtctgcggatcacccagaacaaatataatgccggtaccgtctcgcaagccgacgtgttgacggcgcaaacggagttggaaggcgcgcaatccagcctgatctccgagcaggcgacgcgggcgcaatatgagcacgccatcgcgctgctgaccgggcatgcgccggcggatctctccatcccggacgggaagcagatcgccagcgtgccggtggcgccgccgcaggtgccgagcacgctgctgcaggcatgcaagctag

SEQ ID NO: 2893 - DNA, 374 bp, Zea mays
  Peptide Sequence Number=SeqID_9169
  Probeset Number=SeqID_17296
tcacgctagcacacaggcgcctaggcaagcttcccccatggtgctcgactccctgttccatggtgccctgtggtcgcccccttcttccccttgtggtcgcgctcctctgcttccttccattgcgtccagccctgcactttcttcccatggtcgagctactacacaaagcagcggcagcagctcccatgggcgcccagattttttcacccctcctccttggcctcccttacgcaggggcagcagcctccatggccgacctctcctcctctgcgcagggcgcccctgttcccctgctccttctccctcgcacagcagcagctcgccccaccttcccttgctgcgcagctcctcggcgaaacgccgctgttcctgca

SEQ ID NO: 2894 - DNA, 464 bp, Zea mays
  Probeset Number=SeqID_17297
ccgcgccttccacgaggcgggactgtggaaccacttccaggcgaccgcgtttgacttcagcaacacgctctctacccattcgatctttggcacgctgctggaaggcattctgggttatcagaaagcgccgagcgtcagcgaagtcgcggcgctgttgctctccatgctggcgctgtccggtgccgcttctgccgctgccgtaccgcaggtcacggtgacggtcactgacaagcagtgcgagccgatgtcgctcaatgtgcaggccggtaaaacccagttcatcatcaaaaacaacagccagaaagcgctggagtgggaaatcctcaaaggcgtgatggtggtggaggagcgcgaaaacatcgcgcctggcttcagccagaagctcaccgccaacctggaagcgggtgaatatgacatgacctgcggcctgctcactaatccgaaaggcaagctggtggtcagcg

SEQ ID NO: 2895 - DNA, 415 bp, Zea mays
  Peptide Sequence Number=SeqID_9170
  Probeset Number=SeqID_17298
atgcctgcgcccctcctgcggctgtgtctgggccccgcgccaattcgcgattcccatgacgcagccaacacgcaccaatgggggctcactgtagatacgctgacacggacgatgcgtcgccggggcgaaacttccaaacagtggcagggcagcgcgacaggcaggctaggccttctgctccttggacatgatggatgcgctgccaccgggccatgtgagaggaggcaccttttgctgcgctgcgccgccgctgcttcgagttgccccgtttcctttcttcctccggtcccccttctctctccctccctcggtccctccattcagcggcgaggcagcccgtgtggccggcgtgcgcggcggcggcgtaaccatggaacggaacggcaaaaaaagaccatgctggatccggcctgca

SEQ ID NO: 2896 - DNA, 258 bp, Zea mays
  Probeset Number=SeqID_17299
gggacccacccgaagaacgcgggtccgccgaaaccaagggcgcccacaccacacaaccgttcagggccggcttcctcacgggggacgaagacaaaaaaggccgagcaggccgagaacacgaccaagaacgccacacacaaccccagccacgaagccagcctggcctgcaacgctcttactcgtgttgccgggcgctaccccgaggccaaggccaagatctggcaaaaccgcgacgggtgctacaacccaccaatgtga

SEQ ID NO: 2897 - DNA, 467 bp, Zea mays
  Peptide Sequence Number=SeqID_9171
  Probeset Number=SeqID_17300
atgaacttgagccacgcgctggctgagcgcatcttgcaaagccagccggatacggcggcacgtgataccgcgcgcactggcgtgcaggattttctggctgtgagctggccggtgttacagcagcaggtcccggacagcggcttaccggcgctgcgacaggtttatggcgacggcagcgtacgctcacaggcgttactgctgggctatgccggtcatgcgctggattacgatgatttccatgccgattttcgcggccatcccagcgtggcgattctgcctgcgctgaatgcctggcagcaacagcagcccgccactgccgaagcgttccttgatgcttatgtcatcggcgtggaagtggctggccggctgggactgtccgccagccagcagcactatgcgctgggttatcacaacacggccacgctgggcacgctgtcggcggcggccgcgctggcacgcctgctgca

SEQ ID NO: 2898 - DNA, 363 bp, Zea mays
  Peptide Sequence Number=SeqID_9172
  Probeset Number=SeqID_17301
atgttcagcaccgttctgattgcgaacattgacgaaatcgcctaccgcgccatcagcaccataaagcgcctcggcgttaccagcgtggcggtctattcggatactgaccgcaacgcgcgtcacgtgaccgaagccgatgtggccatcgccctcggcggtgacaaagccagcgacagctatctgcgcatcgacaaaattctggccgccgcgcagctagccggcgcgcaggccatctggcccgtatacggttttctctccgagagcatgccgttcgccgccgcctgtgaagaggccggcatcgcgtttgtcggcccgaccgcgcagcagatcggcgaatttggtctcaagcataagagaaagtga

SEQ ID NO: 2899 - DNA, 796 bp, Zea mays
  Peptide Sequence Number=SeqID_9173
  Probeset Number=SeqID_17302
agagttgacctgcagccgcgcggctatatcgacgcgctggcgctggatattccgctggcgcagccggagcatacgcgtttgcaggcgcgctggcgcgatctggcgtggcagcactgggagcttttgccgggcatcagcaatctgagcggcagcgccagcggcagtctgaaccacggccagctggatgtgcagatgggccaggcggaagtgccgtacggcgatatgttccaggcgccgttacagattcagcaggtcaccggccgcatcaactggctgcgcgatggcaacggcctgacgctggatggccagcagctggacgtgcaggcacgttcgctatgggcgcgcggcgatttccgctatcagcaaaatgtcggtaaagcaccgcgcctcgacattcttgccgggattcgcgtcaccgacgctggtgatgcgtggcgctacttccctgagccgctgatgggccacgatctgacgcagtatctcagcgaagcggtcaaaggcggccaggtggagaatgccacgctgctgtttgccggcgatccgcgtctgttcccgtttaagcaccacgacggcatgtttgaagtggccgtgccggtgcgcaatgctaccttccagttccagccgggctggccggcgctgcaaaacctcgatatcgacctcgattttattaacgatggtctgtggatgaaggcggcgcaaacccggctgggcgcggtggacgcgcgcaacgtcagtgcggtaatcccggattacctgaaagagaagctgatcattgacggtaatttgagcggcgaag

SEQ ID NO: 2900 - DNA, 219 bp, Zea mays
  Peptide Sequence Number=SeqID_9174
  Probeset Number=SeqID_17303
ataacgcagctattttacaggcattactgctttggcgcgattattaacatgatcgtccttgcccgtgaaggtatggattcttttgtttatcgtgtggtgttttttggtgttgtctttggtctgtgcctgatagtagcaaaattgctgtactggctgttcgatagtgcaaggcttgttcggaatttgtcatcaccaatatgtctgtatcaccagaaacac

SEQ ID NO: 2901 - DNA, 363 bp, Zea mays
  Peptide Sequence Number=SeqID_9175
  Probeset Number=SeqID_17304
ctgctggggcgctgtgcacagcggcgcgagcgggtactgctacctcatcgacttccccgtggagacgctggtgtacgaggccgacgaccggaaggtgggctacttcaaggtcaagaagccgcctgcacggccgggcgacgccctagcctcggcggtgctgtcgctggtcttggccagcgtgatactgggccggcccggcacggctagcggccgacgggccgtgcccatgtgcccttccactgttgctagcttcaacgttcgacctttggggttcgacgtggtgcggcagaatcgggtgtccgtggcgtacaaagaggagctgccgttcgagacgaacaggacgacggaggagtgcgaggcagc

SEQ ID NO: 2902 - DNA, 930 bp, Zea mays
  Peptide Sequence Number=SeqID_9176
  Probeset Number=SeqID_17305
cattgggaccctcgaggccggccgggaggcgtaggattccacgtccatcgatggcgctggacacggggacggcggcgggtatcgacgaggcgtacgagttctccgcgcccaggttcttcgacttcgtcgtcgaggaaacggaggaggccgtacgtgccgccgagagctggttcgaggctgcccgcagccacgccccctcgccgttcaacccaaggatcaaggaatcgagggcggaggtcaagctcgcggtcctctgtgatttcgcgcaagccgaggagccggctccagaggtaaataaacagaaggagccagctgacgaaatgtcggggccgcctgcggctcaagaagagagagatgaatcgcccccgtctctggagttcctctcggcgacggacctttctgtaaaatcagcagatggtggttctaccagcacgcttaagatgcagacgcgttatcctgcccctcctaccaatgttgcccctgcgagttcgacatgtgacagctcttcagtgaatactgatgcgcgcacgccgaagatgcaggtaaacatgtgcagagcaggtcctacggctgcttcgacgaatgtcaagaggagcgtgatgatcaagggtggtcgtgatttggtggggactggaaaagtagccactgctggcgctgaaattgctcaagagaaccaagcggtgaagaggcagaagctcgatgatggaagagccagacagatactcaatgtcaagactaaggtgctgcctcataaggcgagagttgatttagctggaagcgaaatgaggaggtcccatgaggatatgcgctctgcgaaggaagcagatccatatgtatcagctgcagaattggttaagaagtttgaatcagggaccagagagcttagcatcactcacagtagatgtcgttctcatgaggatgctgcatcac

SEQ ID NO: 2903 - DNA, 224 bp, Zea mays
  Peptide Sequence Number=SeqID_9177
  Probeset Number=SeqID_17306
ctggtactgtctaataataaatcaaaataagaattattatttgcttacctactatctgagtgcatcgattactcatcgtattggatgtttgaattaggcagttttggctcatgagttgggtcacctcaagtgcgatcatggtgtatggctcacttttgccaatatactcacaatgcaaacatacactgtcccaagggtgggttatgtacctaaaaacacttcag

SEQ ID NO: 2904 - DNA, 743 bp, Zea mays
  Peptide Sequence Number=SeqID_9178
  Probeset Number=SeqID_17307
atgcagggcatcacgcgcagcggcttcgacggaatggactgcaacgtgctcgcgggcaagtacaacctgaccgacgtcgccgcgcgcgtcggcctcggccagctgccgcacctcgagcgcttcaccgcgcagcgccgcgcgctagcgcgcgcgtatttcgccgcgctcgccggcggcccggccgcgaaactcgggctcggcctgcccgtcgccgatttcgagaacagcaactggcacatgttccaggtcacgctgccgctcgaccggctgtcgatctcgcgcgccgatttcatggcgcagatgaaggagcgcggcatcggcacgggcgtccactacccggccatccaccttttcacgctgtatcgctcgctcggcttcaaggagggcatgttcccccacgccgagcggtacggcgcctcgaccgtcacgctgccgctcttcacgcagatgacggaagacgacgtgccacgcgccgggcatccgggcgccgcgaacccggaggtatcggtcatcatccccgtgtacaacgaggaagacggcctggctgcgctgttcgcgcggctgtacccggcactcgacgcactcggcacgtcgtacgaagtgatcctgatcaacgacggcagccgcgaccggtcggccgcgatgctcgcggaccagttccacgtgggtcccgacacgaagggggtggtgctgctcaacggccactacggccagcacatggcgatcctcgccggcttcgcgca

SEQ ID NO: 2905 - DNA, 386 bp, Zea mays
  Peptide Sequence Number=SeqID_9179
  Probeset Number=SeqID_17308
tgcagggccaggcgctgcgcaatctggcgacatcagccatcgatctgtccgatggcctgatctccgatctcggccacattctcaccgccagccgcgtcggtgcccgcatcaatctggatgcgctgccgctgtcggctgcgttgcgcgatcacttcgagccggaacaggtgctgcgctgggcgctgagcaggggtgaagattatgagctgtgctttaccgtgccggaagtcaatcgtggtgcactggatgtggcgctgggccatcttggcgtggcgtattcctgcatcggccagatcgcgccggaagcagaagggctgacgctgctggagaacggcaagccgcgcagtttccatcacaagggatttgatcactttgacgctaaataa

SEQ ID NO: 2906 - DNA, 557 bp, Zea mays
  Peptide Sequence Number=SeqID_9180
  Probeset Number=SeqID_17309
ctgcagctatgaagaccctgacaactttctacggctaccatccattggagatggtaatgcacccgctgggactcttccccactgagaagagggatgaccccatgtggtgcaaccgagtgagccacgtgaaggacatgtgggccatgcctcccgaccaagttgggaggatcactgttcagtgcatgagcacactgtaccgccttcaggccctgcaaagctacaccgtggcacacctcactaaccttgctcagaccactaagctcaccctcgacagccgagaggacttcgtggtcgacttgtcttcagaattgctctatgatgtgcaagaggagcttgaggaagctaacgaccacctggagatgcaccaccaggatatggaggcaaacgaggccgaaagtgagggagaggaggctcccgagaaattggaaccagcccctgattcagatgagaagaaaagggactgtttccaaagagggctcaacaccaagcttcgtgagtgcctcaacactgttcatgccgacaacttcaatgaactggtcaaccttgccatttcatag

SEQ ID NO: 2907 - DNA, 248 bp, Zea mays
  Peptide Sequence Number=SeqID_9181
  Probeset Number=SeqID_17310
atcccgcataggaagaggtatggtctggatcacgatcgccaaccaaatggtgacaggcagagctttaataacgtactccatggcgagggaattcttgattatttaacgccagatcgaatcgtgttcaactatcattggaattgtttctatccttccattcttcaagataattcagatttgttggcgaaaaagcaaagaatctttgtccttgtaattatgctatatcatgaaaaggatgaacaaaaata

SEQ ID NO: 2908 - DNA, 317 bp, Zea mays
  Peptide Sequence Number=SeqID_9182
  Probeset Number=SeqID_17311
tgcagggagagagaagggcgcctgctattctagttggacagggaatttggtctatgatggggctttctgatatgatggatctgtaaggtcaggagaatactctactatctgcatacaaggagtcgtctgtagatgttaatcatgagtacacatagatcacattacacacacacgcagtgtgatcggtttgttttagcattccgtacatggctatgacaatttgtcagtagccaacttgagtgcatgacaaatatcacgaatttacgaagacaacaaccctagtcatgtataacaaagaggtcatcattggttctgca

SEQ ID NO: 2909 - DNA, 783 bp, Zea mays
  Peptide Sequence Number=SeqID_9183
  Probeset Number=SeqID_17312
tgcagaccggtgcgctgtacgaaggcacctatctgctgggcacctcgatggcgcgtcctatcatcgccaaagcgcaggttgaactggcgctgaaagtgggcgcagacgcgctgtgccacggcgcaaccggtaaaggcaacgatcaggtgcgtttcgaaaccacctataccgcgctggcaccgcagcttaaagtggtggcgccatggcgtgagtggaacctgcgttcgcgtgaagcgctgctggattacctgaaagagcgcaatatcccgaccaccgcgtcgctggagaagatctacagccgtgatgagaacgcctggcacatctcgaccgaaggtggcgtgctggagagcccgtggaacgcgccaaacaaagattgctgggtgtggaccgtcgatccgctggaagcgccggatcagccagaaaacgtcaccgtcagcgtggagaaaggccaggttgtggcggtgaacggtgagaaactgagcccgttccagtgtctggaaaaactcaatgcgctgggagcgaaacacggcgtgggccggattgatatcgtggaaaaccgcctggtgggcatcaaatcacgcggctgctatgaaacgcctggcggcaccatcatggtcaacgcgctgcgtgcggtagagcagctggtgctggatcgcgatagcttcaaatggcgtgagcagctgggtcaggagatgtcttacgtggtgtatgacggccgctggttcgcaccgctgcgtcagtcaatccaggccgctgccgcatcgctggcagagctggtgaacg

SEQ ID NO: 2910 - DNA, 326 bp, Zea mays
  Peptide Sequence Number=SeqID_9184
  Probeset Number=SeqID_17313
tacccacatttatacactctcactaaatacttgttccagatgctgtcttaatttcttacacacccgtgcagattgtcattccaaacaggtgcgcatcctgaatcgctaatggacgctccctgtagcggcacatttagcgcattgggtgttggggttacacgcagagagaccgcttactggccagcgacttagcgcccgatcctttcgctttcttcccttactttgtcgacacgttcgccggttatccacgttgagcatttacatgggggctgcctttacggatccacagtaacgctttacagatcctcgaccccacttaacttgat

SEQ ID NO: 2911 - DNA, 421 bp, Zea mays
  Peptide Sequence Number=SeqID_9185
  Probeset Number=SeqID_17314
cctcctccggcatgggaagcactagctccccacgccgttgagcgagcaataccagccacgccagacctcccacccgtgggtcaggaggagccggtcattccttggcaagacatgacaagggctgggggagaaccatcagtgttcaaccctatcccctttcagccgagtttcgacaccagctccgtcactaggctgtatgtcggacttccttttccctcagggtgcttggactccgaggaagagggcagtctgagctttggcctggacttctccgggctgcgagatcctgatggggagagctacgacccgacccgggaatgcctccacatcgacccagagatccctgacgagggagatcacctcggcatgccacgggaaggcaagaagcctcctccacgtgttcgggaagcagtggagccag

SEQ ID NO: 2912 - DNA, 402 bp, Zea mays
  Probeset Number=SeqID_17315
cgaagaagagaaggagatgcatccgctggccagcgcgaaggcatcgcggtgctgccgtggagcccgctggcgcgcggtaagctgacgcgtccgtggggagaaaccactgcgcgttcagtgtcggataacgtgatggaaaaactctataccggcaccgaagagaatgacgcggccattgcgcaacgactggcaacggtggctgcggacaaaggcgtgacgcgcgcgcaggtggcgctggcatggctgctgcataagccggtggttaccgcgccgattattggtgcctcgcgcgagcagcagtttgccgagctggtgaaagccgtcgacgtggagctgagttcaaccgatatcgccgagctggagagcgtctaccaaccgcatccggtggtgggattcgagtaa

SEQ ID NO: 2913 - DNA, 333 bp, Zea mays
  Peptide Sequence Number=SeqID_9186
  Probeset Number=SeqID_17316
acgcccgcgccgcgggagcgggccatgtcggtcacggagctcgccgagtacgtcgacctcatgccgtggcaccgcttcggcttcacggcctccaacggcgccatcctccgtgcggtggtgggcagcgccgcggtacacgtcgtggacctcagcgtcacacgctgcatgcagtggcccacgctcatcgacatgctctcgaagcggcccgggggcccgccggagctccgcatcaccgtgccttccgcccgccccgccgtgccgccgcagctcggagtgtcggacgcggagatcggcctccgcctcgccaacttcgccaagtccaaaggcgtgcag

SEQ ID NO: 2914 - DNA, 608 bp, Zea mays
  Peptide Sequence Number=SeqID_9187
  Probeset Number=SeqID_17317
aagccgcaggcgcggcgaaagccatccgctggtgccgaacaccagcgcggagaatcgcgcccgcaaccgtcgcgtagaaattactctgctggtcgcgccggatgcgacgcaagcggaactcaacggcctggcgagagggaactaatccatgctgaatatgctttttgcggtgctgaccagccgcctcgcctggggttttgtcggcattaccgcgctctcctttatcatctgggtgattggcccggtgttttccattgtcgactcgcggccgctggagccagagcagaaccgcatcatcagtattgcgctgctctatctggtctgggggctgagccaggcgattccgcgcctgtataacttctggctcaaccgcaaactgatgtcgagcctcgaaaccagcaaaagcgatgcgccggagcaggaccgcaaacgcctgaccaatgaagaacaggtgctggcgagccgtttctccgaagccaccgacatgttgaaaaaagcgcacttccagcgcgccagcagcaagggcgcgcctttctgggcgcagcgcttcagccatcaatacctctaccagctgccgtggtacatgatcattggcgcaccgggtgccg

SEQ ID NO: 2915 - DNA, 384 bp, Zea mays
  Peptide Sequence Number=SeqID_9188
  Probeset Number=SeqID_17318
ctgatgtgcctgtgccatctgtcgacgaccttgcagatcaggttgctgatgtcctcgattttttcagtttagggtctgtcatgtgcttgggtgtcactgctggtgcctatgttctcaccctctttgcagtaaaatgttatgtacacgcaccatcacagactaagtatcgggagagggttcttggcctcatgttggtttcacctgtatgcaaagccccctcctggagcgagtggctgtataataaggtattatcaaacttgctttattactacgggacacgtgggttagtcaaggaaagtttgcttcagcggtacttcagcatggacgttcgtggtaacgggcaagatcctgagtcagagatgtaccaagcctgcaggcatgcaa

SEQ ID NO: 2916 - DNA, 334 bp, Zea mays
  Peptide Sequence Number=SeqID_9189
  Probeset Number=SeqID_17319
ctagcctgccagtggggctcctagtgctggtcccgcctcgacccctagccccttggacccccccagaagcgtcagaggactgctagtggggccaaggaggccggctcccaggctcagggcacgcataggctcgttatgccttcgccaccaccaccaccgggtccgttgccaccacaaccaccaccaccatcggacccgccgctgcctccaccacctgggggtgatctcccccagggcaccagctgctagagcaacatcattagtagctacaacaacattcgtggctacaggtgcagtttcaaaaggagtcggtcgcccctccttccaggggtcg

SEQ ID NO: 2917 - DNA, 335 bp, Zea mays
  Probeset Number=SeqID_17320
cccgaagcgcgacgcggagattctgctgggttttgtcaccggcaagtcgcgcagctggctgatagcgtttgacgacagcccgctcgatgatgcgcaactggcacagctggagacgttactggcacgccgcgtgcgcggtgagccgattgcgcatctggtgggcgaacgcgagttctggtcgctgccgctgcgcgtcagtgatgccacgctgattccgcgtccggataccgaagtgctggtggagcaggcgctgctgcggctgcccgcgacgccgtccgcggtgctcgatctcgggtccggcaccggcggcattgcgctggcgctggccagcgagc

SEQ ID NO: 2918 - DNA, 356 bp, Zea mays
  Peptide Sequence Number=SeqID_9190
  Probeset Number=SeqID_17321
atgctggcaccccttacggactacaaacacggcattacgctgattcaggacagcggcattcagtttatggactttgccctgaccccgcggctggacgccgagtttcccggcaaattcgtgcgcaagaccgccagcggcccgctgctgcgcctgcaatgggaggccgagagcggcaaatatcagttgccggccgagggcgggcaagccgccgaagtggtgcggccggagttcagctacccgctgcagcagtcgctgggcctgctggaaaagctctggctgccgctgcccttcttgcgccacaccccggcgggcctgtttttgccgggcccggataactggcctctcctgcaggggta

SEQ ID NO: 2919 - DNA, 224 bp, Zea mays
  Peptide Sequence Number=SeqID_9191
  Probeset Number=SeqID_17322
ctgcagaatctggcgatgcagatatcagctgaacgaaatctatgttatacttggcaacattctcattgctgtaaatactttccataggctgccagatttatgtgatccgcatatgatgcacccatacaagagtgctcgatttggagagaagtactcgcatgttggtgctgcggcagatgatgtatacacggtatctatatcggccggttcaaaaaaatgtattt

SEQ ID NO: 2920 - DNA, 387 bp, Zea mays
  Peptide Sequence Number=SeqID_9192
  Probeset Number=SeqID_17323
atgcagcaagccggtatccgccgtctgtgcgtgatagccggtgaagctggctgggcgcgccaggaggcggccacatggcaggccgcactgcccggtgactggttaacggtcagcgacagcgatgacttcccgcagcgtgtcgcgcctgcggcgctgcgtaccctgctgggccgggaattccagcatgccatttttgatgcgcgccacggctttcacgcggaagcgttcgccgcgctggccgggacgctgcgggccggcagctggctgctgttactgacgccagactggaacgcctggccggcgcagcccgatcgcgacagcctgcgctgggccgatgtcgaccagcccatcgccacgccgcatttcatccaccatctgcaacagcat

SEQ ID NO: 2921 - DNA, 436 bp, Zea mays
  Peptide Sequence Number=SeqID_9193
  Probeset Number=SeqID_17324
ctgctgtcctgctcccacgcctgcgctgcgtgcatgggacgttggcgtacgagaaggcggagctcgacccggtgctgatgtccaactacgctgtgactgtgacggagatcgatgaagttcgtcccgtgcagacagtgcagtggttcggttgttggaacggccggtgcctgctgatgtactcgtcagcgtctacagggtacacatgcatgtgcttcccagagttcggagttcggacttcagaacgctacatgggcattaatggcgtggggcgggccgggggaacgaagtggtggttggtacttggtattgcgtacgatcagcctacgaggctgccgccggctaaccagtgcgggccacgcatgacgcgtgcgttcgtcgacttgctcggccgggatcagcacggggagccggtgccggcggagaggttcctgtcgag

SEQ ID NO: 2922 - DNA, 405 bp, Zea mays
  Peptide Sequence Number=SeqID_9194
  Probeset Number=SeqID_17325
ctatcagagattccccttcagcgtggtgtcgagctaggttcacggcttcagattaatgaaaatacatgcttgttacagaatgaccatgctccatcaaagttactacatgagtctccctacaaacttcttcgctatctggttgctaatggtgctcatgcatggttcgtatgtgccatatccgcaagtggagcttatgcacatgcgcaagcctctccagtcacctgaaagtgatgtcagttcgcagtaaatgtcagaggatcactcgatgcagcatggtcattttacagcaaggcatgtctcttcattaatcttaagctgtgaacatagctaccctccataagggtttactctcatgatcctcctctgctctggcgtccgctcgagcaaggatcgagacggccccca

SEQ ID NO: 2923 - DNA, 335 bp, Zea mays
  Peptide Sequence Number=SeqID_9195
  Probeset Number=SeqID_17326
tcgacctgcaggttacacgtaatcaaaagggcacatctaagacgcatgcgtgcgcccaagcgtccgaaccctcaagcatacaggcgtgaggttgaggagcggtcacagaacatatttagtggctttagcactgaactacttaacgaggctcttggcgtaagcagccaattggcaaggcagctcccatgtctaaatgaccaaagaggagaaattgtccgcgtcgaacaccggctcattttgctgcagccatatgcatcattggttgagcaagaacaaagacaagtgccatctatagaacggtatcaaaaaggacaatatcatcaaagtcaatatgg

SEQ ID NO: 2924 - DNA, 482 bp, Zea mays
  Peptide Sequence Number=SeqID_9196
  Probeset Number=SeqID_17327
actgggctgttgtttctcgcggtggagatgaagaggcgcgctaccgcgggcggcggttcgctcttcgagcgcgcgcagcgcgtctcggggcgcgagcgggagagtttgccttgaagagggattcaccctgcgcgcagcagttacgctttcgcattctctcccaattgttgcaccctttcgccttcgagctctctacgcccctttgcattcgcactctcctgctttgtgcccgtgccgccgccgacgccatgactttgctatgtcatctcgagcgcttccagtctaagggggcgctcaacctagtgcgcaacctgctcggatggagtgcgccggtacacgccggaaggatccgcgccggcgccactcccctcggcgatcttgctgccggggagttcgtgctcttcgtctcctacctctcctacgggttggcgctgtcgatctcgcctttcttcttggtgctgttggaggagttcgggctctag

SEQ ID NO: 2925 - DNA, 439 bp, Zea mays
  Probeset Number=SeqID_17328
ccaccaccgctcacaacccaaccaccaccctctccacctctgccactttacggccttccatccaccaccacgttgtgcatcccccttcacctgctgccgatgccagagcatcgccatccccaatcccatcatatgtgctggctccaatgggaacaacacagtatacaatgacgacatcactgacgccactggaccagcagccacatctccggagcatcatccaccagcgtacggccaggacgcacccttcggcagtggactagccctccgcttctacaaggtcgacttcccgacttacaacggcaccgtcgacccactaaattggatcaaccaatgcgagcagttcttccgcggccaacttcgcgagaccaagctatttgagctcgcccggttgccgttcacatccacggtgcacgactacgccggacgattcaacgag

SEQ ID NO: 2926 - DNA, 810 bp, Zea mays
  Peptide Sequence Number=SeqID_9197
  Probeset Number=SeqID_17329
cgatgccaccgagcggctgaagatcttcctgcggtccggcgtcgaagtagtcacgctgtgcgatcatacccactacagcatcgactcgcttgatgacccctatgtccttattaaagctatcctcatcgcacaacgtgcgaatgaagagagcgagacgaagtcacgacgcatgcgtgcggcctggcagaaaaaacgggaagatgcggcagcaaccggaaagctcattacgcgcagctgcccgcgctggctgactgtttcgcctgacggtgagaagtttgagctgattgaagaacatgccagaaccattaatgtgatattcaggctcaggcttaaaggctcctcactcaatggcatcacgaaaacgctcaatgaacgcggcgttccaaccttgacgggggaaatcgggcgatggaatcccagcaccattgaaagtctgcttggcaataaggccctaacaggcacgtttactccgtcttatcagacgatggcaaaaggagtaagcgaaatcagcgggtattttcctcaggtggttccggacaaactcttccacgacgtgcagggcgtccgtctcgcccgattcggtaaccctggcgtcagcgacaatccttacctcattaatattttcagatcgctgatgtactgcggaacgtgcgggcactccatcattttgaccagcgtcgacaaaaagggccggggctattacgcctgtccaatgaggcgcctgaaacgctgcaacgaaccggccatacgccgtgatcacgttgatgctgccctagtggacgtcctgctgtgcagcatggatatgctgca

SEQ ID NO: 2927 - DNA, 467 bp, Zea mays
  Peptide Sequence Number=SeqID_9198
  Probeset Number=SeqID_17330
atcctcatgtagtcgacctgcaggcgcagcgccatgaaacgctggcgcaaagcgcgacgcaacccgacagccgcagtttctggcagcgcagccgcgccttctggaccatggtaggcctgcgcatcggtgagaacggcccgtcctatctggcacagggctttatcgtctgctacgtcgccaaagtgctgatgctggacaaatcggtgccgaccaccgctgtgttcatcgcctcgctgctcggtttcctgatcatcccgtttgccggctggctgtcggaccgctttggccgacgcatcatctatcgcggcttctgcctgttactgatggtttacgcctggcccgcctttagcctgatggacagcctcgagccggccatcgtgattccggtgattgtggtggggatggcgctggcgtagctgggcatctttggcgtgcaagctgcatggggcgtggagatgttaggcgtt

SEQ ID NO: 2928 - DNA, 544 bp, Zea mays
  Peptide Sequence Number=SeqID_9199
  Probeset Number=SeqID_17331
cctgcatgatgagaaaggcttcagtcctgatgatctgcaggagctggtgcattcgctcttttatgggggccaaaggggccccccagccatatcagtcgttgctcccatttggtacgcccatttggcagctgctcagattggcccgttcataaagttccataagatgtcggaaacgtcctccagtcatggcgggcatatttcggcgggcagcgttccggtccaggagcttccgcgcctgcattaaaaagtgaggagcccgatgttcttttgctgaaccggggttttacttttttgggggagggtgaacccccctagttatgtcggtaaacgctcttggatgacgctctagttgtggtccaggaaggctccagctggtacgatgttaaatgttagtttttttaagcgtccctgcggctatgttggggccccaggaagacttggaccccaaaaaaaaaaaaaaaaaaaaaaaaaaaaaaaaaaaaaaaacgaaaaaaaaaaaaaaaaaaaaaaaaaaaaaaaagtactctgcgttgttaccactgct

SEQ ID NO: 2929 - DNA, 311 bp, Zea mays
  Peptide Sequence Number=SeqID_9200
  Probeset Number=SeqID_17332
tgcagggacaagagccggaacggagccaggaggaagacgcggccccgccggcgaacgcgctgatgctgatgcggtgccggtcggcgccggcgaagggattagcgaggagggtagaggcagaggaggagcgcgaggatgtgaagatcgccaccaataagactccggagaaagagacggaaaaggagagggagagcctggtgctcatgacgtactccccggacttcttcaaggtgtcccttgacattgccaaggagacttggatcgtcggcggtgatgacgccgtcctgcgctgccggagctggaagagatag

SEQ ID NO: 2930 - DNA, 235 bp, Zea mays
  Peptide Sequence Number=SeqID_9201
  Probeset Number=SeqID_17333
ccccttgtattctagatggtacataacttaaacatatttgtttgggaagggatctggtcgccagcctactcctagtgaagatggaaatgtactaatgtggaagaagaattcaatactttagcacctaccttattggatagttttagatgtcttccactcattcgacataatgcacctcacaaagaatctttgtgttaatatacttggtttcctgagtctagctttgaaggagtta

SEQ ID NO: 2931 - DNA, 208 bp, Zea mays
  Peptide Sequence Number=SeqID_9202
  Probeset Number=SeqID_17334
ttgacctgtcatattttgttagaaagggtctcccaatttttggcattggtgttggacatagcacatatgacaaagcttcggtccactactatgtgcaatctcatatccagattaacgagtaccgtgatcgtataattttggtgagtatccgacaaaatgctctgagtttaagaatcacctatgtaaacatatgaatccagccctaaca

SEQ ID NO: 2932 - DNA, 510 bp, Zea mays
  Peptide Sequence Number=SeqID_9203
  Probeset Number=SeqID_17335
atcatcgtcgacggcgcggtggtgatcgtcgagaacgccatccgccgcctggcccatgcccagcaacgccatggccgtatgctgacccgcaccgagcgcttccatgaagtgttcgctgccgcccgtgaggcccgtcggccgctgatctatggccaactgatcatcatggtggtgtacctgccgatctttgccctgaccggcgtggagggcaagatgttccagcctatggccttcaccgtggtcattgcgctgctcggtgccatgatcctttcggttaccttcgtgccggcggccattgccctgttcgtcaccggcaaggtcaaggaagaggaaggcctgataatgcgcacggcgcgtcagcgctatgccccggtgctggcctgggtgctgggccggcgcaagctggcgttcgctggcgccgctaccctggtgttgttgtccggggttatggccagccgcatgggcagcgagttcatccccagcctcagcgaaggcgacttcgccctgcag

SEQ ID NO: 2933 - DNA, 546 bp, Zea mays
  Peptide Sequence Number=SeqID_9204
  Probeset Number=SeqID_17336
atggatgtgattggctattaccgcgaaattgccaccgtcaactatctggcaccggtgattgaaaactggtttctcgccgctgcgcccaataatccttttattcgcgagtggcaaaaacagtacgcgccgatcaagcatctgggggcgcacaactattttaatgagctggcaaagcgcgatgattttgccctgctgacgcagaaaatcgccgagccggcacagcagctgggttcgctggcgcagcaggcggcgatgcgcgaacatcgccgcgtgaacctgtatctgcgtaaatgtgaggccaacgcgtattactatcagcggctgaacaactggcaaagtgacgcctttgcgcacacggtgctatttcatcagcgcccgcatacgccgccgccggtgatcaagctgagcggcattgagcagctacatctcgacttcaatctgcgtctcggtaactataaccgccgcagcctgctgggggcgatgatgcagcccagcgcaccgctcagcgcgccgctggcctcacccatcaacaaagcgcgtgcgtag

SEQ ID NO: 2934 - DNA, 980 bp, Zea mays
  Peptide Sequence Number=SeqID_9205
  Probeset Number=SeqID_17337
tgtttcttattcagcgtcttttctgtgtggtctgaaattagtgttgtgcattcaccgaccgatcacttttcaaaatggtagtttactctaagatcactaaggacgctctttttgagtgtgtcaactatgttgtcgaaaaatctcaagaaaaaaaacgtaactttgtagaaaccgttgaattgcaggtcggtttgaagaattacgatccacaacgtgataagcgtttctctggtactgttaaattacgtaatattcctcgaccacgtttcacagtctgcattcttggagatcaacagcattgcgacgaagccgcagctaataaccttccattcaaatctgccgaagatttgaaaaaattaaacaaaaacaagaaattgattaagaaattagccaagaaatatgatgctttcttagcttctgaatctttgattaaacaaatcccacgtcttttgggtccaggtttgaacaaagccggcaaattcccaactttgcttactcactctgaaaacatgattgaaaaaattgatgaagtaaaagctaccatcaaattccaaatgaagaaagttttgtgccttggtttagctgtcggtaacgttggtatgtcaagcgaacaactagctcaaaatatcaacttggcaatcaatttcttggtttctttgctaaaaaagaattggcaaaacgtgaaatcattgcacgtcaaatcgactatgggaccatcgttccgtctttattaagctacaactacacacatttacattggtctttggctagattcgtttgtattgtttcgaacgtttttacgcttttgaccactatttttgtcaccctcttctgtcaatatattttttgttcgctcattttacttacgttattttacgtaaatataaataaattaaattcataaaaaaaaaaaaaaaaaaaaaaaaaaaaaaaaaaaaaaaaaaaaaaaaaaaaaaaaaaaaaaaaaaaaaaaaaaaaaa

SEQ ID NO: 2935 - DNA, 311 bp, Zea mays
  Peptide Sequence Number=SeqID_9206
  Probeset Number=SeqID_17338
atgctgactaccatcctttaccgcagccatctctatgatcacgttcccatcaaaacgctggaggatatggttggcaaagccaataagaaaaacgaagttcagatgtcaccggcattctgttatttgatggacggcatttcttccagctgcttgaagggcccgatcaggccgttcagggcatttacgaccgtatctgccgcgacgcccgccatcacaatctggtggagctgatgcatgacttcgcgccagcccggcgctttggtaacgtcggaatggagctgtttgacctgcgcgagcacgacaaatacagc

SEQ ID NO: 2936 - DNA, 576 bp, Zea mays
  Peptide Sequence Number=SeqID_9207
  Probeset Number=SeqID_17339
atgatggtgcggatcgtcgagcaccgcgccgaaactttgaaagatttcgtgatggagcaggaggttgcatcctccgtgccacgagtgcccgaccgccccgactctgggactgctgccgtgcacgctgcacggcagcatacaactgcgcagacatcccggactccgtcgagggcggcaccgggggcattgtctgcagccagggagttgctgcgtcaccctccaagctccacggcctcgctgggggccatgaagcaatggcaggacgacgttgaccgactgctcagcatggcacattctacctcgaccaggtcgaggccacggtcatcccggtgccaacatgaggtgtcgacgtctgtgcacttgccctaagtgaggggtgcacagaccaacgacctccgggcagagctcaaccgcaggcgtgcgggggaggatgcccgggtctctctggagagggcgcgggagcgccgccaaaacaccgagggtcgcaacctcgatcaagacttcgctgcggtagcaccgcgaaccccagtgggcgcccggttctaggtgggtgtccccttggccggcgtgggctgc

SEQ ID NO: 2937 - DNA, 348 bp, Zea mays
  Peptide Sequence Number=SeqID_9208
  Probeset Number=SeqID_17340
aaaaccaggaaccccgggatccaggaaccagccccagaaaaccagcggaagcagcctaccccaaaaaaaacccaccacacccctttttcgctggcaaagaggagctaaccaaacaacggcgggaaggaagagccggccacccgagcattagggcggcccaggccatcagggcttcatccccccggcatcggcgatctggggggcccgggaaaatctaagggaccccatctcagggatcttggaccccacccccccgggaagcccggaccacaggcggaaagggactggcccaaacagggaaaaccccttggaaaaggagttcatgcccccgcccgggcggcaaagggg

SEQ ID NO: 2938 - DNA, 779 bp, Zea mays
  Peptide Sequence Number=SeqID_9209
  Probeset Number=SeqID_17341
cttgcatgcctgcagggcccggattggacggtgaccgatctcgatctgaccctgaagaacatcacgctgcgcggcgatgactggcagagcgacgacggttcgctggccatgaacgccggcaactttattaacggcagctttgaactcaacgatccgatcgtcaacgccgaattctcaccgcagggcattcagctgacgcagttcagctcccgctgggtcaacggcgtgattcgcgccagcggcagctggacgcgcagcgataagcgcctgacgcttgacgatttagccattgccggcctggaatacacgctgccgcaaaactggcgcgatcgctggcagcagacgctgccgggctggctggatagcgtgctggtgaagcgtgcgaccgctaaccgtaacctggtgattgatatcaatccggccttcccgttccagatgaccgcgctcgacggtaatgcagagaatctgctgctggcgcgccagcatcaatggggcatctgggcgggcaaagccacctttaacgcggcggaagccacctttaaccgcaccgatttacgccatccgtcgattagcctgaacgccagcgatcggcagattgaggtcagcgagatgagcgccttcaacggtagcggattactggaaggcacggcaaccgcaggacaggaagcacagcgtccgtttacgctgaacctgaaaggccaggcggtaccggcaaacgtgctgcaaaactggggctggcctgcgctgccgctgagcggcagcagtaatttgcagctgca

SEQ ID NO: 2939 - DNA, 792 bp, Zea mays
  Peptide Sequence Number=SeqID_9210
  Probeset Number=SeqID_17342
atggcttcttcttcatccgtcggtaccaacctcacccaggcgctggaacatcagacgcgcgtcctcctctcggcgttggatatgcgtcttcaacctcacgacggcgactacgagtcccgcgtagcggattcggagcgcgcctgcctcgtggccctgccaacagcgacgaaccactccatcctcgccgagcttgacaagcgcttcgccgcgggcgactccaagtgggagctccgagtcggcgctctggagccctcgacggttggattcgctcagcaccgcgacgagtgttcctccgtcttccgcgcagacgtcaaggcgcatctctcagcagccaccctgccgtgtgttggtactcgtgtcgctgccttgcaatctgccctgcacgtgttcgatgctaggcgtccacgagtgatgttgccagtgttcgaagaccacgttatcagtgaacaactccccggagtccatgactgcctcgacaaccccatcaccacgttcctggggcctaacatcaacacagatggcgccgcaggccgaacagttcgtgcagcagcggcaggctggagccgcgtgccacatgccggatctgatccatacgagcctgacggtgcagcaccaggtcgcggtcgcgctggagcagcaacaccagccccaggacgacatgtccgcggcttgccacagcaagcagcatgccacgaccaggaagggaactacaaaatcatcgccaaagccgtgaacgaagtgtaccgggcagtcgacccctttggcgcagtcgtcgcccgcggcaacaaacag

SEQ ID NO: 2940 - DNA, 484 bp, Zea mays
  misc_feature (318)..(318): n is a, c, g, or t
  Probeset Number=SeqID_17343
ctgcaggcacgcagatgaggaagtcatggtctgcgagaatggcaagtgcaccggcgacattgctgggggcggaggagtgtgaagctacacgggcgtgtactgcgcgcatctcctctaggtcgccgaccgcgtggcgcttgccgtgggcgcggtctacctagatcacggagactgccgggcctttgttccggcagagctgggactgctcgctgacctcgtcctgctgcagcttagctgcaaccgattgtgcggtgtgctgacgtgcgctctatggcgcctacgtctcctacaagagctatgacctaagaaacataccgnttattaagcgcgttctaggacgttatgctatatctaccagagcttatatttctaaacctccaatttaacgactcatagggcgtctgtacatcgctgctctacgtacgcatgtcagcgccatcttgctaaaccacaacagactacggtttcagctgccggacaatct

SEQ ID NO: 2941 - DNA, 305 bp, Zea mays
  Peptide Sequence Number=SeqID_9211
  Probeset Number=SeqID_17344
atgctgcgcagcttaatcgcctcggcacagctgctgtggcgtaacggtgaaacccgtttctcgctgctcggcaccagcctgttctggggcgccggcgtcacgctgcgcttcctgctggtgctgtgggtgccgatggcgctcggcatcacggacaataaaacgccgaccacactaaatgccatggtggcgatcggtattgttatcggcgcggccgcggcggcaaaactggtcacgctgcaaacggtgcggcgctgcatgccggccggcgtgctgattggcgtgatggtggtgctgttctcgctgca

SEQ ID NO: 2942 - DNA, 688 bp, Zea mays
  Peptide Sequence Number=SeqID_9212
  Probeset Number=SeqID_17345
atgggactggtctcccgattacgaaatgtgcgcatcacgcgcaaactggcggcgggcttcggcatcgtcctgctgctggtggcgctggccacagcgctcagcgtgcaacgattcaatcagattcacgacatctatcagaaaaccaatctgatttatgacatcaacattgaagtctttcaggccaaaatcaatcgtcttaaatatctatacggcgaggacaaagcgggcggcaccatgacggattacgtcacgcacgctcagcaactgacgcagcaggcccagcagctgccgtggacggcggacgccagagggttgctcaacgatgtcgccagccatcttgcccgttttcagcacagcatcaccgccatgacccaggcaacccgacagctcaacgatctgcgcagccagttggatgcgctgagccagcaggacatgacgtcgcgctataccgcactaatccggacccctgtcagcacacccgaactcaccaaccagatctatcagttgctgtttgccatcagtaatgtgcgcgaagaggcctgggcgctgcgcttcaacgtcagcgaggcactacgcaataaactggaacatgattttcagcgcgccggccaggatatgaacacgctactgactcagctgccagcggagcagcagggtggatttaacgcgctatggcaggataccgaac

SEQ ID NO: 2943 - DNA, 369 bp, Zea mays
  misc_feature (26)..(26): n is a, c, g, or t
  misc_feature (41)..(42): n is a, c, g, or t
  Peptide Sequence Number=SeqID_9213
  Probeset Number=SeqID_17346
caaaccccccccccacacgcacgccngaccgaccgccaacnncatgcaaagctccacaattcgcccttaaccagtggtaacaacgcagaggacccggaggaacaggatagcttgttctcaacgctgattttcgccgctaaagtggagtgtttggcaggatgctatttttttcttccattagggtacgttcgggttttacggaacggtgggtttttatacggaacggtgggctacaacaattagagccggattgcttctctaattatttatataaggtttgatcagctggaataattttggatccatatttggccaaaaaaaaaaaaaaaaaaaaaaaaaaaaaaagtactctgcgttgttaccactgct

SEQ ID NO: 2944 - DNA, 443 bp, Zea mays
  Probeset Number=SeqID_17347
ggcaggggctggatcgcggcgtgttctttgacctgcgctttctggccgacggtgcaccaaaccctgatttcatccttaatcagccgggctggcagaacgcgacgtttttgctggtcggtgccaattttggctgcggctccagccgcgaacatgcggtgtgggggctgaatcagctgggcatccgcgcgattatcggcaccagcttcgccggcatttttgacgataactgccagcgtaacggcgtgctgacgctgagtctgagcgaggcggattatcagcgtctgagcgcggtggccgccgatgcgcagcgcaacaccatcagcgtgtcgctggagcagcaaaccattcagttcgcggatgaagtgattcactttacggtcagtgccctgaagcgcgaaatgctgatcggtggcggcagcgcggtggactggacccttccataa

SEQ ID NO: 2945 - DNA, 449 bp, Zea mays
  Peptide Sequence Number=SeqID_9214
  Probeset Number=SeqID_17348
ccccccccccccccccccccccaccccccccccccccaccacccccccctctccccctcctactcctccttctccccacactctcccccccccccccccccccccccccccgcccatccacccccaaccccaccccagaaaccgcaagaaacgagggcacccacccgaaagggatttagagggtgtacaatctcctctttactccacgccgaacaaaaaatgattttagcccctctaatcccctcggatccccggactccccaactagtcctaataatagtcgataaatgtagttattccattctttattttgttgtagttaataatattgctgtagtttgggtgtagaataattacatataataatgtgatggagggagcctcatttgttcatatgaccgaacaggctttatacatttagatagatgatgtctgagcagagtttatat

SEQ ID NO: 2946 - DNA, 529 bp, Zea mays
  Probeset Number=SeqID_17349
catcgtgatcctgtttcagggacacaaaaccggctacctcggcagcacggtgtttcgctacgacgccaccaaatatctgatgctcacggttacgctgccggtggagtgcgaaaccgatgccacgccgcagcagccgctggccggcatgagtctcaccgtggatccggccagtttgcaggatctgctgttaagcatcggcgatgacgagcagtttcagccgcagccgcaaacctccggcattcactctgcgttcctgagcgaggagatgctgtgcgccgcggaacggctgctggatgtgatggataaaccgcgtgatgcccgcgtgctcggcccgcagctggtgcgtgaaatcatttattacgtactgaccgggccgattggcggcgcgctgctgtcgctggtccattgccagacgccagttcagccaggtgggccgggcggtgccccgcatcgaaaacccctttgcttaaaaccttaaggcgtggaaatgctgcggcggaggtcaacataggtctcggcgtttcaccaa

SEQ ID NO: 2947 - DNA, 561 bp, Zea mays
  Peptide Sequence Number=SeqID_9215
  Probeset Number=SeqID_17350
tgctgcctgcaggatttaatatcgcggcggatggtcatcgccgacaccgccatcagcgtggccagttcgtgaatggtggccgatcgtttcgcaaacaggtagcgataaatagcgtcttttcggtcttcgggcagcatgatgagctcagggttaacagtgacgttttgcctgccatgccacgcgcgcatagcgtccggtacggcagcttcgctatcatagctcatctgaagttgaatcaggttcaacgaggcaatgagtcaggagacacgaaaatgcccgccctgcaacgtaatgaactggccgatctgaatgtttttctgctgatttgccggcgcaagagcttccgcctcgccgcgctggaactgggggtcaccacgtcggccatcagccacacgttgcgcagtcttgaagcgcgtcttggcgtgcgcctgctcaatcgcaccagccgggcggtggtgccgacggacgccggtgccgcttttttgcgccatctggaaaccggctttgcgcagattgagctggcgctgaacgatctgcacctgtatcgcgaatcacccagcg

SEQ ID NO: 2948 - DNA, 379 bp, Zea mays
  Peptide Sequence Number=SeqID_9216
  Probeset Number=SeqID_17351
gggagtttgtatgtctccagctaaaaacagctcaattgggatgtatggacttgaccgttggaatgtgtctaggtacctcgaacagctagggcggtcaggcagccccaatggagccctggcaggcgcgcagtcgtcggatcggctcgagtcctcagccctcggagagcgcgagccgggccatggcctcctacagtccacacactcacacccccgccgctaccgccggtcttctgcgttcgggacgggggttttagttgagcgtgcggtggtagagtggcctggcttgtcagggcaggctgagagaatccaagtacttttataccgggcgcgcgaggccaccgtaacaggcgagccggagatcggcacgccgccgcacgcg

SEQ ID NO: 2949 - DNA, 425 bp, Zea mays
  Probeset Number=SeqID_17352
cccctgcaggtttcactcggctttactactccactgagttgaaagtcggaactgcaacttattattttacctattcgttgtcagctcgcggactttgtaagaataccgcttgagaaagcaggtggtatgatggcactggtcgatgtttactgtctcttcaaccgtgctaggggaacagagttaatctcaccagaggaccttttgcaagcttgttcgctatgggagaaagttgatgtcccagtcatgctcaggaaatttgatagtggagtgaaggtgatccagacaaagacacatagtgatgaagaggtaggcaatcacaacaataagccttaatgcatactgaatgactaaaccacatattgcagccaatccgcattgttgctgttaatgtattatactgtcaccacagagtctgcaggcatgca

SEQ ID NO: 2950 - DNA, 406 bp, Zea mays
  Peptide Sequence Number=SeqID_9217
  Probeset Number=SeqID_17353
gatcgagctgatgattgtcatcggtatcgtcgccatcctcagcgccattggcctgcccgcttaccaaaattatctgcaacgtgccgcgctgaccgacatgctgcaaaccatggtgccctataaaactgccgtgtagctgtgcgccattgagcgcggcggaccggcgcagtgtcaggccggcgagcgcggtattcccgccgccaaaggctcacgctatgtggcgagcctgagcgtggtgaatggtgccattacgctgaccggccaggagagcctgacggggttaaccgttgcaatgttgccgatatggaatgcggcggaaggcgcactcagctggcaacgcagctgcaccagcgacaacgccagcctgcgcgacagctgccttgagcagttccgctttgccgacaag

SEQ ID NO: 2951 - DNA, 307 bp, Zea mays
  Peptide Sequence Number=SeqID_9218
  Probeset Number=SeqID_17354
atgcgtgctccatcctccactcgccggaagatgcagaacccacctaaaaaaaacgtgaagctcagctcgaccagtgctggtccggcagccgtgctacctcgcactcggagactggcggtggtggctgctgctccccgcccggcccggcccggtcctcgggcgcgacgaccggccgtggccgtgggcgtggccgctcggcgctgcttcgtcccgcggccgcaccctgagctgctccatcgcctcgatggccagcacgacctccgccatggaggggcggctcctggggtccccctcgaggcagcgcagc

SEQ ID NO: 2952 - DNA, 254 bp, Zea mays
  Probeset Number=SeqID_17355
atggcgggcaaaaccctgtatgaaaagctgatcgaacagcatgtggtacgtcacctggacgatgaggggcacgtgctgctctatatcgaccggtcaatcctcaatgaatacaccagcccgcaggcgtttagcggtctgcgcgaccggtcgcggcgcgtgcgccatccggccaccattctactcaacgtcgaccatgtgaacccgacgcggccgatgcgcgatgcggcgatgaccgacgctggcggccagctgca

SEQ ID NO: 2953 - DNA, 416 bp, Zea mays
  Peptide Sequence Number=SeqID_9219
  Probeset Number=SeqID_17356
atcatagtgaaaaagccaacgccggtacctcacgatgcagcctttaaagccttcctgacgcatcccgaaacggcccgcgactttatcgagctgcacctgccgccggcgctgcgcgccgtctgcgacctcagcaccctgaagctggagtccggcagcttcgtggaagagagcctgcgcgcttactacagtgacgtgctatacagcctgaaaaccaccgccggcgacggctacatccacgtgcttattgagcatcagtcaacgcccgatcggcacatggccttccggctgatgcgctacgccgtggcagcgatgcagcgccatcttgacgccggccataaaaaactgccgctggtcatccggctgctgttctatacaggacggcgcagcccgtacccttactccaccgactggctgca

SEQ ID NO: 2954 - DNA, 628 bp, Zea mays
  misc_feature (1)..(25): n is a, c, g, or t
  misc_feature (626)..(628): n is a, c, g, or t
  Peptide Sequence Number=SeqID_9220
  Probeset Number=SeqID_17357
nnnnnnnnnnnnnnnnnnnnnnnnntaccaggttctggaacgcattggccgtgttgcttacaagcttcagttgccggccgacagtgctgttcatcccgtctttcatgtgtcgcagctgaaacgtgcagtggggagagattctacactcattcctcagctgccaaatttgtctgatccattgcaggtgcccttgagcattttgcacgaccagacacgcctggtggagcgcggcggcgaactcattcgccaagtgaaagtgacttggtccgacatgccggtggaactggcgacatgggaagatgctgatgcactccgcgcacgattcccagctgcaccagcttgggggcaagctggctctgaaggttgggggaatgtgagcaccactcagccggtcaacgagaaggaagcaacggaggagagcagcgaaggcacgaaacgtctgaacaggaagcgttacagaaggccaaatatgaaatatgttgggccacaatgggtcaactagttgggccttgtaactagctgtgtgagaatacgattccagagaccatataggctctgagggcatcagacatcagggtatcgagaatataacaacaaactattctacctaaagaaaaaaaaaaaannn

SEQ ID NO: 2955 - DNA, 563 bp, Zea mays
  Peptide Sequence Number=SeqID_9221
  Probeset Number=SeqID_17358
atggtggatcgggaactgcggttcgacgagttgaccttcaacgacgaatcggcaccgcatcacctcacgcccatccacgaggccctcttctccgacggcgctgaccccttcttcggcgaggagctcgacatcctcaccacctccgagttcgacatcgagcagtcgtctgtggacacccgatctctgcgcacgccgccctccgcaggagagttcgagcgcgtcgaggacatgccggggttgcgacacctagtcgtgctcagcgaccgcgctgtcgccgatgtttttgtcgcgtactccacgctcaaagtgtttgatcaaatgcccaacccaggtttcgatggaggtcctatctttgacgaggaacctgtcttcgagggagagccgtttccctccaccactgactacatcgacgcgctgcgcaacgagatgaacgagttcaagagcaagcgcgacgacgtcaagcgcatggtcgactcctccgagcgccagggcatggaagccaccagccatgtcaagtggtggctagagtgcgtcatcctgctcgaggacgccgccgtgcggat

SEQ ID NO: 2956 - DNA, 231 bp, Zea mays
  Peptide Sequence Number=SeqID_9222
  Probeset Number=SeqID_17359
tgcagcctcgacaggtggccatctggttccagaaccgccgagcaaggtggaagaccaagcagctggagaaggactacgacgcgctgcgccgccagctggacgccgcccgcgccgagaacgacgccctcctctccctcaacaagaagctccaggcagaggtgtgtactatgatgcaggaggcggcgtcggagctcatcaacctcaacgtcaaggagacggaggcgtcctgca

SEQ ID NO: 2957 - DNA, 402 bp, Zea mays
  Peptide Sequence Number=SeqID_9223
  Probeset Number=SeqID_17360
accaaaccatcccacaactacaaacgcatgcagcagcggcgcatcgtgtttaagttcgggattaattacggcacgccggcggagaaagtgcggcagattggcggcatggtgcaacgcatcattgaaggcgtgccggacacgcgtttcgatcgcgcccatttcctgtcgtttgacgaatcgcagctgacgtttgaggtggtctatttcgtgctgagcgccgattacaacaaatacatggacatccagcaggagattaacctgcaactgatggcgcagctggagcagaaacagattcgtttcgccttcccgatgcgccgcgtggagttcaccggcggcgtgctgccgcgcattaacctcagcgatgcctcaaatgaggctgcggcagagcgcgcacagcactga

SEQ ID NO: 2958 - DNA, 245 bp, Zea mays
  Peptide Sequence Number=SeqID_9224
  Probeset Number=SeqID_17361
tgcaggattccgcgctggcgggtattcgcgatccgctgacgctgcgctatgccaccattgtttcctatgccaacggtgccggcgcgctgctgcgcaccttctcgcgcgaccgcgaacgcgccattgcaatgatcaacgccatgacgccggatgagttctaccagcacgtgcagaacaagcatccggccgcccaggcgccgcgctacctgtggaaagtcaccaccgcctatcgcaccatcggctaa

SEQ ID NO: 2959 - DNA, 341 bp, Zea mays
  Peptide Sequence Number=SeqID_9225
  Probeset Number=SeqID_17362
atgaccattcgtatcgcaataaatggttttggtcgtatcgggcgcaacgtgttgcgtgcgctgtatgaaaccggtcgccgggcggaaatcaccgtagtggcgattaacgaactggcggaagcagctggcatggcgcatctgctgaagtacgacaccagccacggccgctttgcctttgacgtacgccaggagcgcgagcagctgtgggttggtgacgataccatccgtatcctgcatcaggcggagattgccgcgttgccgtggcgcgagctgaatgtcgatatcgtgctggactgcaccggcgtgtacggcagccgcgacgatggtgaagcgcatctgca

SEQ ID NO: 2960 - DNA, 211 bp, Zea mays
  Peptide Sequence Number=SeqID_9226
  Probeset Number=SeqID_17363
ttcgcgggccagctcgcggaactcgatgcgttcctcggctggggcgtcgccgaagatcatccgctcgccggcgcggtcgcgatgccggtgccgccgcacgcaccggaacgcatcctgctcggcggctcgcccgacagcggcgcgctcgccgcgcgccacggctggcgcttatgctacgccggccacttcgacggcgacgacgcgaacctcg

SEQ ID NO: 2961 - DNA, 911 bp, Zea mays
  Peptide Sequence Number=SeqID_9227
  Probeset Number=SeqID_17364
tggaagggacagcttcaccgacgacgccgaatgcggcgttggcgacgccaccttcgctgtcggcgacctcgacgtcgaggacgtcaacacccacgtgcgggtcagcatcccgcacacctcaggcaccggggtctggctcaggcgcccgatctgcattactgccggaggttgatgacaacctggacgttgaccccaaccacgctcctcttcgttatcaatccatcactgatatcatggggcaagaaccagcacctggacttgttgaacaggcgtcagatcaagagctactgatggcaactgggaatgaaccactcactacagaggaggcaatgagtagtgagcaatggcgaacagcaatgttggaagagatggcgtccatagaacacaataagacctggacattggtgaaccttccagcaggacagagagcaattggtctcaaatgggtgttcaaaatcaagcacaatgagcatggggacgtcaccaagtacaaagcgcgtctggttgccaagggctatgtacagaagaagggcatcgactttgaagaagtgttcgcgccggtggcgcggatggagtcagtgagactcatgttggctgtggctgcacatcgaggttggtcagtacatcacatggatgtgaagtcagccttcttgaacggggatcttcatgaagaagtttatgtaacacaacctccaggatttcagaacccagagaagggccaactggtgctcaaactgaataaagcagtgtatggcttaaaacaagctcccagagcttggaacattaaactggattctgagctagcctccctagggttcagtagatgcaaagtagaacatgttgtctacagaaggggagttgggaagtccatgctgattataggagtatatgtggatgaccttatcaagtga

SEQ ID NO: 2962 - DNA, 333 bp, Zea mays
  Peptide Sequence Number=SeqID_9228
  Probeset Number=SeqID_17365
gtcacctgcagcgtggcgaggggattgccccggaggaggcgattttccgcgccgccgtgctgcgcttccggccgattttgatgaccactttcgccgccgtgctgggggcgttgccgctggccatcggcatcggccagggggcgagtttgcgccagccgctggggttgaccatcattggcgggctgctggtgagccaggcgctgacactttacaccacgccggttctgtatctctggctggagcggctgggcacgacattgcgcggcgggcgggacaaggccgcgccgcgttcaggtagcattgtggaggcgccatgaggcggattgcgttcat

SEQ ID NO: 2963 - DNA, 214 bp, Zea mays
  Peptide Sequence Number=SeqID_9229
  Probeset Number=SeqID_17366
atgaaattaaaatcattgttaatcgctcacgcggtgctgctgggcagctgtgcggtgcaggcgcaggcagcagatgacgcatcactgattaaaaagggcgagtatctggcgcgccttggcgactgtatggcgtgccataccgtggccggcaaagcggattatgccggcgggctggcgattgagtcgaacctcggcaccatttactccaccaaca

SEQ ID NO: 2964 - DNA, 501 bp, Zea mays
  Peptide Sequence Number=SeqID_9230
  Probeset Number=SeqID_17367
atgaagcaaactgtggcggccctgctggccaaaacgctggagagcgccggcgtaaaacgcatctggggcgtaaccggtgactccctcaacggactgaacgacagcctcaaccgcatgggcaccattgaatggatgccaacgcgccatgaagaagtggccgcttttgccgccggggcggaagcacaaatcagcggtgagctggcggtgtgcgccggctcctgcggccctggcaacctgcatctgatcaacggcctgtttgactgccatcgcaaccatgttccagtgctggcaattgccgcgcacattccttccagcgaaatcggcagcggctattttcaggaaacccatccgcaggagttattccgcgagtgcagccattactgcgagctggtctccaatccggaacagctgccgcaggtgctcggcattgcgatgcgtaaagccatcctcaatcgcggtgtgtcggtgattgtgctgccgggcgacgtggccctgcaagtc

SEQ ID NO: 2965 - DNA, 247 bp, Zea mays
  Peptide Sequence Number=SeqID_9231
  Probeset Number=SeqID_17368
tgcatgcctgcagctggcgaatgacagcgagtttggcctgagcgctaccgtgtggagcggcaatgaagcgctggcgcaggaactggcagagcagctggaaaccggcgcggtgtttatcaacggcaacggcgcctcagatccgcgcgtcgctatcggtggcgtgaagaagagtggttatggccgcgaactctccagcttcggtgttcacgagttctgtaacatccagacggtgtggaaaaaccgtcgc

SEQ ID NO: 2966 - DNA, 455 bp, Zea mays
  Peptide Sequence Number=SeqID_9232
  Probeset Number=SeqID_17369
tgttccggggtggtgtgccgcgtgaacattacacccgggagagtgatatccgtgaagaaatgtgtgcctagccaccagacccggggacagttcaaggatgacggcaccaacgggcgggttcgggacttgttctcggggagagtggggcgcgtggggtccattcggcccaaagacattgttcggttcctcggctggtgctggaacaaaagccaccggctggttatgtacgaatacatggcccacggcaaccttgggcggtgtcttcaacaacgggccgggccgggcggcacacttgaattggaagccccgcgacaacaaggcccaccacatccttataggccttggcttccaggcaaaccattccggatttgggctggcccagcttgttcaagacggcggctttggacggttgttcaacaacgttgccgggttctaaggctaccatgcccctggtt

SEQ ID NO: 2967 - DNA, 514 bp, Zea mays
  Peptide Sequence Number=SeqID_9233
  Probeset Number=SeqID_17370
atggcggccaacggtgcgctgacgttacaggtggcgcgggcgttacagcgcctgacgctgcgctggggcgagagcattggcctgctgggcttcgacgaactggagtgggcggcgctggccggcgtcggtatcaccacgctgaagcagcccacctggcagatcggctatgccgcgctggagcaggtgatcgcgcgtatcgaaggcagcgaacagccgatccgcgagcaggttttctccgcgagacaggctggaggaaagatgtcgaaagcggaaattattgtggtcacggctgcctacggcgcgcacaaggtggcagaactgggcggccaggcagcgctgctgccgctgattaaagcggccggtgccgatggcgtcgagatccgccgcgagctgttcagcgacgacgaattgtgccagctgcatacgcttagcgacgcgctgcgccagcatcagctcagcgtcagctattcagtgccggaagcgctgtggcaggcggatggtgcgctcaatccac

SEQ ID NO: 2968 - DNA, 243 bp, Zea mays
  Peptide Sequence Number=SeqID_9234
  Probeset Number=SeqID_17371
acttccagtcaaccggggcagattacatgttttatcagacgctgcgtgcaaataactggcgcaatatttgggtggtcggtgatttgcacggctgccgcgcgcagcttgatgcgcagctgctgcggcagggctttgatcggcaacaggatctgctgctatcggtcggggatttaatcgaccgcgggccggacagcctcggctgtctgcaactgcttgaagagccgtggttccgctgcgtgcgcg

SEQ ID NO: 2969 - DNA, 292 bp, Zea mays
  Peptide Sequence Number=SeqID_9235
  Probeset Number=SeqID_17372
ggcagtccatctccgcgatcagattcgcgagcttcgggacgcctgtgggcacctgcggcaacttccagcaaggaggctgccactcggctagctctcacgctgtgctagagaaaagatgcattgggctccacacatgcgtcgtcgccatctcccccgacaatctcggaggagacccctgcccgagcgtgacgaagagtgtgtcgatcgagactggtgtgctctcccaccgcttaggattagcatgcccgcccgcccttacttctccgactcaccgagcaacggatttgaaggc

SEQ ID NO: 2970 - DNA, 248 bp, Zea mays
  Peptide Sequence Number=SeqID_9246
  Probeset Number=SeqID_17373
agtctttctgactttgatttttccactgcactttacaagtgaaaaatatgctttttattttcaggcagggttactccagaaagtgtcattttcagttttggcactgtacttcttgaccttctcagtgggaaacgcataccgccttcacatgtaagcttcttgctagaaatgtcttatgctttgttagatatgaggtctgtttctgcaaatataaaaatacacatgccacccatgcttgcagactgcag

SEQ ID NO: 2971 - DNA, 259 bp, Zea mays
  Peptide Sequence Number=SeqID_9247
  Probeset Number=SeqID_17374
atgcccaataaggggtggggtaaggaattggctgcctttaaaaggcaaggtcaccatgggctaatcgttggactctatggcgctgggggcaaagggggcgaaggcaccgccgccaccacgaacgagttcccaccaaggacgaccacctcagccaccgaggcctccctggggacgaccacgggggatggcagctcaaggatcaccacgttagcagccgatgatccaagcgcctccagggcaatcagggagatcaacgctg

SEQ ID NO: 2972 - DNA, 446 bp, Zea mays
  Probeset Number=SeqID_17375
tgcagtatgtctggcagtcggattacatcagctcctcgtggaacaccgcgcgggtaaaagatccgctggtcgaccatttcgtgcagcagatcgtggcgcatcagggcgatgaaaaagcgctgctgccgctcggtcaggcgctggatcgcctgctgctgtggaacgcctacatgattccgatgtggtacaacgccgaacagcggctggcctggtgggacaagttttcccatccgcagattaaaccggcgtttgccacagggctggaaaactggtggtacgatattgcgccgggtggtccggtcgatcaggcgctggccaacatccagtttggtcatagtaccggtctgcctggcagcggcggcagtgacagcggtgcgcgcggtgcgctggtgcgcgacaatcccggcgacagccagtaccgcggcgcgcgcgggctggatccggag

SEQ ID NO: 2973 - DNA, 377 bp, Zea mays
  Peptide Sequence Number=SeqID_9248
  Probeset Number=SeqID_17376
atgcacgtgcgcagctacacgatggaccgccgcgaagtggcgaccgcgctcgcgaacggctccgtcgacatcgcgatcgacgcgccgctgatcggcgacccgcacctgcaccaggcgctgctcgtgcgcgaccgctatgcgtgcatgatccgcgacgaccatccgttcaagggcgacacgctgaccatggacgactacctgtcgatggggcacatccacgtgtcgagccgccgcaagggcagcgggcacgtcgatgcggaactgacgcggctcgggctgcgccgcaacatccagatgcgcgtgcagcactacatggtcgcgccgctgatcgcgatgcgcggcgatctcgcgttgacggcgccgctcaggctgctgca

SEQ ID NO: 2974 - DNA, 467 bp, Zea mays
  Peptide Sequence Number=SeqID_9249
  Probeset Number=SeqID_17377
ttaatttaagggacggaaaaaaaaatttattatcaggcaagcaagctttataaaatttagaacctttaaaagtgattacatttttttttttttttttattttttttttttttttttatttttttttattttttttttttttttttttttttttttttttttttttttttttttttttttttttttttttttttcaaccaactgactttgtttgacttcaaagatccaaagacaagttgtttacaattaccaatcaaatcagcttcaatcgtatagacaattattaagaagtgttatcatttcgctttaggaaaacagttgggaggagagtcgtggatgtttccccacgccagtttaggtccggtcatagaggctagcgcaaggatagagtgagcatagaccattactaagaagtgttatcatttcgctttaggaaaacagttgggaggagagtcgtggatgtttctc

SEQ ID NO: 2975 - DNA, 462 bp, Zea mays
  Probeset Number=SeqID_17378
ccctgcatttcaagctactgcttccattatcaaggcccctgttttcattaaaggtgcaaaacgccttgagggaaagaggcctgatatatttgtagtcaactcttttggttctggtttccaggcactttttattttcctactccttccatttctctctaacttgaaagggattccttttgctgaactcccttcatacctaacccatggtgttgcatgctttctgaatgttggagggaatctgaagggtgagtattgtttctcatatcacattcaggtggtaaataagtggagcttctcatattatataatttcaaatctatggttaattacagaaaaaagtgttgttctcatatcctgcactctcatggccattgaagggcctcttttcatggaaaaattagaaattctcatgctactacgtcggctttgagacacatgaaggttttgattctttggttgtcc

SEQ ID NO: 2976 - DNA, 334 bp, Zea mays
  Peptide Sequence Number=SeqID_9250
  Probeset Number=SeqID_17379
tgcaggcgcagctgacgcagccgggcaagcgcaccggcaaaatctattacgttcaggtggaaggcgtaccgcaggaatcagatttatcccgcctgcgcagtggcatcaccctcaacgatggcccaacgttgccggcgggcgcagaagtggtgcctgaacccgcgtggctgtggccgcgcaccccgccgattcgcgagcgcaaagccatccccacctgctggctgaaaatcacgctgtatgaaggacgcaatcgccaggtccgaaggatgacggcgcacattggctttccgacattacgcctgatccgttttgccatgggtgattaccagctgca

SEQ ID NO: 2977 - DNA, 279 bp, Zea mays
  Peptide Sequence Number=SeqID_9251
  Probeset Number=SeqID_17380
tgcgcgccgcacgtgcgggactacgtcaccggctccgcctaccgctccgacctcgacctcgtggcgcgggagtcgaccgcctacgcgcgcgccgccgcgccggccggcgccgccgacggacgcgacgcctgggtgttcgacgtcgacgagacgctgctctccaatctcccatactacgccgagcacggctacggcttggagctccacaaacacagatcaaaatttacaaaaaaaaaccctttaataatttgtttttcttccatttatatgtaccaacag

SEQ ID NO: 2978 - DNA, 330 bp, Zea mays
  Peptide Sequence Number=SeqID_9252
  Probeset Number=SeqID_17381
gactttaaggatccccctgcacacacagcaactgcagccgacgcttgaatttggttaatacactgagatatatgttttgaaaggatgtttccctacgagggttctggctccagaagtggctgaactcagacaatgattgactacctcttcctcatggtccttgtgcatgaaggcaaactcaaatgccagatggagtccatttctttcggtgagttcagcttggctctggagaaggccatgggcaaacatggaagccagccgaagcaagttatcaagttctgggaccagggcggtttagaggatctgagagcatacgattgccatcgatct

SEQ ID NO: 2979 - DNA, 309 bp, Zea mays
  Peptide Sequence Number=SeqID_9253
  Probeset Number=SeqID_17382
gcacgccatctttgccttgtgcagctatcgcaactattatgaactgcttggcacacgcattttgcacgtgatcgatccggtgcagtttcctgcccatcgatcacggggtggtctcagccacggtgattgccaacaccgatctggaagccgacggctgggacaccggtctgatggtgctcggcaccaagcgtgccaaagcgctggctctgaaacagcatctggcggatgtatctgattacgaagccgggcgacggtttgagccactggatgtcgacacagtttaaatcgttatttatcgatcaaccctga

SEQ ID NO: 2980 - DNA, 225 bp, Zea mays
  Peptide Sequence Number=SeqID_9254
  Probeset Number=SeqID_17383
ccttgaattttcttaataaagctaacacgatggctttaataaaggaaaccgtaattttggtttatcataggactgacaacttctgcgtttgttggtctttattttcagatcaaagaaacttcgtgcgtttgttggctgatgaaggttgtgctgctcttggtaaattgttggagccacaagattgtgtagctcacattcttctattcattgtcaatttctctcagg

SEQ ID NO: 2981 - DNA, 434 bp, Zea mays
  Peptide Sequence Number=SeqID_9255
  Probeset Number=SeqID_17384
gtactgaaactcattctttctgaaagccatttgttgcatcggcaatgtgtttttgcaggtccattgttacacttgcattgacattgctaacaagttcccaggcaatattgattgtatggtcgaaaagagctggaaagtatgactatagtgtcacaacagcaaattttgtggaaactttgaaatgtctactatcacttgtagcattgtccaggatatggaacagtcaaggtgttacagaagataataggttaattacatcgtttgatgaagttagagtttaccccattcctgcaatgctttacctggtcaagaacttattgcaggtatgtccagttgcacactcattttgttgtaggatttaaaaacaaaaaacaaaaataagccaaacataaccatgtttcccttcttctgtgggtgtcaatattatatctttg

SEQ ID NO: 2982 - DNA, 432 bp, Zea mays
  Peptide Sequence Number=SeqID_9256
  Probeset Number=SeqID_17385
ctcgacccggccgttgaggatattctcatcaccgcggctcacgtcacgctgtacgactttgacaccgatgtcaaccagtgggtgcgttatgcgtgctcaggcgcgcgcctgtctgattcgcctgaccctagacggaaggacgtggaggggtcgctcttcgtcgtcaagagtggcaaggcccccgcgtcgtcctcctctgggcgatatgggcggctcctgttcgatcccgcccaactccacccaccgccgccggtcttcacccccgccgtcgctggagcagctcgccggaagtccggcgagcagcgaggagggcggcggcgggactgctctctcactcatttccctcccttcttccaccctctccactcctccctcttcctggaggtggccggtgacctgatccgcgctgggaaggccggatcggcgggctag

SEQ ID NO: 2983 - DNA, 455 bp, Zea mays
  Peptide Sequence Number=SeqID_9257
  Probeset Number=SeqID_17386
agtggtggcctccaaggttggcgtgagccttaggtaggtcagcaaggtcggatcctgcgaatggaagaggccaaacgacacgtcaaaggggacggtgcaggaagtgtttaaggtcgaggctatggtgtctgtacagagtgaggtatgtgttcatagcctccaagtacccggagacagtcactaattccgagttggccgcaggcctcaaggagagtgtcattaaggctgtcatacaggagaggtacctgtaggagaagactttcttccacctatacctgagggggcggttggtgatcgacgggcctctcgggtgcacgggcgtctgcggcagcaacatcattatcaacacctacggcggatataaagcaagggacgggggcgctttttcaggcaaagaccccggcaaggtggaccgcatcggggcctgtgtcagcaggcagacggccgagagcatt

SEQ ID NO: 2984 - DNA, 342 bp, Zea mays
  Peptide Sequence Number=SeqID_9258
  Probeset Number=SeqID_17387
gctcgcgcggttcgtcgccggcgcgcatgctgccgtcaatctcgtcggcgtcttgcacggcggccacggcacgccgtacgggcccggcttcgagcgcgcgcacgtcgcgttgccggccgcgttggccgccgcgtgcgtcgaggtcggcgtgcgacgcgtgctgcacatgagcgcgctcggcgccgattcgcacggcgcgagcatgtaccagcgctcgaaaggcgacggcgaggccgcgctgcatgcggtcgcggcgaccgattcgctcgcgctgacgatcttccgtccgtcggtcgtgttcggtaccggcgacgcgttcctgaacacgttcgcgaacctgca

SEQ ID NO: 2985 - DNA, 258 bp, Zea mays
  Peptide Sequence Number=SeqID_9259
  Probeset Number=SeqID_17388
atgtgggtcctcctgtgccggtgccggattcgccggaaggcgatgcaacggggcgagcaccgcgtctacgcagcaggcatgtacaggcggatgaggtcgttggccgcgtccggatctagaacggctcactataccctgaaggtggtgcacgagcgtgatgtggcggtggcgccaacacaagctctagccgatcaaggtgatcaagatctgcaagggcttcgcgtgctcttcctccaccgtctggcagtattcagtccc

SEQ ID NO: 2986 - DNA, 399 bp, Zea mays
  Peptide Sequence Number=SeqID_9260
  Probeset Number=SeqID_17389
acgccgcgtccactcgcggtgctggagcagcgagtgatggggctgcgaagccgtgcctacctggtcaccgagtatgtcgatggcccggacctggccgaatgcttcgcgccctacgtggataacggcgatgcgcccgaggagcaggtggatgccttggtgcatgtgatgcagcaactgattcgcgagcgtatcagccacggcgacttcaagggccacaacctgttctggcacaacggccagtggtcgttgatcgacctggacgccatgtgccaacacgccactcagctcagcttcgcccccgcctacgcccgtgatcgggcgcggctgctgcgcaactggccgagtggcagtgcgttgcatcagcggcttgaccggctgctgcccaagctggccgagtaa

SEQ ID NO: 2987 - DNA, 786 bp, Zea mays
  Peptide Sequence Number=SeqID_9261
  Probeset Number=SeqID_17390
ctgcagagctaacaacgaaatggcttcgctggggttgttgggcctccccattcacctattctctcaatgctgttgctctgaatgaattcctggacaaaagatgggctactgtaactaatgaaaatgctcataccacagggcaagctatactgaaggttagggggttaatatatgagtggcactggtattggatttgtgttggtgttttatttggtttctccctgctgttcaacatcctaagcatacttgcattggagtttctaagttgtatgtgcatcaaacaaaaccattctgtatttaagttgatcaattatttaggacacttattctttctaaattatttgtagctcccaaggaacatcatgtcaaaataaaatcacaaaaggaatgcgacatacggtacatagatcaaactgttggtggtcaggtttccccaattgatcaagtccaccttccattctatcctttgtccattgtcttcagtcaaatcaactattttgttgatatgcctcatgaattgagaaagaatggagtaactgaaaagaagcttcaactgttacgagatgttaatggtgcattcaggccaggggtgttaacagcattgatggggatcactggtgcagggaaaactacattgcttgatgttttggcaggaagaaaaacaggagggtacattgaaggcattatcaacataggtggttaccaaaagaagcaagatacattctcaaagatctctggttactgcgagcagactgacattcactctccatatctcacagtctatga

SEQ ID NO: 2988 - DNA, 282 bp, Zea mays
  Peptide Sequence Number=SeqID_9262
  Probeset Number=SeqID_17391
atgcggtctgtcgtcgggtgcttccgcctggccgtccggctcgtggcgcagccgggagtggtactggctgtgcgctgggcgcttgtccccgaggatgtgtcagcggcggggcgcccccccttggctgctgggtccggcccgttaatgtttctgggcgccttgacaggtcggccccgctgtgcggtcgtgtctgatgtggattggggctgtggcgccttcccttatctgttgggtgggtgtcctttgtggccgggcgccatgtgggggccgttcttgtcgtag

SEQ ID NO: 2989 - DNA, 401 bp, Zea mays
  Probeset Number=SeqID_17392
atgatcccgctggtgttcactaccgccttcgcctttttccagggccggcagcgggtgattgctgccgcgaccgtcggcgcgctggcatcgctggcgccgacgctcggcccgaccgttggcggctggatcaccgataacttcagctggcactggctgttttttatcaacatcattcccggtatttacatcaccattgcggttccgctgctggtgaacatcgacgcgcccaaccgcgaactgctgcgcggcgcggattatctcagcatcgtgctgctggcgctgtcgctcggctgtctggaatatacgctggaagaggggccgcgctggggctggtttgatgatgacaccattgccaccaccggctggattgcgctggcggcgggcgtgttgtttgtgatccg

SEQ ID NO: 2990 - DNA, 706 bp, Zea mays
  Peptide Sequence Number=SeqID_9263
  Probeset Number=SeqID_17393
agcagtggtaacaacgcagagtactttttttttttttttttttttttttttggtttttttttttttttttttttttttttttttttttttttgcgggggaaaaaaaagaaacttttatatcaccaaaattgaacacagggatatggatgtagggcccagacaaaagagacgatgaacgcaggcatgtattattactggcacgtagctatgattttcttcccatcggcttaatggacccgagcttagtttacatgtgggccgatctcttccctgcgtacttgggtattatccaatccaatctatcatcctcatcctagcttgcagaggcttgaatgcttgcattgcgtggttaagttcagacgggatgacagcttgaccaggagcaaaagatgaccccgcgaagtgaggggcgggagatgatgaagattacccgactcaaaagccacgcgttgcactctgggcggccggccgtatcttgttttgcctctgcaccgcgcgcgcggcggcagcgatcagaattgaagcagcgacggcgatgtagtacggctgatgagaggaggaagcacagaaagtagctttgctgccagaatgggtagcgacgacgacgacgacctagctatggctgccccatgccgtgccatggttcgttgctgctttgctgatgctgctgatgcgccccgcgtactctgcgttgttaccactgctt

SEQ ID NO: 2991 - DNA, 406 bp, Zea mays
  Probeset Number=SeqID_17394
tgcagaaccgtggacagaagccgctggagctggtgattggcgggctgctgctgtttgtcgccgccgcttatatcgttgagctgttcttctcgcagccgcgcgtcagcgatctggtagtgggcatggcgctgccgagcctgcctacttcggacgcggtcttcctcgcggctggcgtactgggcgcgaccattatgccgcacgtcatttatctgcactcggcgctgacgcagtacggtaataaaggcagcaaggcggagcgctactcctccaccaagctcgacgtggcgatcgccatgaccattgccggtttcgttaacctggcgatgatggccaccgcagcggccgcgtttcactttagcggtcacaccagcattgtcgatctcgaccaggcctatctgacgctgca

SEQ ID NO: 2992 - DNA, 496 bp, Zea mays
  Peptide Sequence Number=SeqID_9264
  Probeset Number=SeqID_17395
tgcaggaaaccgggcagatcaccacgccgatgcgcgtcacctacatgccgggcggcgtcggtgccgtggcatataacgccatcattgcgcagcggcccgccgaagcaggcacgctggtggccttctccggcgggtcgctgctgaacctgtcacagggcaagtttggtcgttactcagtggatgacgtgaagtggctggcggccattggtacggactacggcatggtcgccgtgcgcgctgacgcgccgtggaaaacgctgggcgaactgctggaggcgatgaaacaggatccgactaaagtggtggtcggcgctggtgcctccatcggcagccaggactggatgaaaaccgcgctgctggcacgggaagccggtatcgatccgcgcaaaatgcgctatgtggcgtttgaaggcggcggcgagccggttaccgcgctgctcggcaaccacatccaggtggtatcaggcgacatgagtgaaatggtgccgcacctgca

SEQ ID NO: 2993 - DNA, 307 bp, Zea mays
  Peptide Sequence Number=SeqID_9265
  Probeset Number=SeqID_17396
ggagccctagtcatagtgttgtgccgcagcctgccgccgccctgctctaaatcggaggatcgcttctcatgtctcatcctatgctcaaatcctaggtccgacactgattgcgtactaagacctttgatgcaagcgcaatagagcctccacagaggatgcttcatggcgttggatgtgatctcttctccatcgccattggtgcagataggattgtatctgcgggcgaggatggctctgttagaatctggaacttctcagaagcattgcatattgagaggagggcacaggccctaacgagtttgaggca

SEQ ID NO: 2994 - DNA, 208 bp, Zea mays
  Peptide Sequence Number=SeqID_9266
  Probeset Number=SeqID_17397
atgagttgtagggagggacttatgtcaccacaaacagaaactaaagcaagtgttggatttaaagctggtgttaaggattataaattgacttactacccttaaatcatgcataaaatggcacatcgacggcaataatccaccattgaaaaccaaccattcgacgcaattgcctttctcggcaacactgcaggtcgcatcgaatatgccc

SEQ ID NO: 2995 - DNA, 574 bp, Zea mays
  Peptide Sequence Number=SeqID_9267
  Probeset Number=SeqID_17398
atgagctggttcacccccgatgtgatcgatgtgatcctgtctgcgctgcgcgccattgtggtcctgttagcagtggtggtctgcggcgcactcctcatcttcctgcacccccgtctggtacggtgtgggcatgaccactcacgggccgaaccggctcgggccggtctgcatgaccaacatcgttagcgacatgctgtagatgactttatacgaatactgctgctcctccatcggccactgcttgagctctctcttggacccggacgacgacatgagctccctgcacatcgtgctcgagatgatcccgatgcacccgacctacgccgtgaggtacccgaccatggtcctgctggtgctctacacaatggtcgcgctggtcggctacgcgcagctgttagtgcactggtcctcgaacaaccggtactccttggtgggcaccatgcgtgcctcggcacagaccgcgacgtacgaactgttactcggcctggcacttatgggcgcttgggcacatgctggttcggtcaacatgcgcgacatagttgaataccaaccccataacctgtggattattatt

SEQ ID NO: 2996 - DNA, 491 bp, Zea mays
  Peptide Sequence Number=SeqID_9268
  Probeset Number=SeqID_17399
gctaccggcgggggttcgggttcacccgacgggtgaagagctgggggggcacttcctttggcggggctgggccgggctggccattttcgggcccattattggcgagggcgaactattcaagcaccaaccctggcaggttccaaggatggggcttgaccgggaaaaggaatgggacttttttttcccgggggaacggaaggacccgaacgggttgggggcgaaccgggccggcggggccgggtactggaagggcaacggggcaaaccagccggggggcaccccgaaaccggggggcattaagaagggacttgttttttacgccgggaaggggcccaagggcgaccagaacaactggatcatgcatgagtaccgcctcgccgacgtcgaccgcaccgcccggacggcgagacccatttctctccggtgtgaaccctggagatgctgcgccgtgcgtcatctccttcaaccgccaattatctcttgcgcttttg

SEQ ID NO: 2997 - DNA, 1415 bp, Zea mays
  misc_feature (1415)..(1415): n is a, c, g, or t
  Peptide Sequence Number=SeqID_9269
  Probeset Number=SeqID_17400
cttttgtgccttgccccaagagatgagatgaagaaaaaagaagagaagagaggggagatgagggcataccgtcgctcatcatcgtcgttcctctccaagaattggtggctactctccggatcatgcctagtacatctttcttcctcgatgaaggtacttgattcatgttgggaatgagggaagtagcagcacgttcaccttcactgttataataacgatgcccagttgcagccatgatttaattagaaactcgatgacaaatgatgtttgtttttttctagtcatgggcactagttaattcatttcatgtcgttatgtttaacttccctttgctagcagattaataatgcttagtatgtttttgtcatgatatatgtttttacactgttgcccctcggttatgcaatttttcaaaggagatgctgccgaaattttatatttaaaaaaaaaaaaaaaaaaaaaaaaaaaaaaaaaaaaaaaaaaaaaaaaaaaaaaaaaaaaaaaaaaaaaaaaaaaaaaaaaaaaaaaaaaaaaaaaaaaaaaaaaaaaaaaaaaaaaaaaaaaaaaaaaccccttgggcccctttttttttttgcccccccccttttttggcccccccttttaaaaaggggggggggggggggccgggggaaaaaaatccccggggggggggggccccccccccccaaacaccggaaatgtggggaaaaacgagggggcagaaatgtcctcatcatttaccctaagggctctgtgaggggggctcgagtgagattgtcccacttgatcctgtcagtttgcgtgtcggcctcgatccaagggcttgaccccccattcccatttaagtgtggtctagcctctgaggccggacttaggcacttaagttggaataattcgggcagttccgccacatctggtatcggagcttgtaccaccacagaggaatcaataaaatataaataccatccttttccaaagtaaaacttgatagaaacaatgttggatagatagtaggacgagcaggatagacctaggacgtgaagccttagaattatagaagggtagctaggtggctaagtgattaggccctacaggccacatttacaggatgggagttcttccctattccgtttatcttgttgtgaggtcgttcaggacgagcatgcatgcattcttaattaagcaaatggataactgagaaaggacttaaacacaagataacaaccaactaggtccccagtacctttttattttaactagagaaatgctgaattttatttttcttgttcttttaaaattctttttcttttacttacgcttaaccgtacacagatgacttcccacggatcctcagaggacggaaatgcacggtcccacactgacgggcttgcacgagagggctttccccgcatttn

SEQ ID NO: 2998 - DNA, 845 bp, Zea mays
  Probeset Number=SeqID_17401
aattcggcacgagggtccgctcctcctccctgccgtccgtgttcgtctccacggcgctcgcggacgcctacgccaaggccggccgcctcgacctggcgctgcaggtgctcgacgaaatgcccagcaggaacgtggtctcgtggaccacgctcgtcgcctcgctggcgcgtgctggccggcggcacgacgcgctccgccgcttcgccgagatgcgggcctccggcgtggcctgcgactcccacgcctgctcggcggctctcacggcgtgcgccgacgcggggctgctgccacgcggccgcgaggtgcacgcgctctgcgccaagctcggcctcgacgccgtgcccttcgtcgccaacgcgctcgcggcgctgtacgcgcggtgcggcgatgtcgaccgcgcgctggccgcggtcggccgcatgggctcgcacgacgttgccgtgtgcacaacgctgatcgcatcctacgtccagaccggccgcacggaggaagccatcgaggcgtttgtgagaatgcttcgcgatgagtcgtcaaattctgcttcaccaaatgagtatacgttctctgccgtaattgccgcgtgtccaaatatggatcgtgcatatcttggagagcagttacatgcacaagctgcacggagagggctatctcatgcccgctctgtggccaattcccttgtcaaactctattcccgccgtggccatctttcagctgctgatgctatcttccgggagagtgtcgtcaaggatgttgtctcctggagcacaattatatcaggatacacacaagaagggcctcgccgaggagtcttttgccttgttctcagaaatgcggcatcacagtag

SEQ ID NO: 2999 - DNA, 305 bp, Zea mays
  Peptide Sequence Number=SeqID_9270
  Probeset Number=SeqID_17402
tgcaggatgcacagggcaggttgcaggggtttgccagtcgccgccgctttgggcacggctggaccatcggcccggtgattgctgacgatgttgcggcgtcgcaggcgctggtgtcgcagctgatgcaggatctgacgcagcagtttgtccggctggacacgcccgatgcccggctcggcgcgtggctgctcaaccttgggctggcgcaggtcgatgcgccttatgcgatggtacacggcacaccgtggcgggcggcaccaaacgggccgcagacctttgcgctggtctcgcctgcgctgggttaa

SEQ ID NO: 3000 - DNA, 314 bp, Zea mays
  Peptide Sequence Number=SeqID_9271
  Probeset Number=SeqID_17403
atggcgcgcgcaagcaggtgccacacgccctcccccggagactaccacgctaggatcacgatttccatgcaactggacgaagcgaggggtagaaccgagggctttcttaccagggaacgaacagagacttccgggtcgcgatgggtggacaacaagcgcagtcgatgcggcgccgatgagaggtttcacagcgcccaggtctcccctgtgcgcgcgattgcaccaactcggttcctggcgcgcccaggaggctacccagaccgcggacgagaattgggagacggctgccagggcacccaacacggcggtcgtcc

SEQ ID NO: 3001 - DNA, 219 bp, Zea mays
  Probeset Number=SeqID_17404
atggccaaggagcacgcccggaggaagaagaagaagcagcagcagcagcagatgggcccctgcctgcccgtcgtcgccgccgccacatcgggcgcggcagcaccaccgaacaatgacaagcagccgccgccgccgctgccgacgacgacgacggcgaatgcggcgaagaagaagcacaccccagcgacgtcgcggctggacggcggcggcacgcggtag

SEQ ID NO: 3002 - DNA, 596 bp, Zea mays
  Peptide Sequence Number=SeqID_9272
  Probeset Number=SeqID_17405
tgcccgggccccggtgacggggccggggggtctgcgaccgggacctggtgcacatcgccatgacgctcgacgcgcactacctcaggggctccatggcggccatctactcgctgctcaagcacgcctcctgcccggagtccatcttcttccacttcctcgctgcggcggagggcagtggcgcgccggccgtcgccgggctccgggccgtcgtggccgcctccttcctgtccctgcgcttcgagatctacccgttccgcgccgacgcggtcgccgggctcatctccgcgtccatgcacgccacgctcgaggcgccgctcaactacgcgcgcaaccacctcgtcggccatcaggcataccttctcatgatgcatttttctgattttggtgaatctgggacttcggttgaatggactgaagagtcgtcggatgaggacttggattactttgcggccttggatgtggcggcggcggaggcttcgccgcgtgctgtggatgctgaagttgtgcatggtccaagtgctgggcgcaggcggcgaagggcagttgcgaagtgtagagtgagtgaggcggacggcggtcggcttcgtgtgggcagg

SEQ ID NO: 3003 - DNA, 422 bp, Zea mays
  Peptide Sequence Number=SeqID_9273
  Probeset Number=SeqID_17406
aggaagtgcgcaatgtactggaaaccaaccagtcgttcgtgttctttaagccggaagagtatgtgccggtgcgcggtgccagcgcggtaccgctgattgccaaagcctcggtggcgtccgatcgttcgctgattcccgccggcacggcgctgctggctgaagtgccgcagctgaatgagaagggcaaattcaacggcaaatatgagatgcgcctgatggtcgcgctggacgtgggcggcgcgatcaaaggccagcacttcgatatctaccagggcgtcggcccgaatgcggcgcatctggcgggcttctacaaccattatggccgcgtctgggtactgaaagccgcgccgggaaccggccagccgctgttcagcaatccgcaaaacggcaataatggttcattgattatcggcgcaaattga

SEQ ID NO: 3004 - DNA, 452 bp, Zea mays
  Peptide Sequence Number=SeqID_9274
  Probeset Number=SeqID_17407
tgcaggcctccctcccagcggcgcggccctcccccaggagggcacgcacgcccaaccccagtcgtcggcttccttcactgccaccgacgcggacgcatgcccccttgttgccgacttcttcctccacgtcggcctccctcccaacgacgcggccctccccgacgcttccctccaccgacgtgccaaccccagtcgccgacttccttcattgtcctcgacgcggacacatgccccccttgtcgtcgacgccgacttcttcctccccgccagcctccataccgccgcccacgacatgcgaccaccccctccccggtgacgctctagccgtgcgcccccatcagcgctgctacgcttcaatctactgacgtcagcgctgttgtggctgaatctactgtcgtcggcgctgccactgcgcccgacattctcctctcgccgatggatgctctctccta

SEQ ID NO: 3005 - DNA, 328 bp, Zea mays
  Probeset Number=SeqID_17408
atgggccagacagaaaaggaagcaccgaataggcacagaaaacaaagcgaggactgcacaccggacgaaggacatagaaaagagagcaagaacaggggagggagccacaacgcaccccacacgcagagcgagctgagcaaaaacacaggagtagaaccagaggaacagcaggaaaaccgacacaccaagggggcaggaagcacccaaggagaaggcacaggcgacaacacaacaagcggaagcagagacaacacaggggccgggttccagcatggagaaccaccgatcccgcacggcaaaggcaggcgcacatcaactgggaagaaag

SEQ ID NO: 3006 - DNA, 294 bp, Zea mays
  Peptide Sequence Number=SeqID_9275
  Probeset Number=SeqID_17409
atggttaatttcggaaagaaattgatggctgatcaagtggacgaatggaaaggatactacatcaattacaagctgatgaagaaaatgttaaagcgatatgtccaacaaacccaacatgatgagaaagatcgcgaacaagttcttaaagacttttcaaggtttcttgatgaccagattgaaaggattgtgctttttctgctacaacaacaaggccatcttgccagtaggattgagaaattggcagaaaaacgcactgctcttctggaagagtatgacatatcacaagtttatcag

SEQ ID NO: 3007 - DNA, 620 bp, Zea mays
  Peptide Sequence Number=SeqID_9276
  Probeset Number=SeqID_17410
atgcctgcaggcgtggttcaccagcgggttgaaaagattctcgccgcgcatcagcggcgcatgcttggctgggatgaggtgtaccatcccgacctgccgaaaagtattgtgattcagtcgtggcaggggcaggatgcgctcagcgaagtggtaaaacaggggtatcgcggcattctatccaccggtttttatctcgaccagccgcagagcgccgcgtatcactatcgcaatgatccctggccgcaggggctgaacggcatcgatcaactgcgcgccgacgatcaggcgcaaagctggcagttcactatgccgcgtctgaaaggcagcgcggtgcagggcagtttcaccctgattgagagcaaaaacggctggcgcggttttatcgatttcagcggcaaggcgcgacgccaggtcagcgacattcgctggctatcaccgacgcagctgaccttcagcgtcgacagctggatggggccgtttcagccggtggtgacgctgacgcgtgacagcctgaccggctacgtgctggtgggcaacgtgcgctatcctaccacaggcagcaggctggcgcagataccggccggtattgctccggtactgcccacgcccgctcagctgca

SEQ ID NO: 3008 - DNA, 470 bp, Zea mays
  Peptide Sequence Number=SeqID_9277
  Probeset Number=SeqID_17411
atggagcacttcgggggccggattcacccgcggtcgcacaacatgcaggtggagtacgtgcacggccagaccaagatccttatactcgacaggccgctcctacttcacgctactatcatctgtcgccgaaacacgcttggggtgaacgccggtgacagatgcgatatgtaccagctgtccgaaaaggacctggacgcccctatttacaagccaaccaagaggatgtggaacaccttgttatggatgacgaccggacccgcaacaacgggcccggcgtcaggtactgctgctggcctggggatccactcccatcttaaggtctcctgttgcgaattcagtcgttgtcatatcaatcgccggccgggcttctactgcaccaggaggactagaccctctctatcgactaggcgctcagcacacgggacgttgccttgcatcaagctgtacccgccgtcctgtccctgtcacga

SEQ ID NO: 3009 - DNA, 636 bp, Zea mays
  Peptide Sequence Number=SeqID_9278
  Probeset Number=SeqID_17412
tttttttttttttttaaattcaagatccaacaataaagattgcaaataaataaacaacgtcacaagttacaaaagatgataatctgaacattatcacaatctttagcgacttgcacgtatcttagctacatggcgagtaatcggccgctcaagttaacactgcatctagtaatgttatatgagtgaatgggagttgggggccaacacgcagcagttacataatgacactacatcagaaattcgacatatacttgagtaaaattgatctattcaaaaaagactaggggttcctacaagcatttctattccaccatcagaccttgctccactcatcaaccatagcagtcatatccccaccagagtggtccttttggagttggtactggatcccacgaaggcggaggttcaccttccccaactctaaatggtggtggagagaccggagagaaggcggcagggcgcgtggacgtcggagaggaagagttcaccctcgccgttgccgtcgcggtggtggccgtgctgcgccgtcgcgccgtcgcctcctgcgcccccaggtgtgcggagcagcggatgcctctggacttcgccgtttccttgtcgcggtcgctcgcggtcacgagcgaccccacgcgtccg

SEQ ID NO: 3010 - DNA, 520 bp, Zea mays
  Probeset Number=SeqID_17413
atgactgaactcagcacccagttttacgatgccggcaatgaaatttgcccgccggtgaaatccggaccgcactggatccgcacgcgcgtggtcaatccgctgaccggtgcggacgtgccggaagctgctggggcgcgtcgcgggcgcggatgccaaaggctgctcgctggcgatggaatcgtttctcgctgccgcgcaggcacgggcatgaaagtgtatgccggacatctgccgggcatccgccacagcgaggtggcgtggcacagcctgcactttggccagcagggcagcgcgctggaagtgtgcgtgccggtgctgtccgaggcgcagattgccacgctggcggccagcgtacgcgataacgcgcgccgctacctgcacaccctgagcgtagcgcgcatcaccgcgttgattgatgaagccatcgcgcgtctgcttgaccgttcgcacccgttgcgccagcaggcggagcggttgctgccgctggttaccggctatgacgccgggatgctgcggctcg

SEQ ID NO: 3011 - DNA, 217 bp, Zea mays
  Peptide Sequence Number=SeqID_9279
  Probeset Number=SeqID_17414
gtcccggtggcccggttgtttccgggattatgattggatctaccttatggaaggttggtggaatggttggtggcaaggtcttttagaaacctaaccttggaggagggaaggattccactcctgggggctgattcgtttctggaaggtcaatggaaaaggactggtccttaaggggtaataagggtggaaataccaaccacctggaacctttggccat

SEQ ID NO: 3012 - DNA, 383 bp, Zea mays
  Probeset Number=SeqID_17415
atggcctccttgccggcgctaccgctggtgctcctggccctgctgctggctcccaccgccctcgccgcgtccggctccggctccggcggcggaggagagaagcgcacgcgcatccgggtgtacgtgcacgagcggttcaccggccgcaacgcgacggtggggtccgtggcgccgtccctgcgcggcggcaactcgacgttcggcgaggtgggcgtggtcgacgacgtgctgcgcgccgggccccgcgcgtcctcccaggaggtggggcggtaccagggcctgttcgccggcgcggacctcgcggacgacggcggcggcggcggcggctacttctcggccatcacgctcgtgttcgccgccggcgagcaccgcggcagcacgct

SEQ ID NO: 3013 - DNA, 284 bp, Zea mays
  Peptide Sequence Number=SeqID_9280
  Probeset Number=SeqID_17416
ggtacccctgcagatagcagcaactttagtgatgctcataagctgctcgaggcattacctgcaaggattgcatcccttaccctgatgaaagattctgaaagattggatcttctcgaagagattggtggtagtacatatgtttacgaggatagatgggatgagaccttgaaaataattaccgaaacaggtacaaaaaggaagcagattgatcaagttgtctattacttggaggaaagattgagagaactcggtggagaaaaaaagaactaaagaagtgctaacag

SEQ ID NO: 3014 - DNA, 466 bp, Zea mays
  Peptide Sequence Number=SeqID_9281
  Probeset Number=SeqID_17417
atcctgcaggtgctcgtcagggcactggcgcgcagaatcctcgagatcaagcatctggtacagacacaaagtgccccactggcgtcagtaataatgagcactggccgtgcgcgttcaggttctacctagaggcccatctggcgttcaggtggcgtgacctacagtgcgggtccacaggaccacaggcaaaaagttaacaatagtatgtaccgaggcgcgctgaacagcatcctgtccaagctggtacgtcaggcccgtctgatcgctgtcgagtcgttgtctgttgaagcgcctaatattcagctgctggtacagaaaaggaaagccatggcgatggaaaacgagctgatcatgtacggtgagagggatgagtatctgttactgcatgcgcagtaacctgtacaaggttcacgtgagtgatgcagcgggttctgatccagttagcaggctagccatcgacaaagtg

SEQ ID NO: 3015 - DNA, 337 bp, Zea mays
  Peptide Sequence Number=SeqID_9282
  Probeset Number=SeqID_17418
atgcccaccgacagggcagacgaccggaactgggcgtccgggcaacgcaagacagccggcgcccggcgcgcccggacgcggcgcgcagacggcgcaaggcaacgcgggtgccgctcatgtcacacacgaagcgcgccgctcgaacatgcgggaccaagcggcgcacagaagcgagagatcaaggcgggcacgacaaggagagggacgcaccgagggaccgcgaccagggacaggccaaaaacgcaggtgaagaccaagaccgtcggacgtgcacacaacaaaggacaacaaagagcgccgggggcgggccggaactggcagccgcagggcgagcacc

SEQ ID NO: 3016 - DNA, 1606 bp, Zea mays
  Probeset Number=SeqID_17419
gtgcagcatgtaggttagattctctgaaggatgtttttttctggggtgatgcttttggaagtattttagagtgtggtgatacctcaaaaccccttccaatgttagtggactcaacgaacatgcttgatgtacaaagcattgcttgcggagagactcatgcggccataatcactaagcaaggagaggtatactcctggggaaatgagagcagtggcagaattggaaatcaagtaaatatcaaagtctcccgacccaaggtcgttcaatctcttgcctctttacatgtgaaggctgtggcctatggatcaaagcacacttgtgcagtaactgtttctggtgaacttattgaatggggagaaggacccctatatgggccagttggacagctatgcgagggaatcaatggtttccacataaattgtttagtccactggacggcatatctgttgtgaagattgcttgtggtccttggcacacagcaataataacgtcgtctggtcagttatacacatatggggatggaacatttggtgttcttggtcatggagatacacaaggaactacccggcctaaagaagtagagtctttgaaaggctcaagagtgaaatgtgtggcatgtgggccatggcacacagctgccattgtggaagtgatcagtgatttcaagagcaattcaccaagaagcaagctgttcacatggggcgatgcagatcgggggaagctgggtcatgctgacaaaaagatgaagcttataccaacatgtgttgattcactcacagactatgattttattcaggtgtcctgcgggacggcactcactgttgctctctctgttactggtgtggtctttactagtggcagttcgatgcatgggcaattagggaacccccatgcagatggtaaaactgtttctgctgttgaaggactacttaagagcgagtttgtcagacatatatcatcaggttcttcccatgtagcagtggtgactacaaatgggaaagtgtttacatggggtaaaggcaaggaagggcagcttggtttaggtgacttccttaataggagcactccaactttagtagatgcattggaaggtaggcatgtggaaagcctatcttgtggttacaactacactgcagcagtatgtctgcataaagtaatctcaaggaaggacctctctgtatgtagtggttgcaagatggcttttggtttcactagaaagaagcacaactgttaccattgtggatccatgttctgtaattcctgtagtagtaacaaggttgccaaggcagcacttgcaccagataagagcagaaggtatcgtgtgtgtgatgggtgtttcagtcagctactgaaagttgtggattctggtaaggtaaagtctgaactaaataccagcaaaggagctgaaattataaggtcatacacaccaaagttgtctcgtatattcagggatgtaaacttacctgtggaaaaggaaaaggtggctttggtacaacgctccaatcagagaaatgaggtcctgtacactccagtccaagcgaaatctcagagatgggggcaagttgagtgtccagctcaatttctatctgcagaagacagttctcat

SEQ ID NO: 3017 - DNA, 620 bp, Zea mays
  Peptide Sequence Number=SeqID_9283
  Probeset Number=SeqID_17420
atggaactggtcgggcgcggcgaaacgtcacccgccgaattgcagcagtgcgcgatgcaggccattgcacagatggatcccacgctgaatttcatgtcaggcccggtatctgtcggcggacacggcaacggtccctttgccggactgccattcctgttcaaggaaagccacggctgcatagggcaacccatgatgcagggatcgcgacttaccgccggactcaaagcgtctgccgattccgaattcgttgcccggctcaagcgcgctggcgtaatccctctgggtgcgacgacggctcccgagtttgggctctattgcaccaccgaatccacactgcacggcgccacgcgcaatccgtggaatctcggccattcagcaggtggctccagtggcggatcttccgtagcggttgcggcgggcgtggttcccgccgcgagctccagcgacagcggcgggtcgatccgcggccctgcccactgcaccggcacatttggtctcaagcccagccgtgcgcgtacccccatcgatggcaagaccgatggggggctgtttcctttcatcagctaccacgtgaccacgcggagcgtacgcgactccgcggcctttctggatgttctgca

SEQ ID NO: 3018 - DNA, 831 bp, Zea mays
  Peptide Sequence Number=SeqID_9284
  Probeset Number=SeqID_17421
tgggaccctcgggccggccggacgcacccaaataacgagacctgcatacatcgataaccctaaaaccccaaatcgcccatttcctgattcgcatcgtcgctgccgccgcggggcttaccggttggtgccgccgagcgctgggctcaccgagggccgacgccaccgacccacgggccacggcttccctcgatatatctgattttgaagttgggaaattcactgttatatgcgccaagaatttggagttctgtttaaaggaattctcaaagcaagggcaggcacccatgccaaacaacatcggactacaaccgcttccctcttcaaatgtgcaatctaatcaaacagagtatccatctgctgttgtatccatcatcattgcctggtgactggagttcacatatgggaacctcagtaccagctagctcatattatattgtccccatgaatcagcaatcagtccagctaggtgcttcgaggccagaggtttcacgtacggcacaacctttgctaagtagggtatcattgaggccaccccagcaggtgctaaatattcatacatccttgccagcaatggctggatcacaaccctcaccatctatggcaggcaggatatcacaacacaaagttgcttctccaaaggttcaaatgctgaaatctccatcattccagtcatctaataagcggctgccagaaggagccaccgtcaaaatataagcaatataaatatgtattattattgtaagtacgctaacttaaatagaatgaactgatgtcgaacaaacattataatatcgcataaattatttctaaagaatcaatatataattttga

SEQ ID NO: 3019 - DNA, 398 bp, Zea mays
  Peptide Sequence Number=SeqID_9285
  Probeset Number=SeqID_17422
atggcgagactggctaggagcgaggcggcgtgctccccgaggccctcactagctcactctgaggacgcgggcgacaccggaggggccgcggcacgcgtcgtgtgcgtcactggcgacatcttctctgaagctcactctgaagctctcgcgtcccgtccgtcctccccctgtccccccacactaacctacccggctgcttctctcgctcactctgaagctctcgcgcccctcgacccggcctgggacaatcggcctgggacaagggtgcgccagtgctggactcgagggagacgaagctgcatccaacgcaggtgcctcccgcggtgcctcgcgccaggctaccagtacttccgcgtccaacaccacgccccaagctggttgatgcacgcccaacgccg

SEQ ID NO: 3020 - DNA, 411 bp, Zea mays
  Probeset Number=SeqID_17423
caagatagcgtcagaccggccttggaatcagcagtccaagatcgcggtgaaggagtgtgttcaatcctctggaatcggacggcaaggggctgtctagcacgtagcgctacatccggcacaggacgttcgggcccaacaagcaggagtataagaaggagagctccctcctcaagttcctgggattctatgtggaaccagcttctggtggatcaaggacaggacggccatcatggccatcgcgctcgcctacgacgacggcagggcggcccactgacaggagttcgtaggcatcgtctgggtgctcttcatcaactcccccatcaagctacatgaagcaggccaacgccgggaacgcccagtcggcgatcatgaccggcatggcgcccaagcacgagccgtgacggtcggcag

SEQ ID NO: 3021 - DNA, 216 bp, Zea mays
  Peptide Sequence Number=SeqID_9286
  Probeset Number=SeqID_17424
atgcctgcagcctgctccgctgctcgcggtcgcggcctcgcgggccgtagcttgtcccgctcggcggccgacgcccaggctgactggggtagcgcgccacaggggacagcagtccagttcaccggcctcgtcagctcgtgctcacaacagcagacagcagtccagttcatcggccaccggggtagcgcaccacagttcacagaaaggcgtgactgc

SEQ ID NO: 3022 - DNA, 320 bp, Zea mays
  Probeset Number=SeqID_17425
atgcgcatcgtgggcgcgtccaagacagagagcgcgggcgcgaggttagggaagggagtagtggctgacaggcggggtccacagaccagcgagggcgagtgtccgaacgggcggtcagcgctgacagagagggcccatcgagtagcgagagagaacgggcgcgtgtgcgaaaggattggcgccgacaggccggtcccaccgggcagcaggagggagagggagagagggcacatgcgcggtcgtgggtcgtcgctgataggtggggtccaactgacaggcgatgcgggcgcacacggcctggctgggctgagttgggccga

SEQ ID NO: 3023 - DNA, 420 bp, Zea mays
  Peptide Sequence Number=SeqID_9287
  Probeset Number=SeqID_17426
ctgcccaaacatcgtaggctgcaaccaactataagcagacggtttggttcgttgacatctcaaaatctgggcacatttgacatatttggtgattggcaggatatttcacagccaaattctgaggctaatccacctgatggggttttagcggttcctttattgaggcatcagaaaattgccttgtcatggatggtgaaaaaggagactagtatctcgctttggctatggtggaattcttgcagatgatcagggccttggtaaaactgtatcagccatatcactgattcttactgagcgcccaccagttccacagtcatctactaagaacgagccatgtgaagctacatgtagctctcaagtgacaagtaacacagtgaagcaagaaaatcctattgtagcggttaaggcaaggccagggta

SEQ ID NO: 3024 - DNA, 538 bp, Zea mays
  Peptide Sequence Number=SeqID_9288
  Probeset Number=SeqID_17427
aacatgttgatttcaatgaaagagatgctggccccgacccgtgaacatcgcttcgccatcggcgcatttaacgtcgctgacagctgctttatccgtgccgtggtggaagaagccgaagccaccaacacgcccgccattatttctatccatccgagcgaactggaatttgtcaccgatgaattttttggctacgtgcgcgaacgcaccctgaaaagccgcgtgccgtttactattcacctcgatcacggcgcttcaattgcgcaggtgctgcgcgctattcagtgcgggtttacctcggtaatgattgacggctcgctgcagccgtacgaagagaacgtagcactgaccaaagaggtggtgaagctggcgcacccggtgggcgtgtcggtggaaggcgaactcggcaccatcggcgataccggcactacggtggaaggcggcgtaagcaaggtgatttataccgacccggcgcaggcggaggattttgtgcagcgctccggcgtcgatacgctgacggtggcgattggcgcagcgcacg

SEQ ID NO: 3025 - DNA, 449 bp, Zea mays
  Peptide Sequence Number=SeqID_9289
  Probeset Number=SeqID_17428
atggtggtgcgcccacgcgattacgacccgcacaaaaagtatccggtgatcgagaacatctacgccggcccgcacgactccttcgtgccgaagacgttctggccgtttggctatcactccggtggcgacaagcagatcggcatgcaggcgcaggcagatctgggctttatcgtggtgatgatcgacggcatgggtaccgccaaccgctccaaggccttccatgatgtggcgtggaagaacctgggcgattccggctttgccgatcgcatcgcctggcaccgtgcgttggcggccagggacccttcctacgacatcggccgggtcggcatctatggcgcctcggccggcgggcagagcacgctgggcgcgctcgaacgccatccggacttctacaaggtgggcgtggcgttcgccggttgctacgacaaccgcatggacaagatcagggg

SEQ ID NO: 3026 - DNA, 254 bp, Zea mays
  Peptide Sequence Number=SeqID_9290
  Probeset Number=SeqID_17429
ctgagaggacctgtccttgcactcttggaaaacatgatgagacggttaaagaatgcacaaaagcacttgagctcaatccatcatacctgaaagccctgcttcggagggcagaagcgcacgaaaagcttgaacactatgatgaagctattgccgatatgaaaaaggttattgaaatggatccttcaaatcacaacccaaggtctcttttcggctgagcccctggcagggggtctctaatcgactgcaggcatgca

SEQ ID NO: 3027 - DNA, 290 bp, Zea mays
  Peptide Sequence Number=SeqID_9291
  Probeset Number=SeqID_17430
tcagttcgtgtttgggctcttgcttggatccagctttggctccgcctccttctgtgtcccttgcgcgttctcccagctgtcgcccttcccgccgtggggccgtttgcgccgtcctcggctggtcggtgctctcgttgtcgtctctcgtggtcctggctttctgttctttacctgtgcgttcgcttgttgggttcccttctgtccttggcccccctctcctccgcgggcctcctcggccgcctcgcggtctcgctcggggggctgctcgttggtgtccttgcgccgcagga

SEQ ID NO: 3028 - DNA, 530 bp, Zea mays
  Probeset Number=SeqID_17431
gtttggaaagcctttggaaaattgtataattccataatcagatgcaccaacattgccaagcgacatatatcgaaacaaagagtcacataagatgtgattagcaaatatttcttacctatgtcattatgtgtctagtcatgaatgccaagcttcgctataacttagtgaacatggttcatgtccacaatatgtcgttagtgggaagacgaattgcaaaacatatagtgggagaatattttgttaaattgtttaatgaaagattaaagtaaacaaagtgctgaaatttgctttttatttttgttgtagtgatgacatctaagggtcttattggtgttaatttgtaatcaattcttgacaaacaaaaactcactactatgatctttattgattggcaccataacttgagaattgttctcaagcaagagaaaaaggagtatgttcataagaatcccaaccatgatgaactagtgaagaatgcaaacaatttggaccaaagtgcttatgagaagcacatgaataactctctagag

SEQ ID NO: 3029 - DNA, 239 bp, Zea mays
  Peptide Sequence Number=SeqID_9292
  Probeset Number=SeqID_17432
gcagagtaaaaaaaaattgcggcctattttaatctacttattatttgcagacattgatgattgccatttataaactttattgtcagtgcaagggttgcagctgcaagaatacgtggggaagctatgaatgcagctgtggtgatgacaatatgctatacatgagagagcatgacacttgcatcagtgatttgggcctatctaaggctatctctagcagccttacctatctcatctcctat

SEQ ID NO: 3030 - DNA, 487 bp, Zea mays
  Peptide Sequence Number=SeqID_9293
  Probeset Number=SeqID_17433
agcctacttccggtgcacgcacaggcatacgcagagctgccaggcgagcaagcaggtgcagcgcacggacggcgacccgctgctcttcgacgtcgtgtaccacggcacccacacgtgcgcccaggccgccaccgccgcgcaccacggcaacaaccagccggccacggaccaggccacctccccggggtgcgtcgtagctgggcccgccgcgctgccgttctcgctccggccagcagcctccaacaagccgacgggcgccgcagccgacgacggcgcgaccagcagccgtttcatcgcgaccggctgtaccgtcgtcaccgcgtctcctttcgtgtacccggcgacgccagagccagactgccaggtaggtgacttgaagatcaaggtgattatactttcgtgtggaagagggtatgcatataaatgtaaacataaaggattaagacaagctgggggtacaaagtggcatggtacaggtactctgtaa

SEQ ID NO: 3031 - DNA, 684 bp, Zea mays
  misc_feature (36)..(36): n is a, c, g, or t
  Peptide Sequence Number=SeqID_9294
  Probeset Number=SeqID_17434
gtcgagaccgccttcaggctcgcgaagtactactgnaagctccgcggcaagccgatgaagcacaaggtgatctcccgtgcggtcgcctaccacggcaccccgcagggcgcgctcgcgatcaccggcatccccgcgatgaaggagatgttcgagccgctcacccccggtggcttccgcgtgccgaacaccaactactaccgcgcggacgagatgggcttcgccggccagacggaagaggagttcggcttctgggcggccgagcgcatccgcgagatgatcgagtacgagggccccgacaccgtcgccgcggtcttcctcgaaccggtgcagaactccggcgggtgcttcaccccgccgcccgggtacttccagcgcgtccgtgagatctgcgacgagtacgacgtcctgctcgtctccgacgaggtcatctgcgcgttcggtcgcatcggcacgatgttcgcctgcgacacctacgacttcgtgccggacatgatcacctgcgcgaaggcgatgacctccgggtactccccgatcggcgcgacgatcatcagcgacaagctgttcgagccgttctcgaagggcgacacgaccttctaccacgggtacacgttcggcgggcacccggtctccgccgccgtcgcgatggagaacctcgacatcttcgaggaggagggcctgctgcag

SEQ ID NO: 3032 - DNA, 208 bp, Zea mays
  Peptide Sequence Number=SeqID_9295
  Probeset Number=SeqID_17435
actgacagcgctgagtgagcgttacagcgtcaccgttacgcactggtatgccgaagcaggcggcgatttctgcggctatgcagcctacaccaacggcatgcagacggaagctttcagtgattcgcttgaatggagtgaggatgaggacggttgctttgcagtgaccggtccggactggattatcggcaacgtggccagctacggcggc

SEQ ID NO: 3033 - DNA, 639 bp, Zea mays
  Peptide Sequence Number=SeqID_9296
  Probeset Number=SeqID_17436
atgaccgcctccgcccgcgtcctcctcctgctgccacgccagcttatcacgcctcttcgtctgtcacacgcgctcgcgccccagtcccgggcggcggtgcgcggctacttctcgccggtcctgcagcaggcaacccaccgctgttggtccaccagcagctccagctgcgagcagtatccgcaggcacccatcaccgccgccgcacccggtgctccttgtccccgcgacggaaagggagagggatacggggaggcggcgacggcgacggcgtgcggcggcgagaaggccgtctcaggcgcacatcaagacggcagcgacggcgccggcgcgcctgccccgccggctcatccccaggataaggaggcggcggtaccgctacgggcggctccggcgggaaggaaaggccgctccggcgtccagacgccgaggcagcgcggccgcccggcgaagccacaggggaataagaataagaagcctgcgcggccgggagctccgaaacaagggcgcggcggcggcggaggcatcatccacgtcgttgctcctcgtcgttcctcctcctcttcgccggcggcgtcctcgacgccgccgtctactactcgtcttagggcggcgaccaagaaacgagagagcgaggattga

SEQ ID NO: 3034 - DNA, 223 bp, Zea mays
  Peptide Sequence Number=SeqID_9297
  Probeset Number=SeqID_17437
atgggcgtccgcggcggcggcgctcctggcttcggtcttcatcgcgtgtggcgccggtgcggggccattgtcggcggtggccggggtgtcgcagccccgcgtggctggggcgcgcggtggtcgtcggcccccggcgcgtggcgcgggcggcgagggatgcggcgacgaagtgaagcgcggcgacataatggggcggtcggggacgctggcaccggccccgggg

SEQ ID NO: 3035 - DNA, 1020 bp, Zea mays
  Probeset Number=SeqID_17438
cctcgaggccggccgggacgaaacactttggattccgcggcttcgaagctcgggcgccccgctgcttgcggtttcccacctcccatcccaagcaaaagctcgctcgcaaacagcatggtccatgcggacgggacggacagtcagctaatccgtacttggcgggccagcttcgtccagctgcccttttccctatccctcgcctcgggtctccacatttttcatgtcttcttccttcgccctcttctgtcgagtggtttggtcctgtgctgtgctgtgcttggggtcagctgcaggctgccaccggaaaagcgacgagaagcagcgccgatgcttgctgtgagttgctaggaaaagatggatgttcatgttcggcaggccggcggacgccaggaacgtcctgccgtgaaattgcgatgtgttttacgcgtcgcctcgcacccggtcagagtgaccagttggtgcaggggaatttcaggggaaggaccattcgatgggcctccggaggctgcaaggacttcgctctcagcccggcgcaaaaagatttttggccatctcgacagcgctggtaccatgaacatacatgatgtgacgcacaaccgtgcccccgactgtatcccaaccgtccgattgcgttcatccccaccgtctgattgcgattccatcctcgctcgcgagtcgcgcctagcgccggatccgctcccgctcccacagtcgccgcctccttccccgtgcagctacccccgcttccatccccgccatgcgcgcagccgcccccatctccgccatgcgcgcagccgcctccatcctaacaaacatgtagacaaccatgcccgcagccgcctccaccggatctgcgactgtcgtacaacatatatgcgcgcccgcatgcttagcgcccaacatcccgtcgtccaacatccatgcacgaggcaggcgtcggatccgccgcctccgttcgccatccaaatacaggcggagctacctgccccatccccgtcgccctcctcaagaaaaccacaa

SEQ ID NO: 3036 - DNA, 633 bp, Zea mays
  misc_feature (136)..(136): n is a, c, g, or t
  Peptide Sequence Number=SeqID_9298
  Probeset Number=SeqID_17439
gggggccgtgggggcgcccgcgggccggcgttgcgggtgggggccgggccgcgcgccgccccggcgcggggggcgggccggccccgcaggggccgccccgcccgccccggggggcggcccgggcgggcgccgggcncggccgggggccggggcgggggccgcgggcacgcgcgggcgccgccggccgcctgggggggcgcggggggggcgcccggcgggccgccgaggagggcccggggcgcccggccggcgcgcggcctcccgggggaccacgcgcgggcgaccagcgcacagcagcccgccgcagccgcggcggccaagaagggcgcgacccacggacagccgcgacagggcaccaggggagcgcagcagggagcacggcagccaagggggccaggcagcccctgaaggcaaacgcacgcggaaagccggaaagaaccaccagggcggcagcagaggcgcggcgaggaccggcgagcacaggcaccggcacccgaagggcgcgagcaaggcgaaagggaagccagagccgcccaagacccccccccacgagacagcaaaccggcagggaaagacggcacagggaggcccaccgcacgcagcggcacccgaggcgcggagggacccgggcca

SEQ ID NO: 3037 - DNA, 480 bp, Zea mays
  Probeset Number=SeqID_17440
atggaaaacaaggtgcacctgctgggcttttcggccgtcggccatctgctcggcatggcggcagcgcggcctgacttcgtcacctattcaccgcaggattcgctggatgacatccggccaaccgcagacagcgtcgggctgatttacccggttatcacccttgaagcgccgtatcagcacacccgtactcaccagatgatcgtgggcaatgacgccacgccgacccaggaagccaactggtcagtgcaaaattacgttacccgcgcctatccgccaaccttcctggcgcaggcggaggacgatcatacctccaaccctcataacaccgagctgatgcgcgacgcctgccgccgtatgcgcgtgccggttgagctgattgaactgagcagtggcggccacggctttggcctcggtaaagccggcacccccgccgcgctgtgggaccaggcgtatgtccgctggctggataagctgggataa

SEQ ID NO: 3038 - DNA, 561 bp, Zea mays
  Peptide Sequence Number=SeqID_9299
  Probeset Number=SeqID_17441
gtcttcgaggaggcctgctgcactagcacgaggattttatgttatacagagcgctgccactgagattgctgggacagctcctgcttcagctcttgggtccttggcttccacccagaatctcagatctctcattctgtctggtgatttcttcttggctgctgatgttgcctgtagcctgaccaagcttgcgttaaggctggaggagattcagccagcacaggttgaagtaaacaaggttagcactgaagccctgttgatcatggagtccatcttgcagctgggacagtcttcttaccttccccacccaattgataatgattcatatgataggattgtgctgtgtgtgagattgctttgcaatactggtgatgatgtcaggaagatttggttgcagtcatgcagacagagctttgcgaaaatgcttgctgagaagcagttcagggagacagaggagatgaaggcaaaggcacagatctctcatgcccagccagatgatcttattgatttttaccacctgaagagcaggaagtatctttcttcgcttgcattgtcgtgtcatgc

SEQ ID NO: 3039 - DNA, 450 bp, Zea mays
  Peptide Sequence Number=SeqID_9300
  Probeset Number=SeqID_17442
atgcaagtttttatcatgcgtcacggcgacgcagctctggaagcagcgagtgatgcggttcgtcctctcaccctgtgtggctgcgacgaatcacgtcagatggcgagctggctgaatggtcagacgccgggaatcgataaggtgctggtcagcccttatctgcgcgccgggcaaacgctcgccacggtacgtgaagcgctgaaactgccggaagggcaggaagtgctgccagaactgacgccaggcggcgatccgggcatggtcgcctgtcatttacaggcgctggcggtgcagggtgcgcacgcggtgctggtgatttcgcatctgccgctggtgggttatctggtatctgaactctgcccgcaggaagcgccaccgatgttcgccacctccgccattgcctgcgtggagtttgatgccgacgcctgtgaaggcaagctggcgtggcag

SEQ ID NO: 3040 - DNA, 311 bp, Zea mays
  Peptide Sequence Number=SeqID_9301
  Probeset Number=SeqID_17443
attgccacggtgacggaagctggcgtgtttgtcgccgtgtacagtaccagtaataacggtttatgccttgcactatgtcactaagctgttatcaataagagtggataggttcattgcggaggtgatgtggctgagcaattagagttttttccggttccgagcccttgtcgcggtatctgccagagcgatgcgcgcggctattgccgtggctgtctgcgcagccgggaggagcgcttcaactggatgcaattcagcgatgcacaattacgcgaggtgctgcgcctgtgtcgccagcgcctgttgcgcctgca

SEQ ID NO: 3041 - DNA, 255 bp, Zea mays
  Peptide Sequence Number=SeqID_9302
  Probeset Number=SeqID_17444
agcgacctggaggggcccgacgacgtggacattctggaccaagccgaggagggagggattgacctggccttattctggcgggcgggggcctggttcttctgggcccggaagggccgtttccggttcggggaccaatcccaacaaaagttacttgaacaacggcaaaatggcggccggtgggtggttaactggcaaggcttacccaacttttaagtgtggattgaaacacaccaggggggagaagttaacggcgca

SEQ ID NO: 3042 - DNA, 501 bp, Zea mays
  Peptide Sequence Number=SeqID_9303
  Probeset Number=SeqID_17445
tcatctgccaggagaacggtctggtgccaattgttgagcttgagatccttgttgatggccatcatgacattgatcgatgcgcttacgtcagtgagacagtctttgctgcatgctacaaggttatcaacgagcaccatgtcatcttggagggtaccatcttgaagcccaacatggtgactcctggatccgaatataagaaggtgacacatgaggtgatcgcccagtacactgtctgtaccatccagaggactgtccatgctgctgtgcctgctgttattatcatatatggtggacagagcgaggaggagggcctaccttgaatctcaatgccatgaacaaggtcagcaccaagaaggccaatgggccttgtctatatctttcgggccgtggccatccaggcgaggtaccttcagagcatgggctggcaagatggagaacgtggagaagcatagagcggctatcatcgccaggggagcacttagaatcgacttcaggcatgca

SEQ ID NO: 3043 - DNA, 436 bp, Zea mays
  misc_feature (110)..(112): n is a, c, g, or t
  misc_feature (114)..(114): n is a, c, g, or t
  Peptide Sequence Number=SeqID_9304
  Probeset Number=SeqID_17446
ccccccccccctccccccaccccctcccccccccccccccccccccccccccccccccccccccctccccccccccccgctaccccccccccaccccccccccccccctnnnanggcccgcaccgggggagggagaggggcccctaagtaaagtcacccgccccggcggtccccgccccccggcagcggatgcctttcccggccccaccggcacccgagccccgcttgcccccgctcagctctccccccccccccccccctccctgcccacctacctcctgcctcacgggtattgcgcaatattggtgccgcactcagcctccgcgcttcccttcgcggatccactggaggcaccctgcctcgcctcttctgctgcccaccgcatagtctcaccttctccgcaccccagaggacgcccccctctcgctctgaccac

SEQ ID NO: 3044 - DNA, 338 bp, Zea mays
  Probeset Number=SeqID_17447
tctacagtccacctgtaggtaaaaccccaggccgaaacagagcgagcagccagatcgccacgcgctgcgtgatgctgattcttaacgttgcggtacgttgtctcgacgaagcggtgatccgcatcgcccgcgacggcgacatcgcggcagtgtttggcatcgggtttccgccgtttctcggcgggccgttccgctctattgaccagcgtggtgcgggcgagatcgttaatacattacgtacattaatgcagcaatacggcgagcgttttacgccctgtgacgcgttagtggcaatgtcagaagggaaaacgaatttttacacttctgcacattcatga

SEQ ID NO: 3045 - DNA, 309 bp, Zea mays
  Peptide Sequence Number=SeqID_9305
  Probeset Number=SeqID_17448
ccccctgcggtgcgctggtccacaggcgaagacaccaggggggccggggtgggcctggcaccccccaacggcccaactaagcgcgcactatcggacgccgcattgtcttcttctctccgtctctcgttctctggcagcacctgcgctgagcggctctgccgtctgcggctgggctggcagcacgccgcactctacggctctgcgcggtctggccgagcggccagcgggcagcagggacagggcgtccagtccagccgtgactccgtgagccgtccaccaccaagcaccagccaccaggcgtccaggcag

SEQ ID NO: 3046 - DNA, 448 bp, Zea mays
  Probeset Number=SeqID_17449
atcgcacgctttcacctgaaccccgaggatctggctgtcgccgctgatcgtgctcggcacgcagtggtatatcctgttcaacgtgattgccggcgcgacgtcctatccgaacgactatcgcgaagcggcgacgaacttccggatccgaggatggcagtggtggcggcaggcgatcctgcccggcatcttcccgtattacgtgaccggcgcgatcaccgcctcgggcggcgcgtggaacgcgagcatcgtgtcggaagcggtgcagtggggcacgaccaggatcgaggcgcacggactcggcgcgtacatcgcgcaaaccaccgccgccggcgattttccgaagatcatcctgggcatcgccgtgatgtccctgttcgttaccctgttcaaccgcctgctgtggcgcccgctgtatgccttcgccgaagcgaagctgcggctcgactga

SEQ ID NO: 3047 - DNA, 488 bp, Zea mays
  Peptide Sequence Number=SeqID_9306
  Probeset Number=SeqID_17450
tagaggatccccctgctgccgcggccagccacttctactacgcgcgcgcccttaaggtgaggctgcctcgtcagtctcctcgcttgcgtccctttttccactcgctgccgagtgggccccgcgtgacatactcccttccctgcgcggcatgctctcgggtcgggacagagtatggacccaaagctgtggctgacttgtggggccagctccacaggtgctcctcctacctgacgcgcgcgcaacagacggagaaatccgtggggatcggatcccctgcagtccggaggggagttggccaccctggttcgcggcgcataaaagggaagcacccgtggccctggactaccatcgaagccgcagaatcaccgaaagaaatggaggccccatcgccggatttctacggggaagcaagccgccgcgggttcaattcgcagtgtgcccgcgatcggtccgggaagaagcacctgggcacccgtggacactcataa

SEQ ID NO: 3048 - DNA, 322 bp, Zea mays
  Probeset Number=SeqID_17451
tttttttggctcatcccgcctggctcctcttccgtccgtccgggttgctctctgcctggccggcccgcctgcctgtgtttggttccttcttggctcgggcggtagtgcctcgttctgcgtgtgctttctggcgttatgcctgctctgcactgctcttttccgctgtggtccgtgctgcggtttcgccatgttcactggtttccgcccctcgcgggcatgctgcagtggtttcccctttggcaccttcctcggtctctgtctcctcctttttgctctcctgccctgccatcgctccgcgcgtgcccgcttgtgtcggcgggct

SEQ ID NO: 3049 - DNA, 988 bp, Zea mays
  Peptide Sequence Number=SeqID_9307
  Probeset Number=SeqID_17452
atggcgtcctccgccgccaccaccaccaccaccctcctccgtctgctttgcctctgcaccgtcctgctagtcgccatgcaggcggcggcggctcgcccgcccaacgtcaccatcggctccctcttcgcctttgactccgtcatcggaaggtccgccaggtccgccatccagctcgccgtcgacgacgtcaaccgcgaccccaccgtgctcaacggcaccaccctcaccgtcgtcttccaggacacaaagtgcagcggattcgcaggcacaatccaagcaggcctggagctgatggagaaggaggtggtggccgtggtgggcccgcagtcctcggtcatcgcgcacgtcgtctcccacgtcgccaaccagctgcgcgtgccgctgctgtccttcgccgccaccgacccggcgctcgcctccacgcagtacccctacttcgtgcgcaccgtgcacgacgaccgcttccagatggccgccatcgctgacgtcgtctcgcacttcggatggagggaggtcaccgccgtctacgtcgacgacgactacggccgcggcggcgtcatcgcgctcgccgacgcgctggaggccacgcgtgccagggtgtcctacagggccgccttcccgctgggcgccgaccgcgccacgctcgccgacatcctccagcgcgccaacttcatggagtcgcgcgtcttcatcgtccacgctagcccggactcgggcctcaacgtcttcgccgccgcgcgggggctcggcatgatggtctcggggtacacctggatcgcgaccgactggctcgccaccgccgccatcgatgctgctggcgccgcctccaactccagcaacatacagggcgtcctcacgctgcgacagtacaccccggactctgacgccaaggcgtcgctcctctccaggctcgccgccgctgatccaaccagcaacaatgccaccgccagcgtcaacacgtacgggctcttcgcctacgactccgtat

SEQ ID NO: 3050 - DNA, 600 bp, Zea mays
  misc_feature (579)..(579): n is a, c, g, or t
  Peptide Sequence Number=SeqID_9308
  Probeset Number=SeqID_17453
atgatgaaccagatcggaaaccaagacatgacctctactatcagcaagaccgacatgaacagcgccattgccgccctgaagaaagaaggcgaagaacgcgccgtcatggtagccaacaccgtctgcatctttgccccggatgtaccggccagtgttgccgaagatgtgctcgatggcatgcgcctgatgaacctgtcggcgaacaagaagttcgacaaggaaacccagcagcgcgagtggtacaacttctacaacgacggtctgggcaagttcggctggacgctgaccggcgccgctcatgtcgaggaagcaatcgacaaggacacccacacgctggccaccctggtaccccagattgtcaccgtccagatcggcgccagccaccgcctgagccgctgtgtacaacgctccttcgaagcgatcgtacaaacgccgaaagcgcagcaactgcttgaagaaagcagcgtgagcgtttcggggaaatccagcaccattcagatttcggcctgcgagatgacaccgcaagggctgccgatcatgcacatgaccagcgttcagctgagctatgacaagggccgnagaaagcccgcaagggtcggc

SEQ ID NO: 3051 - DNA, 485 bp, Zea mays
  Peptide Sequence Number=SeqID_9309
  Probeset Number=SeqID_17454
gcctggcgctgagctatgagcaggtaaacccgctggcgttcatcgaaccgacgtcgccgcatatcgtcagcgcggaagagggcagaccgattgaatttgcgcagctctccgctggcttacgcgcgctggagcagcaggctgaatgggtgctggtggaaggtgcgggcggctggttcacgccgctgtccgcgacgcaaacttatgccgactgggtcgccgccgagcagctgccagtgattctggtggtcggcgtgaagctcggctgcatcaaccacgccatgctgacggcggaggcggtgaaggcgcgcgggttgcgccttgccggctggattgccaatgacatccagccgccgggtaagcgacatgcggaatatctggcaacgctgcaacagcgcattgcgtccccgttcctcggtgagattccgtggctgagcagcgcggcacagcaggccgactgtggccattatcttaccctgccacagtaa

SEQ ID NO: 3052 - DNA, 482 bp, Zea mays
  Peptide Sequence Number=SeqID_9310
  Probeset Number=SeqID_17455
ccggttcttgggacccaggtccataaatttggtaaggaggttaatccataagcccaatttaaaaagggtttgtgtaataacatgtgttacctcccatggtgggtaaggaattgggtttcaaaccctaagggctttaaggttggaggattttaggaattcccctggttaattcaaaacctttccaaggtccgccctcccggaatccaagttaaaaggattaagttgaccaggaccgttggcccttaattggaaggaccaattaacccaaaattggaataacccccaaaaaattcggtaaaagggggtaataagggttaaccggttggccttgtttttcccaaaaataatgaaaaggtaacctcccacccattaaggcgttgaaaagccggtttggtctttggtcccaaaccaattaataaagcccaacccgaacccggtgaaaccaagggccattacttgaatgggactgcaggcatgcaagc

SEQ ID NO: 3053 - DNA, 543 bp, Zea mays
  Peptide Sequence Number=SeqID_9311
  Probeset Number=SeqID_17456
atggaaagcgacgttcaggtggagggcgtgtgcctcatggttgccgaggaatttctcctcaatggcaacctaggcccggcgagcagtgccaccgcactcgtggaggatgtcttgcagctcgacggtgatggtgtcgaggatccaggagaggacgacactccacccggcgccaagatgagactcgtcgagcgaacaatatcgctggcgagcaagggcattagcagtggcacactcttgctcccaggcgagagcagtaacccgctcatgcgcccgaacaacgacatacttagcattggcaatggtaactataaaggcaaagtgagcggcaacaacgtcgctgggtggcaaaggggcgtggcgccatcagaccagagaaaagcggcaggatggctgcagcgggagggtggggaaagaaaccacacccaggcccacgctcgcgtcggcacccgcaccagcaccaggaccggggcggtgtgccaacatgagtgggagggggagggggagggggaggtggaagagggaggtccgcggtccatggtggtg

SEQ ID NO: 3054 - DNA, 399 bp, Zea mays
  Probeset Number=SeqID_17457
atgcatcgggccctacgcgccctaggcggcatcctacgtccacatccacgtgcaggcgcgcactggggctctgctgctcccgccggatcaggctgccgagcgagcgctcgaaccggagcttcctggagccctgccgcaacggccacgtccatcggaggggagagggccagggcagagaggtggccggcggctaggaagggagccgccccgggagggagggatgagcctcccgaagcggtggctggacctgggcagctgtctggcggctgtacggtgtgggtggtggttgagggagtggtgcccccccacacacacacacagtctaacagcccccactccctgtgtcgcaacctgcgcgccggctactcctacgccttcctctcacgggcaaggcgacag

SEQ ID NO: 3055 - DNA, 405 bp, Zea mays
  Peptide Sequence Number=SeqID_9312
  Probeset Number=SeqID_17458
ctgcagttaagggtcatgctttttgtgtgaccttttgattccggtagacactacacggaatgctttggaatgaaactgctgaggaaaagggatattcctgaagagaagtacaccaacgccttccttggctttggaccagaggacaccaactttgcagtcgaattgacgtacaactacggtgttgacaagtatgacattggaacgggctttgggcatttcgcaatcgctaatgaggatgtgtacaagttgtctgagaacattaaatcatagggtggcaagatcacccgtgatcctggccctgtcaagggaggatccactgttatcgccttcgcacaggaccctgatggctacatgtttgagcttatccagagggctgaaacgcctgagcccctttgccaggtcatg

SEQ ID NO: 3056 - DNA, 303 bp, Zea mays
  Peptide Sequence Number=SeqID_9313
  Probeset Number=SeqID_17459
gatatagacaaccagcattttgtattgctttcagacagctgcgttcctcttcacaattttgactatgtgtacgactttctcatgggatcaagacacagttttctggactgttttcacgaccctgggccacatggagtttacagatactcaaagaatatgttacctgaggttcgagagtcggagttcaggaaaggttctcagtggttctcaatgaagcgacaacatgcaatggtggtgattgcagacagtctttattactcaaaattcaggctttactgcaggtcgactaaagaggatcagggg

SEQ ID NO: 3057 - DNA, 362 bp, Zea mays
  Peptide Sequence Number=SeqID_9314
  Probeset Number=SeqID_17460
gtttcgcccagccgcgacgcgcgctcgcccagccgccgggcccacctgtcagtggcgaccccgcccactgtttgtcttccccaacccctccctcccgttcgagatgcccatgtcgcgaaaaccccatcaaaccgtccccgacgccgccccctattcatgccttggccctgctcgacccctccctcttctccaggctcgcgcccccaatccctggtccccagcgcggcggccggtgctgcctggtcacggcgcgcggccggtgctgcctgctcggtgcggctcggccggcggcgtggccctggcacggccagcgagcccgcccctcccctccccagcgcgacagcgcctctgactgagcccat

SEQ ID NO: 3058 - DNA, 222 bp, Zea mays
  Probeset Number=SeqID_17461
cggcggggcggcgaaaggagaaccccgcccgcaaaggccgcgccggatccccgggcggggtcaggcagggccagggcgggggggaacgggaaaagccggcggccgcgccctggacgccgggacgggaagaagccggcctttctagacgggttggtggtcaagggccaacgaacaagctgtggcggtggccgggggcggcgcgcgcaaacccgagtttctcag

SEQ ID NO: 3059 - DNA, 283 bp, Zea mays
  Peptide Sequence Number=SeqID_9315
  Probeset Number=SeqID_17462
gtaaaagtccatcctgtgcgagtaaaccagcacggcgtgcccgtcctattggtgaaactcggaggcgttcatgggccccgcggcgcttctgcacgcctaccgctgggtctcagacagctgggaccattacggcgagcagcgggtgcagtcgctgtcggaaggctgggacaagatgtacaggtgcaggatgatcaagagctgcacggcgacgtgccccaagagcattgacccccccgcggccatttcggccatgaaggcattgcaccagctccgaaaggcctga

SEQ ID NO: 3060 - DNA, 390 bp, Zea mays
  Peptide Sequence Number=SeqID_9316
  Probeset Number=SeqID_17463
cgggctccactataggcttcgccctccgtgacgagcattacaacttttttcgctcatgccatgggtggcgcctcccgccaggactgtaggaataccatgcgtcttcccctgaaagctccctcgcgcgctctcctgttacgacgcctgccgattaccgtatacctgtcgcgctttctcccttagagagcgtggggctttctcatatctcacgctgttagtatggacgttcttagtaagacatgacctccaagctgtgctgagggctcaaaccccctgctacagcctacctgtgagccttatccggataactatggtctggagccgacccgggatgacacaacttatcctcactggctgcatccactggtctcaggattaccaaagctatgc

SEQ ID NO: 3061 - DNA, 452 bp, Zea mays
  Peptide Sequence Number=SeqID_9317
  Probeset Number=SeqID_17464
tatcatctgggtgattcagatgaccggcgtcgccagtcgctacgtggggatggtgattggcctgatgctggtgctgctgggcatcttcccgctggtcggcaacctgctacagcagattccgccgccggtgctgggcggggcaacgctggtgatgtttggcagcgtggtcgccgccggtattcgcgtgatgacgcaggccccgctggggcggcgtgagatgctgattgtggcggtgtcgtttggcattggcctcggggtggaagcggttccggacgtgctgaaacagttcccgccgctggtcagcaacctgtttggtcatgcggtcaccaccggcgggattctcgctatgctgctgaacgtggtgctgccgaatgaagctaaaacggttgcggcggtcggcgcggtcgaagagagccactgacgcacaatttacctggagaatcgcgccctcc

SEQ ID NO: 3062 - DNA, 408 bp, Zea mays
  Peptide Sequence Number=SeqID_9318
  Probeset Number=SeqID_17465
atgggcggatgtctaatcggaggggcgaatccgctccaatcgaagggcaaatcggcgggtggaggtccaatcggaggggcgaatggaggcggcgcgtcggatggtcgcgcggactgcagctgctactgctgccctcttttgtcttctcttcctctcttccctctctttccctcccactctctcgatttggtgcgctgcagtaaagggtgcgcgcgcgagataggtgtacacgctccaaaagcgcgcgtgtcgcgccctcctatttcccgcacgcacgcaacctcgtttcggcggtgtggcgtccacatcgacaaatcagacgccaaggcgacactaggcgcgctaggcgacgccatatctagccaaggcgtggcgagcgagacgcctaagtcaaaaacacgcctagac

SEQ ID NO: 3063 - DNA, 222 bp, Zea mays
  Probeset Number=SeqID_17466
tcagcgcgcttgctcgttcccttgcgccgtttcggacgggtcccttcccgcgtggaccgtgtcggtcctgtcgcgttttggctgtcgtcggggttgcacctccgtctcggcgtggggcatctccggtgttgtgttttcccccggccttttggctggccccctgttcgttctagcgctgccgctcggtggcatcagcccttggtgtgtcccaccgctggtgtc

SEQ ID NO: 3064 - DNA, 454 bp, Zea mays
  Peptide Sequence Number=SeqID_9319
  Probeset Number=SeqID_17467
ctcggtactcaaatcaaagtcgtccagtccactccaccagcagctcgccggccgcctcttcctctagcctgcactgcactgcgctgctcgaggctccagctaaagccgcctgtagcaacagcgacagagctcactctggattccttcgctccgtcaacgcgcggaagcaaagcagcacacactactgtctactagacgcattctcaggtccgtaagttccacaggccacagcagcacaatgggagcctgcacctcccgcgaggccacggcggtggcggcggcgccggggtcgccggcgccggaggcgagggtggtgctggcggacggcgcgctgcggcggttccctggcggcacgcgggcgtcgcaggccgtgaagacgacgacgtcggcgtcgtccgcgtggttcctgtgcagcgcggacgggatggagctcggcggcaccacggcggcggcc

SEQ ID NO: 3065 - DNA, 649 bp, Zea mays
  misc_feature (80)..(80): n is a, c, g, or t
  Peptide Sequence Number=SeqID_9320
  Probeset Number=SeqID_17468
catcacatattgatttggattcagacttggatggaatggataacaaagtaagagctgaaggccgttactattctgcaaanaatgcagtttctgaaagaaataaaggtttcaaacatctgaaaatatttaagggaaacacttctgtaatgcccgctgaagattttgtcccatttggtacacaatcacttcctttgaaaagcacaactgtggaacaagagctagaggagtcttgggaagatgaaatacttcgccggactagggaattcaataagatgtctcgtgaacgccctcacgatgaaaaagtttggctggctttcgctcaatttcaggacaaagttgctagcactcagccacaaaaggctgctcgtttacaaactaccgaaaggaaaattagcatattggagaaagctgtggagctcaatccagatagtgaggaattattgctttgccttctgaagtcatatggcaagagggacaacactgagactctattgactaaatgggagcaaatacttacgaagcacccagatagctctacgttgtggaaacagtatctgcttctgtgccaaggggaattctccagattcaaagtttctgaaattcggaagtcctacgtgtatgctgtacaggctctatctgcaggcatgca

SEQ ID NO: 3066 - DNA, 212 bp, Zea mays
  Peptide Sequence Number=SeqID_9321
  Probeset Number=SeqID_17469
ctgcagtagccaccgacagtctagctttgtgtgggtgtttaattacctttgcacggcacccatcattggcttgtcagagcgaacggtggcagttgtcgtttgcccatcgaaatgcgtcttgtgggaaaataacatatattcactgcaaagctggaaggggccggagtacaacagtcgtcttgtgctatctggtcaaatacaagaatatgaca

SEQ ID NO: 3067 - DNA, 667 bp, Zea mays
  Peptide Sequence Number=SeqID_9322
  Probeset Number=SeqID_17470
atgccgaaggtctttggcaccggcgtcttcgagttccggcacccccgagcggccgagtacccactacccgcggacgccgcccccgctacggctgcggcgcccgacaaagttcccgcatccaccggcggcggctccatcacgctcctcgacatccagcgggaccgcctcacccgcgtcgccaccgagcattggggcacggccgctgctgcggcggccttcgacgcggaccttgtcaggaagatctatggcactgagctccgcgtcgaggggaggggccggaaaactgtgccgctgcagcgtcagcctgtccaccttcgcctcggatcacatcagggcgtgggcagagaacggtctgtggctgtgcatggaaatgggatggtggcgccggtcctagctctggatgctggtgctgctgtctgtgctggtgatgggctgctgacctcacctggaccttcctcgcctcagcacggatgtttggctgagccgctggagaaggctaggttgagctcgccccttcctgccactcatgtgccatgcatgtcaaccttggagaatatcttagctgggccgtctgggtctgctgctgtggggtcgctggattctgtcctccctgtttcgccccagcgacacaggactgttgctgttgctgggtcgctggaacaggctg

SEQ ID NO: 3068 - DNA, 429 bp, Zea mays
  Peptide Sequence Number=SeqID_9323
  Probeset Number=SeqID_17471
ggcctggtgcacgtctccacgctggacaatgattactaccgcttcgatccggtgggccagcgtctgattggcgaatccggcggtcgcacttaccgtctgggtgatgcggtggaagtgcgcgttgacgcggtgcacatggatgagcgcaagatcgatttcgcgctgatctccagcaaacgcgtaccgcgcggtgaaggaaaaaccgcgcgcgagcgtgagaagcatggcggcaagccaccggcgaagcggcgccgcgatgcgggccgaaagggcaactttgagccggacgccgctttccgcggtgagaagcagccgcctgcggcgaataaaagcgagaaaaaaagcaaaaaagtcttcgaaaaaacccgtaaaatcgccgccgcaaccaaagcgaagcgcgcagtgaagaagaaggccagcgaagcctga

SEQ ID NO: 3069 - DNA, 607 bp, Zea mays
  Peptide Sequence Number=SeqID_9324
  Probeset Number=SeqID_17472
tgcagttgccagcgcagcaactgatggcgctgcgcggtaaaaagcttggcatgatttttcaggatcccagcgcgtcgctgaacccgacgctgacgctgggtgaacaggtcaccgaagtgctgcgccgtcatcgtgggttgtcagcgcgcgaagcgcagcagctgggggaatcgctgctgcgcgatgtcgagctgaagcacccggcacgcatgatgcagcgctatccgcatcaggtttccggtggtgagaagcagcgcatcctgatcgctaccgccttcgcctgccagccggactgcctgatttttgatgagccgaccacggcgctggacgtcatcagctcggcgcaaatcctcgatctttacgagcgactgcgcgccgagaccggcgtcgcgtcgctgtatatctcacacgatctggcgctggtggcgaaagtggccgaccgcgtatgcgtgctggagcagggccgcatcgtggagctggccgcgacgcgcacgctgttcagcgcacccgcgcatgcgtatacgcgcaaactgattgccgcggtgccggatccgcagcatcggctggtcgcggatgcggccggcagtcagccgctgctcagcctgca

SEQ ID NO: 3070 - DNA, 423 bp, Zea mays
  Peptide Sequence Number=SeqID_9325
  Probeset Number=SeqID_17473
aaggctggcctgaaagtcacgctgcccagtctgcagactctgctagtgcttcagggacctgaaccggagtcccatcatgtcagtgcggaagatatgtacatacgcttgatgtacatggaccaagagattggtctgcagtcggtaagccgtgttctcaaccagttcctttacgccggcatggtgacgcgtcataacttcgaaggcggcatatccgtgttcgatctgacccagcagcatcgccacgatcgcgtgatttgcctggattgcggcatagtgatcgagttaagcgatgaatctatcaatacgcgtcagcgtgagattgcaacacgccgcggtatcaaactcagcaaccacagcctgtatctgtacggcccctgtgcgctggtacactgccgcgaacacgagtcgctccacgatcagtaa

SEQ ID NO: 3071 - DNA, 441 bp, Zea mays
  Peptide Sequence Number=SeqID_9326
  Probeset Number=SeqID_17474
atgatcttcgtcccggtggtcccacccgcggccgcctcgggtggcgtgctagggtgccttcccgtgcgtggcctggcccacttctggccgcccgatcttgtccaggccacctacaaggtgccgggccaggccgtccacgtagtcattggccaagtggtgctaatgtaagcagtaccccgtgcccgcctgtagggcgccggcctgccagtgcctgatcaaggcccggagttcatgacccgtgagctgatcaaggtgggccacctcgacctcatcggcagcgacttcacctgggtggtcggccactggctggtcgacgaaaagcacccgaccgtcctcatcgccttggagcgccgcgagtggggccacttcttcggctaccgatagaacgacaagctgggtggccgcgcgtgcggtccacacaaggcgggtgcacccgtgctg

SEQ ID NO: 3072 - DNA, 636 bp, Zea mays
  Peptide Sequence Number=SeqID_9327
  Probeset Number=SeqID_17475
atgaccccgggcgtgatccgccggatcgtgtccgagaacccgtcctgcgtgatgctcaagcacgtggactggccggggctggagaagatctcgaccctgcggggcttcgaggccgacggctcgatgcgccacatcgcgatcctggtcggcaatggcggcctgttcctggatttcgagaccgagcgcggggccgacggggccaataccggctacgccttcccggagatgctggtcgacgtggtccgcctcggccgggccggcgagcgcgacgccgcccacgacctgttcgacgcccacctgccctacctgcgctacgagcagcagcagggcccgctgggcctcgccgtgcgcaaatacgtgttccagcgccgggggattttttcgtctgacgctcagcgcaagccgtcccaggcgctcaccccgcaggccagggccgaaatcgagtacctgctggcccgcctcgcccgcacggatgcgcgggcgaagctgatggatccgaaagggctcagccctttgggatccccgtccgggcgctcagtcgagccggtaggcgatgaccgagtcgcccggcgtggtcccgagcgagccgtggccgccggcggcgatcaccacgtattgcttcccgtccttgccccg

SEQ ID NO: 3073 - DNA, 544 bp, Zea mays
  Peptide Sequence Number=SeqID_9328
  Probeset Number=SeqID_17476
cccacgttaccccgttccggtcgggccatcccttgaacccctggggccccctggccagccttccgcccttcaaggaccacctccagccgtggttttggcttgtccagtccaagttgaaaccggagctcctcacgttgcaggcccccccttcggccggtccgggcttccccaaccccgcggccgccccgaacaaggccttgtaagttccggcccggaagggccttaaaggaaccccccccccggccaagccgaaccagttcaaggccctcgcgttgcggccaacccacctgttcccccccattgcaaccccaaaggccgggaagccaaccgggtttggccttggccttggccccgggcttctgccccggaagccttggccgggccttaagggcccccccgaaaaagaaccagaagttgaaggccccgccgttccaaatgaagccgaagccgcccttgggccgccggggaagaagccgaagttaaccttgggccgttgccccaacctccagttcgcctctaaagaacccccgggtcccaacctgga

SEQ ID NO: 3074 - DNA, 398 bp, Zea mays
  Probeset Number=SeqID_17477
atgcaccacaccgcgcgttttgcagcccgggtgatgtccgtggtcgaagctcccggaccccttggccacctcatttgcggagaacagaccatgcaggaacccctgggcatcgtggtgatgggcgtctccggctgcggcaagagtggcttggctgcggcagtcgccagcgcgctgggctggacattcctggaaggcgatcttctgcacccgccggccaacatcgcccacatgcaggccggccagccgctcaccgacgccgaccgcgcgccctggctggcggccatcgaaacctggatggccacgcgcctgcacgcggggcacggtgtggtggtggcctgctcggcactgaaccaagctatcgcgacgtgctgaggcaagccgggccgctgcgtttcgtg

SEQ ID NO: 3075 - DNA, 554 bp, Zea mays
  Peptide Sequence Number=SeqID_9329
  Probeset Number=SeqID_17478
ctaaagcaccccctgtcccccaaggacctcaacctggctcacggcctcggcaacgtgactccggggttggtcccgctcgcggatgacctggccaagccccagccaccgctgctgcacctccttggcccgggaagccacctgctcctggaccgaggaagcctcttctcgagccgactccgcctctgtccacgccgacgccgctacctccggctccagctcatcgcagagcagccgaaggttctccgcaggtacgaacaaccccccacgattggagggcctgcggagcaacagaaggccgacggatggctcgccgccgcccgccccagcagtagcgacgacgacttctgatccgagcggccgaacaacaacagcgatgacctcagggcggatgctgctgccataaggccctcgcccacgtccccactcgaggggcaaggacgagcagaaggccgtagagttggaggtcagtccgcgggcggcaccgactatctcgtcggtggacaaacctcttccggctgccgcgggcggaaggtggcaccggaagcgggtaccga

SEQ ID NO: 3076 - DNA, 296 bp, Zea mays
  Probeset Number=SeqID_17479
atgacgctgctatcaaggagcaagaccacagggctacgaaggcgcgccctcgtcctcgctctcctcctgctggtcccgctgtttcttattatgctccacctcacctcatcgccctcgcctcggcccctccccgcgccccgcaagccctcttcccggtcccaggcctgcgactactccgccggcgagtgggtgcgcgaccccctcgcgagctcctcgctccgctacgatcacacctgcaaggagatcttcaaggaatggaactgcatcgccaatggcaagcccaacgcccgcgacct

SEQ ID NO: 3077 - DNA, 372 bp, Zea mays
  Peptide Sequence Number=SeqID_9330
  Probeset Number=SeqID_17480
atgctggcgaaagcacagacgctgcccgccacgctgccgcacagcagtgagacggtaacgcctgcgccggcaccggctgccccaccgtcaccgccggaggtcgtagcggaacataccgaaccggccaaagcggacgatctggtgatgacggccgatgacgcgcgcctcggctcggtgaaatttatcaatggtacctggcgcgtgacgctgcgtcagaccaatctgccgaccggcaagccgccgagcctgcgctatcagatccgcaacggtaaaggcagcgcagtgattacccaggaagacaatattcgctgtaaagccgatgtcactgccgccatgaccagcgccggcaccatggtagtgcgaagccgctaa

SEQ ID NO: 3078 - DNA, 312 bp, Zea mays
  Peptide Sequence Number=SeqID_9331
  Probeset Number=SeqID_17481
ctgctcggctggtcgccatttcacgggacgtacttcggcaagaggctggatccggagccggggccggcgcacggacggaaagaagtggcggtgctccagcgaggccgccccggactccactgcgagcgccacatgcaccgcggccgcaagcgttcaagaaagcctgtggaaacgcagcccgcgccccagtcccaaccgcccgccgccggcgccgccgccgccgccaacggcagcagctttcgggtcggatgcctccacggacggaatggtggccatcaccggcgaatccatggagttgccccgacgcgcctg

SEQ ID NO: 3079 - DNA, 755 bp, Zea mays
  Peptide Sequence Number=SeqID_9332
  Probeset Number=SeqID_17482
atgctggtactgccgcgcgtcaacctgcgcgatgccggcgtgtggcgggtgatgcgccagatgggcccggcgattctcggcgtgtcggtgagccagatctcgctgatcatcaataccattttcgcctcgtttctggtctccggctcggtgtcgtggatgtactacgccgatcgtctgatggagtttccctctggcgtgctgggcgtggcgctcggcaccatcctgctgccgtcgctggcgaagagttttgccagcggcaaccacgatgaatattcccgtctgatggactggggcctgcgtctgtgcttcctgctggcgctgccgagcgcggttgcgctgggcattctttccggtccgctcaccgtggcgctgttccagtacggcaaatttaccgcttttgatgcggcgatgacccagcgcgcgctgattgcctattcggttgggctgatggggctgatcgtggtgaaagtgctggcgccgggcttctattcgcgtcaggacatcaaaacgccggtaaagattgctatcgccaccttgatcatgacccagctgatgaacctggcgtttatcggcccgctgaagcacgcaggtctgtcgctgtcgattggtctggcggcctgcctgaatgcggcgctgctctactggcaactgcgcaaacagcaaatctttcagccgcagccgggctggcacggtttcctgctgcgtctgctggtcgccgtcgcggtgatggctgctgcgctgctgggcattctgca

SEQ ID NO: 3080 - DNA, 571 bp, Zea mays
  misc_feature (61)..(61): n is a, c, g, or t
  misc_feature (467)..(467): n is a, c, g, or t
  misc_feature (483)..(483): n is a, c, g, or t
  misc_feature (488)..(488): n is a, c, g, or t
  misc_feature (495)..(496): n is a, c, g, or t
  misc_feature (501)..(501): n is a, c, g, or t
  misc_feature (503)..(503): n is a, c, g, or t
  misc_feature (506)..(511): n is a, c, g, or t
  misc_feature (513)..(518): n is a, c, g, or t
  Peptide Sequence Number=SeqID_9333
  Probeset Number=SeqID_17483
ttaagtgccattctgactgtttcttctgcggcattgttatgtctcactacacgtggcatanatgtgacagagagttcaagagtgacaacccaacatgtttttgccactttgtcattcattgctgaaatctttatcttcctctatgtggggatggatgcattagatatagaaaagtggcgaattgtaagtcaaagcccaagaaaatcaattggggtcagttcgttgctgttggcacttatcttagtgggaagagctgcatttgttttccctttgtccttcttatccaacttgcttaagaagtctcaatctgagaaaattgagttaaaacaacaagtaacaatttggtgggctggtctcatgcgtggtgctgtctctatcgcacttgcttacaatcaggtgaaagaatcaaacttcattgcttttaattcttcatctcttgccactttcaagttttaaatactgttttntaaaacattttcacantattnaacaatnnatttntnatnnnnnntnnnnnnaattttgaaatttgcttccaaaacaagtgttttaaaaacaaaaaaacaggggt

SEQ ID NO: 3081 - DNA, 624 bp, Zea mays
  misc_feature (573)..(573): n is a, c, g, or t
  Peptide Sequence Number=SeqID_9334
  Probeset Number=SeqID_17484
ctgcagggcctgctcgacgagtggacaccggtgatcgccgggtccgaactcggcgagcacccgtacgaaccgatcaccaccgccagcatccgccgcgccgaggacctcggagacgcgatgcccatcgactggcggcaccgggatgaccggtacgtcgagaagctcgcgacgccggacacctcggtcgcggacctcatcggcgacgtcgacccgatgaaggtcgccgagggccggagcctgggcgaccccgagacgatccacttcggactggtgccccgcgggcaccgcggcatcgtcgcgatcaacgagctgcccgacctcgccgagcgcatccaggtcgccatgctcaacgtgatggaggaacgcgacgtgcagatccgcgggtacgtcctgcggctcccgctcgacgtgctcgtcgtcgccagcgccaaccccgaggactacaccaaccgcggccgcatcatcacgccgctcaaggaccggttcggcgccgagatcctgacgcactacccaatcgagctcgaggacgagatcgcggtgatccgccaagaggcccagctcaccgccgacgtncccgacgccctcatcgagatcctcgcccggatcacccgtgccctgcgcgga

SEQ ID NO: 3082 - DNA, 550 bp, Zea mays
  Peptide Sequence Number=SeqID_9335
  Probeset Number=SeqID_17485
ccgaattctggagtgtttgatggccacctatcatcttgatgcgcgactggctcaggatatcgttgcccgcaccatgaaaattatcgacagtaatgtcaatgtgatggatgcgcgcggccgcattattggcagtggcgatcgcgagcgtattggcgaattgcacgagggcgcgctgctggtgctgtcacagggcagggtggtcgatattgacgaagcggtggctaaacacctgcacggcgtgcggccgggcatcaatttgccgctgcgcattgacggcgacatcgtcggcgtgattggcctcaccggccagcccagcacgttacgccattacggcgagctggtgtgcatgacggcagagatgatgctggaacaggcgcgcctgctgcatatgctggcgcaggacagccgcctgcgtgaggagctggtgctgaacctgatccgcagcgatacgctgtcgccagcgctgaacgaatgggcgcagcgactgggcatagatctcaatcagccgcgcgtggtggcggtggtggaagtggacagcggacagctcgga

SEQ ID NO: 3083 - DNA, 206 bp, Zea mays
  Peptide Sequence Number=SeqID_9336
  Probeset Number=SeqID_17486
cacgcaggttgagtaaacccctgaatttttgccccacccttacaaagcggtatcgtagcttatcaccatacgagaagaaaaaatatgtatggaaaatgctttacatttatatgctgggttatgatgttgattttgggcatatggaaactgtctcgttgatatctgcaccaaagtatcctgagaagcaggtataacattcagttata

SEQ ID NO: 3084 - DNA, 428 bp, Zea mays
  misc_feature (257)..(258): n is a, c, g, or t
  misc_feature (262)..(267): n is a, c, g, or t
  misc_feature (273)..(275): n is a, c, g, or t
  misc_feature (283)..(285): n is a, c, g, or t
  misc_feature (343)..(344): n is a, c, g, or t
  Peptide Sequence Number=SeqID_9337
  Probeset Number=SeqID_17487
cccacgcgtccggacgaggcacccttcagctacgggcagaggggtaaccttgaccggagcagtggtcgcagcgccctcgccgccgctattttcttctcgtttgtgtcttgctgctctcgtggtgaactcgctactccagtgctctgcaatattaagcagaagctattgtattgtttgggtcgtttgtcagctaaattgaaatgcgatggacatttactagtaaaaatttggggggggggaaaaaatttttttttttnnaaannnnnnaaaaannnaaaaaaannnaggggggggggggggaaaaaagaaaaaaaaaaaaaaaaaaaaaagaactggggggggnncccaggggtaaggggggaataccagcacactgggggccgttttttggggtcccgggctgtgccccaagtttggcgtattcatgg

SEQ ID NO: 3085 - DNA, 518 bp, Zea mays
  Probeset Number=SeqID_17488
cgcgcgctggacggcgagcatccgtactacgtggtcaccgagttcgacgcaccggacgaagccacgcaggacgctgcactggcggtgcttggcgaaggcatggagcagggctggatcgtcgacggcacgatcgcgcagagccaggcgcaggccgccgccctgtggcggctgcgcgaaggcatcaccgaaagcctggctccgcacaaaccgtacaagaacgatgtgtcggtgcgcatcggcgcggtgccggcgttcctgcatgcgatgcaggcgctgctggcgcgcgagtacccgcatatcgaagtggtgtggttcggccacattggcgacggcaacctgcacatcaacgtgctcaaacccgccagcatgacggatgaggatttcatcgcgcagtgcgagcatgtcacccggttgctggccgcaacgctgaaggagcatggcggcagcatctccgccgagcacggcatcggcctggtcaagcggccgtatcttgaaagcacgcgcagcgcggcggaaat

SEQ ID NO: 3086 - DNA, 280 bp, Zea mays
  Peptide Sequence Number=SeqID_9338
  Probeset Number=SeqID_17489
cgtcatcctcctcgtcatcttcctcttcgggccggtcccggaggggctgggcgcctgcccgacgctcacgcgggtgaggctgggccagaacttcctctcggggccgctcccgcgcggcttcctctacgtgccggcgctcgccaccgtggaggctgcagggcagcttcctgacgggacgggtggaggaggacggcagcggcggcggcggcagcagcagcagcaggctgtcgctgctgaacctgtcgggcgtccgataaagcgggtcgaaaacagcatccat

SEQ ID NO: 3087 - DNA, 402 bp, Zea mays
  Peptide Sequence Number=SeqID_9339
  Probeset Number=SeqID_17490
atgctgaccggcagcggctatcgtcacatcagctatctgttcttcaattcgtggaaatacaccacgctgccgggcggtatcgtcaacggcatcaccggcgcgtcgaatcaggtggcggacggtatcgcttttgacgaaggttatgcggtcacacggaaggatgacgactggcgctgggcggaaggctggctgccgcactcggcctggcgcaaaacgggcgcggcggtcggtggaccggttaatgaaaaaggtcagaatcagatgcggataccgctcagcaacgatgatggaattcagactcccggcattggcgtgttccctggcgtgaagacattacgacaggttgaatcctgcgccggcgtggcgcggaagaaggcaggccacgggcttgaccaggctgag

SEQ ID NO: 3088 - DNA, 557 bp, Zea mays
  Peptide Sequence Number=SeqID_9340
  Probeset Number=SeqID_17491
atgacgacggtggccggcctgttttcgctgctggccggattaccgctgggactgattctggtgaccaccagccccggcggcattgctgaaaaccggagcatcaaccgcctgctgggtgtggtgatcaatggctttcgctcgctgccgttcattattctgctggtggcgctgattccctttacccgtctgctggtcggcacctctctgggcacctgggccgcaattgtgccgttatcgatcaccgccacgccctattttgcccgggtagcggaagtgtcactgcgcgatgtcgatcgcgggctgattgatgcggtgcgtgccatgggcgccagcaaattacgtattgtctgggaggtgctgattccggaagcgctgccgggcattctttccggttttgtcgtcacgctggtggcgctgatcggcgcctcggcaatggcgggtgccatcggggcgggcggtctgggcgatctggcaattcgctacggttatcagcgttttgacacggcggtgatggtggcggtgatcgccgtgctgatcgtgctggtgtgcggtatcca

SEQ ID NO: 3089 - DNA, 369 bp, Zea mays
  misc_feature (357)..(357): n is a, c, g, or t
  Peptide Sequence Number=SeqID_9341
  Probeset Number=SeqID_17492
tttcgttttatttgttttttgtattatccattagacctatttgaagatggttatgttattaacattttttttttcattgtggttaacgtttttggtttaatatccttacgcgatttaggtttggatgatctttgaatttattttttttattttggattttttagggtgggcttggaggttttttagttgagagggatattttgatcgattatggtcgtcttttattggtatgtatttttaaacctattttgttattttccgtgaaagtttacgttttagtgtgttatgagtgtttacgtggttgtcttattttgctgatttgtgtgttttttgttggtaacattttggtttgatatncttttttttttt

SEQ ID NO: 3090 - DNA, 575 bp, Zea mays
  Peptide Sequence Number=SeqID_9342
  Probeset Number=SeqID_17493
ctgcagagcaacatgtttctagttcatcatccatggaaggcacagaggtaactttatcgcataaaacacctccacctgaagttcaggacaagattctttttatgatcaacaatatatccatctcaaatatggaagctaaggcaaaggaatttaatgaggtcatacaggaaaagtattatccttggtttgcacaatacatggtcatgaaaagacaaatcactgctcatcttaacagggcaagcattgaaccaaatttccatgatctgtatctgaagttctttgataaagtaaactcaaaatccttgaacaaggaaatactgaaagccacatatgagaactgcaaggtcttgttaagatcagaccttatcaaatctagttccgaggagcgctccttgctaaaaaacctaggcagttggttgggaaagttcaccattggtaggaatcaggcactaagggctaaggagattgatccaaaatctcttatcgtgctatttaagaaccttactgtacgcattagggcctgtggaccctgttccgtgctcagagagcgtctgcttcattctatgggaccacca

SEQ ID NO: 3091 - DNA, 657 bp, Zea mays
  Peptide Sequence Number=SeqID_9343
  Probeset Number=SeqID_17494
cagtccatcatgggccgcatcaagggctaccacggctccacggtggctggcgccagcttgggcggcatgatcggcatgcacgagcagggtggcctgccgttcccgggcatcgtgcatatcccgcagccttactggtacgccgaaggcgacgacatgaccccggatgagttcggggtgtggctggccgagcagctggagcagaaaatcctcgaagtcgacgaagacaatgtcgccgccttcatcgccgagccgatccagggcgccggcggcgtgatcatcccgccggaaacatactggccgaaggtgaaggagatcctcgccaagtacgacatcctgttcgtcgccgacgaagtgatctgcgggttcggccgtaccggcgagtggttcggctctgactactacgacctcaagcccgacctgatgaccatcgccaagggcctgacttccggttacatccccatgggcggtgtgatcgtgcgtgacaccgtggcccaggtactcagccaaggcggcgacttcaatcacggcttcacctattcgggccacccggtagcggccgccgtaggcttggaaaacctgagcatcctgcgtgacgagaaaatcgtcgagaaggcgcgcacagaagcggcaccgtatttgacaaaagcgattgcgtga

SEQ ID NO: 3092 - DNA, 768 bp, Zea mays
  Peptide Sequence Number=SeqID_9344
  Probeset Number=SeqID_17495
ctgcctgcagggtgatagcccggaaaaaaagctccgcctgacgctgctgattgccggcgtcgccagtatcgtggctggtatctttatggcaacactgaatttcagtcgcggtcatcatgacattggctgtctgtatatcgccagtatagcgctggggggctacatcatcatcggcgccttcagcgaccggctggagcggcatctggcgatcattacccatgcgttattatttaccatcatcgtgctgttgctggtggataatcaccacgctgccggcaagcgttcagaatataactatctggtggccctgatcatcggttcggcactggtgttgcgccagcaatccttttatctgagtaaaatatttccgctgctgtgcctgctgtgttatctgttttttgtcaccaccggtctgatctgggaaaataatcgtttacatctgaatattccgcaggaagccgtttttaccgttttcaattgtgcggtgccggtgacggcactgctgtcgaccgtgttcacctatggcggcaattattccgccaccgatcttatcaagcgcgagctcgcgtccgccatcgagcgccagcagctggagctctattatcagccgcaggtcgatggcgacaaaaatctcatcggttttgaagcgctgctgcgctggaagcacccggagaaaggctttatctcgccggaggtgtttatcccggtagccgaaaaaagcgggctgatcattgatattggcaagtgggtgctggagcgcatgctgca

SEQ ID NO: 3093 - DNA, 856 bp, Zea mays
  Peptide Sequence Number=SeqID_9345
  Probeset Number=SeqID_17496
attcggctcgagcgcacgcgatcgcgcggagatgaaccagtgcgtgccgagctgggatctggtggacgacccgacggcggcggtagctggcggcggaggcggcctaaaccatcaggtctcgacgaccgggggcgcgcaccggggcctgctcctgcaggcgtcagctggaggagcaggcggcgggggcgcgttcgctcccgtcgtcgtgcccatgtcgaaccagtactacgaggtggcggagctgacgtgggagaagggcaacatctcctaccacggcctgctcaaccgcccggcgcacaataagtacccgcccgccgcggcgccgtcgtcggctcagctgcatgccatagcaggaggaggcggcggccgcggcggcgggtcgccatccggggaccgcgagacgctcgaggcggtggtcggcgaggcggccgcgcggtcgcacttcctctcgcagccggcgccgccgtggctgatcggcgccgacgccgtggcgcgggccgcggcggacgcgctagtgccgtgcgccgcaagggcgggcgagtccgctgcagacggcggagaagcgggcgcctcgaggaggaagcggccgcgcgtggtcggcgacgacagtctggtggtgtgcgccagccaggggagcaccgcgcctcgccgccgcggcgagagcgcgctgctcacgcagctggacgcctgcggcaccgaggccgacgacgtgtgcggcttcagaacgaccacaaccaacaactccacgtccatggagcgtgacgacaagggctcaccggatactgagaacaccagcatcggcggaggggccagtgattcgcgctgtttcagccgtcgctcacaggcaagcagctaa

SEQ ID NO: 3094 - DNA, 303 bp, Zea mays
  Peptide Sequence Number=SeqID_9346
  Probeset Number=SeqID_17497
atggccacggccgacggcgccttggctcttgttcttttcccggaacaggaactggctgcctctgctgggccttcgtcagtcagcatgcattggatccgctcagctcagctcatttggttcgtccgttcgttctgggcactgggcttctggctctggctctctgccggtgctggcccggcgaccggcgcccgtcaaaggaactgtccggcggcagcaaacaggccaacgaacgacgaggcaagcaaatccttgcgcctgcaagacgcactcggaaccggaacgaccggcgccccggacccacgt

SEQ ID NO: 3095 - DNA, 818 bp, Zea mays
  misc_feature (180)..(180): n is a, c, g, or t
  misc_feature (626)..(626): n is a, c, g, or t
  Probeset Number=SeqID_17498
tgcagcgcgcctaccatgagcgcgtgtccaggcgttgacgcgctcaatagatccacttccttttcagagttctcctctggtgaacgccatgcaatatggggcactattaggcggtaagcgcctgcgcccgtttctggtgtatgccactggcgagatgctgcgcgccgaggcggccagccnggtcgcccccgccgcagcggtggagtgcattcacgcttactcattgattcatgatgacctgccggcgatggacgacgatgcgttacgtcgcgggcagccaacctgccatatcaaatatggcgaagacacggcaattctggccggcgatgccctgcaaaccctggcgtttaccattcttgcggaccagccgatgcccggcgtaagcccgcaggatcgcattgccatgatttccgaactggcgcaggccagcggcgtggccggcatgtgcggtggccaggcgctggatttagccgccgaaggccaatccgtggacctgaaccagctggagcagatccatcgccataaaaccggcgcgctgatccgcgccgccgtacgtctcggcgccctcacagcaggtgcagcgggccgcgatgcgctgccgcagctggatatctacgccaacgccntcaggcaggcgtttcaggtgcaggatgacatccttgatgtggtcggcgataccgccgttctgggcaaaacccagggagccgatcaggcgctggggaaaagcacttacccggcactgctgggactggataacgcgcgggccaaggcgcaggatctctatcgaaaagcactgggcgcgctggaggtgctggcgg

SEQ ID NO: 3096 - DNA, 209 bp, Zea mays
  Peptide Sequence Number=SeqID_9347
  Probeset Number=SeqID_17499
cgagttggtgaggatatatcggtggtgggatacccgatatcctatacagtctcctgttatataccgctgttagctcctgtcatacaggattttctcctgctggggctaaacagcgtggacatcgtgctgccactctctcagggacagacgctggagggcactcaggtgttgcctgtctccctggtggagagaggagccgccctggcgtt

SEQ ID NO: 3097 - DNA, 464 bp, Zea mays
  Peptide Sequence Number=SeqID_9348
  Probeset Number=SeqID_17500
ttgtcgcgattgggctcgcccaactttcatcagctgccgatcaatgcgcccaagtgcccctacgccaaccaccagcgcgacggccacatgcagatggaaacgcccaggggccgggtgaactacgaacccagctcgctggacccggcctccccacgcgccacgcccgcgggtttccacagcttcgcccaagccgccgatgacggccgcaaaacccgcgtgcgcgccgaaagcttcgccgaccattacagccagccgcgccagttctacctgagccagagcacgcccgagcaggcacacatcgcctcggcctttaccttcgagctgtccaaggtgcaggccgtgcacgtgcgcgaggcggtggtggccaacctgcgccacgtggacgaagacctggcccgccgcgtggccgacgcgctggcgctgccgaaactgcccgacccgggcccggccgcggtggccacgca

SEQ ID NO: 3098 - DNA, 715 bp, Zea mays
  Peptide Sequence Number=SeqID_9349
  Probeset Number=SeqID_17501
tgcagctgggcgtctggggtgccgtcgcgctgacgttgctatccgcctgtatcagcgggccgtggctgcatgcggtggtgcgtttcctgatcggcgtcgccagcggctgggcaatggtgctggtggcagcatggagcaatgagcaactgctgcatcacagccggccgggcctgtcggcagcggtgtttgccggtcccggcaccggcatcttcatcagcggcatgctggcggtaatgctgcacgccagcggcgtgagcgcggcgtttgcctgggcggcgtacggtgtgctggcgctgctgctgattgccgcgattgcgcgtttcctgccgcgcagcggacagctgcatcgcccgcaacaggccgctgagccgctgctgctgacgcgtgacctgaagcgcctgatcctcagctacagcctcgccggctttggctatattctgcccgccaccttcctgtcgcaaatggcggcggcgcgcttccctgatagcgcttttgcgcagtttgtctggccggtgtttggcggggcggcggtgatcggcatcgtgctggggatcgtgacgcgccactggggtagcagccatcggcggctggcgctggtgctgtgggcgcaggcgctgggcgtgatcgcggccatcgtactgccgggcatcaacggtctgctgctggcggcgctgctgattggcggcggctttctctgcgtggtgcagctgtcgct

SEQ ID NO: 3099 - DNA, 876 bp, Zea mays
  Peptide Sequence Number=SeqID_9350
  Probeset Number=SeqID_17502
tgcagcggctacgcctgctacatgtactccaaagcgtcgccgaacgttaacattctgcccgcgctgcgccaggagccgaagtttgagctgcgcaacaacgcgtatgtgctgcgcgtcaatctgaccgacgataaaaaacgcgcgaccggcgtcacctatctggacggtcagggacgtgaagtggagcagccggcggatctggtgatcctctccgccttccagttccacaacgtgcacctgatgctgctgtccggcatcggcaagccgtacaaccctatcagcaacgagggtgtggtcggccgtaactttgcctatcagaacatctccacgctgaaggcgctgttcgataaaaacaccaccaccaatccgtttatcggtgccggtggcgcgggcgtggcggtggatgattacaacgccgataacttcgatcacggcccgtacggctttgtcggcggttcaccgttctgggtcaaccaggcgggcaataagccaatctccggcctgccgacgccaacaggcacgccgaactggggcagccagtggaaagcggcggtggcggatacctataaccatcacgtgtcgatggatgcgcacggcgcgcaccagtcgtatcgcgctaactacctcgatctcgatcccaactacaaagatgcttacggccagccgctgctgcgtatgacctttgactggcaggacaacgacatcaaaatggcgcagttcatgatcggcaagatgcgcaaaatcaccgaagcgatgaatccgaagatgatcattggcggcgcgaaagggccgggtgcccatttcgataccaccgtgtaccagaccacgcacatgagcggcggcgccatcatgggcgaagatcctaaaaccagcgcg

SEQ ID NO: 3100 - DNA, 337 bp, Zea mays
  Peptide Sequence Number=SeqID_9351
  Probeset Number=SeqID_17503
atcgtggcccttccattaggggttgcaggtatgggggacgtcgctaagagggcattttggattgagcgttcggggaagatgattaccgcgtcctcaatgaagatggcctgcgctttgaagatgagtttgtccgacataaaatgttggatgccatcggtgacctgtttatgtgtggttataaattattggcgcatttactgcgtttaaatcaggtcatgctttgaataataaactgctacaggcagttttggcgcaggaaagtgcttgggagtttgtcacatttgaagatgaagctgaaatgccactggctttccgcgcaccatcaacagtgttggca

SEQ ID NO: 3101 - DNA, 389 bp, Zea mays
  Peptide Sequence Number=SeqID_9352
  Probeset Number=SeqID_17504
ctagttttcttgtaacttcagctcgctcgagatcctttgcgcttgatgtttatctctctctccaccctccctccgtgtggtttgtcgtttctggtttgcgctgctctctccgtccggccttcgtgtcccctttcgtgcccccggtccgggtcctcctgcgctgcccccatccggcccccgggctcgctgtctttcttcctgctttcgccgcatgggcgtgtttttgtcgtcccgtcgcgtgttggttgtccttggttgttcttgcggcttctttttgctttgtaactggcccccccttctccctggcggccgccgtttctcaagaatttgacgactgtcttttgttccggtggtttcctggttctcccgcgcggcttcctgcgggtcat

SEQ ID NO: 3102 - DNA, 476 bp, Zea mays
  Probeset Number=SeqID_17505
tgcagaacgcgcagaagctgcccgagccgatcttcacgccggccgcgaaggccgaactcggcgagcacgacgagaacatcacgttcgaggaaaccgagcgccgcatcggcaccgagctggccgcgacgatccgcgacatctcgatcaggctgtacaaggaagcggccgactacgcggcgacgcgcggcatcatcatcgccgacacgaagttcgaattcggcctcgacaaccacggcaagctgtatctgatggacgaagtgctgacggccgattcgtcgcgcttctggccggccgaccagtaccaggtcggcaccaacccgccgtcgttcgacaagcagttcgtgcgcgactggctcgaggcgcagccgtggggcaagaccgcgccggcgccggcgctgccggccgacgtcgtcgcgaagacggccgcgaagtaccaggaagcgctcgagcgcatcaccggccagccgctcgcctga

SEQ ID NO: 3103 - DNA, 569 bp, Zea mays
  Peptide Sequence Number=SeqID_9353
  Probeset Number=SeqID_17506
gccggcggagtgctggggagaggcatcggcgaccgtagcggcacgagcagcaacttgcccgtgtgcagccccaaactgggaagaagatgctaattaaagtgaagacgctgaccggaaaggagattgagattgacattgaacctacagacaaggtggagcgaatcaaggagcgtgtggaggagaaagagggaatccccccacaacagcagaggctcatctacagtggcaagcagatgaatgatgagaagacagcagctgattacaagattttaggtggttcagtccttcacctggtgttggctctgagaggaggaggtggtcttaggcagtgatggaccctccattttacctccctgccctgtcactcataatgaggcatcatatatcctctcactctgtgggacaccagagccactaccccctcccctggatgcccagtcttgtgtgtctgttggtgggagattgtgaggaccccaggaggcagtgttcctggcccaaagggcccttgctggctattgggttttagtttgcagtcctgtgtgcttccctctcttatggctgtgtccctg

SEQ ID NO: 3104 - DNA, 494 bp, Zea mays
  Peptide Sequence Number=SeqID_9354
  Probeset Number=SeqID_17507
tgcagagcacggtgcttgatacggtgatgaaaaccacctcagccagtatcgccgtgcgtaacctgtgtgcgccgacactaccctgttatccaccggcgcaggaccgtttccactggcgtgtgctgagccatctcggcagcggattcctgtcgatgatggacaatgccgacgtgctgcgcgggacgctggcgctgtacgaatggaccgacagtgagatgaaccgccgtcggctggaagccatcattgacgttaagcaccgcgaaatcgagcgtttcgaacagggctatctggtacgtggtgtgcagattgaggtgacgctggacagtcacggctttgccgggcgcggcgacatctgtctgttcggcgagatgctgagccgtttctttgcgctgtataccgatatctatctgttcaaccgcctgattatcatcctgcaaccgaccggagagcgcctggaatgggaagagaagcacaaccgccgcattcccggctga

SEQ ID NO: 3105 - DNA, 391 bp, Zea mays
  Peptide Sequence Number=SeqID_9355
  Probeset Number=SeqID_17508
atgcctgattcagctgctccaccggtcctgctcgaacgcccgctggctggcgttgcgctgctgcggctgaaccgcccgcacgccaccaatgccctgagcctggagctgcaagcgctgttgtcgcagcactttgccgagctgggcgcagacccgcaggtacgctgcatcctgttgaccggtggcgacaacgtgttcgccgccggcggcgatatcggcagcatggccggggtcggcccgatcgatatctaccagcgccacaccgagcgagtctgggcgccgatccagcactgcccgaaaccggtgatagctgcggtctgcggttacgcctatggcggcggctgcgagctggcgatgctcgccgacctgatcgtcgccgggcgcaatgcgcgct

SEQ ID NO: 3106 - DNA, 621 bp, Zea mays
  Peptide Sequence Number=SeqID_9356
  Probeset Number=SeqID_17509
cgctcttcgggcgtggtcaggcggccgatcatcagccccaccatcaagccgacgatcgccagcgacagcatcacccgcgggaacgccttcgaacgcacgtccggttcaggggtagaatgctcgtcatcttcacgcttggagccgtgcatgtttcacgtcatcctttttcaaccagaaattccgccgaataccggcaatatcattcgcctgtgcgccaacagcggctgcgacctgcacctgatcgagcccatcagcttcgaactggatgacaagcgcctgcggcgcgcggggttggactaccacgagtatgccacgctgaaaaagcacgccagctatgccgcttttctggcggcggaagcgccacagcgcttattcgcgctgaccaccaaaggcacaccggcgcacagcgccgtcagctatcagccgggcgactatctgctgtttggcccggagagccgtggcttaccgccagaaattcttaatgcgttgccggcagaacaaaagatccgcattccgatgcgcgcggagagccgcagcatgaacctgtcgaatgcggtttcagtggtggtgtatgaggcgtggcgccagctggattatgcgggcgcgttgatcaaaggctag

SEQ ID NO: 3107 - DNA, 352 bp, Zea mays
  Peptide Sequence Number=SeqID_9357
  Probeset Number=SeqID_17510
tgcaggcgcacggcgtgcagatgtggggcgatgtcgagtatctgaagattgataatgacgggctgcacctgcgccatcagggggaagcgctgacgctggcggtagataacatcgtgatttgcgccggtcaggaaccgctgcgtacgctggcgcaggcgctgaccgcacgcggcaaagccgtgcggctgatcggcggtgccgacgtcgcgcaggagctggatgcacggcgcgccattgctcaggccactgagctggcgctcagccagctcgcagttgccaaacagcttcttcattttctgatgatagccaaggtggcggttgccgacgatgcgcagctcgccgccatactgca

SEQ ID NO: 3108 - DNA, 215 bp, Zea mays
  Peptide Sequence Number=SeqID_9358
  Probeset Number=SeqID_17511
tgcagggcgagctgttcccgcgacgcgacggcgagttgccgagcgagggcaccgtcctgggcgcgatccaggtcccgcccgacggacagccggtcgtgctcctggccgaccacggcccgaccggcggctacccggtcgtgggcgtcgcccaccccgacgacctgtggcagctggcccagctgcgtccgggagagccggtcacgctgcgggcggcg

SEQ ID NO: 3109 - DNA, 314 bp, Zea mays
  Peptide Sequence Number=SeqID_9359
  Probeset Number=SeqID_17512
atgctgggcatgacagaggccggcggcggcgaggtcggcgacctaccggaggacgtgcagatcgacgaccgcattggcgccaccgacttgcccagcctgcgcctccttctatcgttcctcaagcgccaagcctggcaccggggctgcttctacggcctcagggtctacaccgcctactgggccgtgcaggacttggacgagaacgatggctatatctgaaccgatgtgctggactaccgcaagacgacagtcgtggcctatatagatctgaaaggtggcgacttagtcctaaacctttctttggagatcacact

SEQ ID NO: 3110 - DNA, 388 bp, Zea mays
  Peptide Sequence Number=SeqID_9360
  Probeset Number=SeqID_17513
tctaatcacgcgatgtaatattctacttcccgattcgacgccggcgggcaatcctggttgtaacagccgtggactgcaactgcaatgggtcctccgtccgttcgttgttagtttacggcttttccccgcttggtgcaggtgctccgacgaggtgaacccgcggaagcgcccgtacaggttctcgaaccagaagctccgggacctgggcttggtgttccgcccggtgagccagtcgctgtacgacacggtgaagaacctccaggagaagggccacctggcggtgctgggagagcagaagaagaagacgacgacgacgacggaggcaggccgcgaggagtgcccggccgccgacctgcagcagcagggaggaatcgccatccgcgcgtga

SEQ ID NO: 3111 - DNA, 482 bp, Zea mays
  Peptide Sequence Number=SeqID_9361
  Probeset Number=SeqID_17514
tgcaggcgcacggcagcgatgcgctgcccgcaggcgcgcgccccttgctgctggtggaggatccggaaacgcggctgcatcccatcatgctgtcggtggcgtggaatctgctggcgctgatgccgctgcaaaaaatcgccaccacgaactccggtgagctgctgtcacaggtagcgctggagcaaatctgccgactggtgcgcgaacccgatcgcgtggcggcgtggcgtatcgggccggaaggattaagtgccgaagaggcgcgccgtatcggctttcacatccgcgtcaaccgtccgtcggcgctgtttgcccgctgctggttgctggttgagggtgaaaccgaagtgtggatcatcaatgagctggcgcggcagcgcggctaccattttgccgcggaaggcgtgaaggtgattgagtttgcgcagtccgggcttaagccgctgctgaaatatgcgcgccgcatgggcattgcctggcac

SEQ ID NO: 3112 - DNA, 632 bp, Zea mays
  Peptide Sequence Number=SeqID_9362
  Probeset Number=SeqID_17515
gccaggcccccatgactttggacggtgaacaagtactggtggtcggtgcgggcatctccccggtccagatgctgatcgagatcgcccgttctgcacccgatgtgacgacgttctggtccagccgccggaagccggttttctccgacgcgcccttcagcccggagcccggccgcaaagccgtcgcccgggtcgagcgacgggtccgcgccgggctcccaccgacctcggtcgtctcggtgaccggcctgcgtcggacgcccgccatcgccgccgcggaggccgacgggatcctcgcctggatgccgatcttcgacgagatcacccccgacggggtgcggtggcgcgacggctctcgccccgacctgccgctcgacagcatcttctggaacaccgggttccgcagcgcgctggaccatctcgcgccgctacgactccgcggacccggtggcggcatcaccatgaccggccgcctcgcgaccgtcgtcgccgacgaaccacgggtgcaactcctcggttacggaccgtccgcgtcgaccatcggggcgaaccgggccggccgcgaggcggcccgcgtcgtggaaaacctcctacgcgagccgatgacccgagcgggtcagacgatccgctcgtag

SEQ ID NO: 3113 - DNA, 252 bp, Zea mays
  Peptide Sequence Number=SeqID_9363
  Probeset Number=SeqID_17516
cccaccgcgcttctgtcacgccaggtgggcgtgatccgcaagcagtcgctgatcctcaatctgccgggacagccgaaatcgattaatgagactctggaagggttgaaagcggatgacggcacggtgaaagtgccagggattttcgcggctgtaccctattgtttacagctgctggaagggccttacgttgaaacccacccggaggtggtagcagcttttcgcccgaaaagcgcacggcgtgagacaaacgtc

SEQ ID NO: 3114 - DNA, 446 bp, Zea mays
  Peptide Sequence Number=SeqID_9364
  Probeset Number=SeqID_17517
ggtatcaaatatgtggttgatgcgggttactcgaaaatgaaggtgtacaatccgaagatgggcatggacacgcttcaaatcacaccaatttcccaggccaatgcaggtcagcgttccggtcgtgccggtcgtactggaccaggaaaagcatttcgactctacacagaaaaggcattcaaggaagagctgtacattcagaccattcctgaaatccagcggaccaatttggccaatacggtgctgatgctgaaatcgctcggtgtcaaagacttgctggactttgactttatggatccacctccgcaggataccatttccacctccatgttcgatctatgggctctaggagctctagataacttgggagaattgacggagcttggacgcaagatgagcgcatttcctatggacccttctttggccaagctactgattactgcggaaga

SEQ ID NO: 3115 - DNA, 540 bp, Zea mays
  Peptide Sequence Number=SeqID_9365
  Probeset Number=SeqID_17518
cttgcatgcctgcaggcggccgaggccgagcggctcaccgtacgctcggcgtcggggctcgcgggccggctgcggatcggcttcgtccattcgatgctgtatcgcgggctgcccgatgcggtgcggcgcttcgaggccgactatccgggcgtcgagatcgtgctgagcgagatgaacacgcaggcgcaggtgcaggcgatccagcgcggccagatcgatctcggctacgcgcactggggccactgcccgcccgaggtcgaatcggcacccgtctatgcggaaccgttcgtctgctgcctgccggccgcgcaccggctcgcgcggcgccgtcaggtcgcgctcgccgcgctggccgcggagccgttcatcctgtttccgcgcgatgcggcgccgcactaccacgacctgatcatcgcgcagtgcgtgaatgcgggattcagcccgctgatccgccacgaggcgcggctgtggcagacgatcctgtcgatgatcgagttcgggatgggcatcgcgctggtgccgcgcgtgctgcaggtcgac

SEQ ID NO: 3116 - DNA, 771 bp, Zea mays
  Peptide Sequence Number=SeqID_9366
  Probeset Number=SeqID_17519
aggtcgcccatgaaatttcgtgtaatgagtgcgctgggaattgcggtactgctgagcgcctgcgacagcggatcggacctcgatccgcaacggcaaatcggccctgatccgcagctgccgcaggccaaaaacttctttatgccgccgatgcaggtgccggaaggcaccgcgtggaaagagggcgagacaccaaaagtggccgacggcctgaagatcgagaaaatcccggccagcctggtgcacccgcgtcagctgtatgtgctgccgaatggcgacgtgctggtggcagaagccaacggggtgaaaaacccggtcacggcaccgaaagaattgatcatgagcctggtgcagaaatcttccggcaaaggtggcccgggcggcaaccgcatcacgctgctacgcaacgttaacggcaagtgggaacagcaccggtttatcgaaaacctcaatgcgccgtttggcatgcagctgattggcaatacgctgtatgtggctaacgccgacagcctggtgaaattcccttaccagaccggcgaaaccgaaatccgtacgccgccggaagaggtgacgtcgctgccgggcggtgagctgaatcaccactggaccaaagcgctgctcgccagtccggacggcagcaaactgtacgtcggtgtcggctccaacagtaacatcaccgagaacggtatcggcgcagagtatggccgcgcggcggtgtgggaagtggacgccgcaaccggtgccagccgcatctatgccagcggcatccgcaat

SEQ ID NO: 3117 - DNA, 252 bp, Zea mays
  Peptide Sequence Number=SeqID_9367
  Probeset Number=SeqID_17520
ccgagcttgaacgcatcagcatggattgtctggggctggcgtcggtgcaggcgacctttatgttctggtggatcatcgcggagaaaagttaccggcgctgcgcggtcatcgcctcaccgacggtgaaccgctgaccttttacccgggcgaaggaccgccgtgcctgccggtcaatagctagtggcaccagcatggggttcaacttgaacagatgcggccgcaacagatggatgtttatcgaggcgtttcgag

SEQ ID NO: 3118 - DNA, 496 bp, Zea mays
  Peptide Sequence Number=SeqID_9368
  Probeset Number=SeqID_17521
tgcaggcgggtcagcaacagcgcgcgctgctgggcaaaacccccgatcagcggccgatgcaggcctcggacatcaccgtactggtgcgcagccggaacgaagccaacctgattcgcgccgcgctcaatcagctcggcattccctcggtgtatctctccaaccgcgacagcgtgtataccacgcccgaggcgcgagaactgctgtggctgttgcaggcgatccttgcacccgagcaggagcggatgctgcgcaccgcgctggccacgtcgctgtttgcctttgatgccgcgcagctggacgcgctggatcaggatgcgcgcggctgggatgcgctggtggatacctttgcccgctggcagcaattgtggcaccagcgtggcgtactgccgatgctgcgtcagctaatgctggaacgccagctggcagaaaacctgctggcctcagagaacggcgagcgtcgcctgaccgatctgctgcacctcggcgaactgctgca

SEQ ID NO: 3119 - DNA, 506 bp, Zea mays
  Peptide Sequence Number=SeqID_9369
  Probeset Number=SeqID_17522
atgactgaacccacaccgcggctggcggatacgctgcgcgcgcgtcttagcgcctggattgaagagcatcagctgaaacccggcatgcgtttaccctcagagcgtgcgctggccgcccgcttcggtgcgtcgcgctcgtcggtgcgtgaagctatccagcagctgatcagcagtggcgtgctgatcagtaaacgcggcggcggcacctggctgtgcgagccgcaggagccgtggtcagaacagcgcatcgttgagccgattcgccagctactggccgccgatcctgactaccgctgggatattcttgaggcgcgccacgcgattgaggccagcaccgcctggcacgccgcgcagcgcgccaccgaggcggataaagagcggctgcgctatgcctttgacgcgctgatacaaatgaacgactgcgacgatcccgaactggccgcgcaggcggatctgcgcttccacctcgccattgccgaagcctcgcataatctggtgctgctgca

SEQ ID NO: 3120 - DNA, 355 bp, Zea mays
  Peptide Sequence Number=SeqID_9370
  Probeset Number=SeqID_17523
aaaatcggctcccggctttgggtgcacaacatggaaagtgatctggcatatcgttcgccctaacaccaaaaatggtgtcattgacggtgttatgttggggatggggcgggcattaggggaaacgatgccggtgccttttattatcggcaacacttaccaggtggatagcttttcgctttatatgccgggaaacagtatcacttgtgcactggcaaacgaatttgcagaagctgagtggggcctgcatacctctgctctgatggagatggggctgatttaatttgtgatcacttttattgttctcgcgttgtcaaaactgatgattatgcgtctggccagaaatgaggggcgctaa

SEQ ID NO: 3121 - DNA, 752 bp, Zea mays
  Peptide Sequence Number=SeqID_9371
  Probeset Number=SeqID_17524
tgcaggactacagagggcgcgccggcggggccggagggctggctgacggtccatcgcgcgacgctgcacaacctgcgcgacgtcaccgtcggcattccgctcgcgcgcctcgtcgcggtgacgggcgtcagcggctcgggcaagtcgacgctcgcgcgcgacgtgctgatgacgaacctgctcgatgcggtcggccgctcggtgctgtcgtcgccggccacgcgccgcgcgcgcaaggccgcgcagcaggatgcgccggccgcgaaccgccgctcgagcgtgctcgcgcgcagcgcgccgcggccgtcgctcaacgccacgcatgcgtggcagggctgcgaatcgctgagcggctgggagcagatcgaccgcgtgctcgaagtcgaccagacgccgatcggcaagacgccgcgctcgtgcccggccacctatatcggcgtgtgggacacgatccgcaagctgtttgccgatacgctcgaagcgcgggcgcgcggctacacggcgtcgcgcttctcgttcaacaccggcgacgggcggtgcccggcctgcgaagggcaaggcgtgcgcaccatcgggatgagcttcctgcccgacgtgaaggtgccgtgcgacgtgtgccacgggcagcgcttcaacccggagacgctcgccgtcacgtggcgcggccggaacatcggcgacgtgctgacgatggagatcgacgaagcggtcgagttctttgcgccgatttcgaacatcgcgcatccgctgca

SEQ ID NO: 3122 - DNA, 395 bp, Zea mays
  Peptide Sequence Number=SeqID_9372
  Probeset Number=SeqID_17525
ctacccgatactacatcggcacaggcgctcctcgactagccctacccgctggacaggtgaccaaataatacatttttttcctcaactgctaagctggagtggccaggccaggatccctttctactgtgtggacaggcatgttcacgagctaacggtctcaggtggagaccatccgaccgtatctccgatttacctggctaaggtggcatgagcgctcacccccaacaatcccaatgtgtcagtggagagtgtgctcgtgcctatcggtgaaaagatcaaagctatggacgcgctgacgaagctgtttgtcaaggcagtcgagtaccggtaagtccgccggtgcacatttgtagcactgggtggaggtgtcatgggggacatgtgtggatctgcag

SEQ ID NO: 3123 - DNA, 711 bp, Zea mays
  misc_feature (23)..(23): n is a, c, g, or t
  Peptide Sequence Number=SeqID_9373
  Probeset Number=SeqID_17526
gcttgcatgcctgcaggatgagnaggcgtggcagcgctggcatctggatttgtctggtcgctatgaccgcatcgtgtcagagaatggcaatagtcgtcgtcaggacgatcacgtcagcggccgcgccgcgctgctgtacgcctttgataacggcgtgtcgccgtacgtcagctggagccaggcgattaccccggcttcgctgaccgatcccgacggaaatcagctaaaaccgaccacctcagaacagtatgaagccggggtgaaataccagccgaacggcacgcgcgatctctacagcgtggccctgtacgatctgacgcagaacgatgtggccaaccgtaacgtgcaggacggcacctacaccccgtccggcaaagtgcatgcgcagggcattgaactggaggcgcgcagccagctgaccgaacggttcagcaccattgccggttatacgctcaaccatctgcgctttaaggattccgtggacggcaacgatggccatacgccgtacgtcacgccaaatagcatggcgtcgctgtgggggcattatcagtttgattacggcctgagcgcgggtgccggggtacgctacattggccgccagtgggccgataacgaaaacaccacccgtttgccgtcggtgaccctgtttgacgcctcactgcgcgccgatctgggcgcgtggcagtcgaatctgaaaggtgcctggctgca

SEQ ID NO: 3124 - DNA, 1037 bp, Zea mays
  misc_feature (945)..(945): n is a, c, g, or t
  Peptide Sequence Number=SeqID_9374
  Probeset Number=SeqID_17527
aattcggcacgaggcctcgtgcggtcgactgtcgacgccttcttcgccctctccgtccggcttccgcctcagctgaactcatgcgctactttcccaggccgccacttcccaactagggttttcggattattaggtttctagaacctttcttcgccgccccccccccccccccagaccccatgcacgctccgccgctggtcgcgttcgcagggggcgcctgccccgcttccgctgcctcctcgctgtcgccctggttggcctcgctgcggcccgccatcgttgctgcgccggcgaggctgctatggttccgccgcggggcactccggctggaagccaaggccgcgtggagggctaccggagggggacggggcccgcgggtcccggccaagggcgctgtgctcgcctcctatatgggtgccgaggaggtggtgggacccttgtcgctgctcgacgaggaagagctcattttgcacataagaaaggaacgggataatggaaaacttcctgcagatgttgccattaacttggaggagctgtattataattacaggaatgcagtcctgcaaaatggtgatcctaatgcatatgagatcatgctttcaaatatgacagctttgtttgatcgtgttctactggatgtacagaatccatttacctttccaccgtatcacaaagctgtgcgggaaccatttgactattacatgtttcggtcagaactacattaggcctctggtagatttcaggaactcctatgttggcaacatttcccttttccatgacatggaagagaagccccaccagcgccacaatgttgtcctgatgtccaaccacccgaccgacgccgacccagcaattatcgcctcgctccttgaaaaaacccacccatggaccagtcaaaacaccgtttacgccgccggcgatccggccgttaccgatccactctgnaagccatttaccatcgcgaacaaatctcatttgtgtgtactcgacaaagcatatgaatgattctccacagctaattgagatcccgaggagat

SEQ ID NO: 3125 - DNA, 249 bp, Zea mays
  Peptide Sequence Number=SeqID_9375
  Probeset Number=SeqID_17528
atggagaagatcactgtctcactgggggatcgcagttaccccatcaccatcgctgccggactgtttaacgatccggcttctttttggccgctgaaagccggcgacaatgccatgctggtgacgaatcagacgctggcaccgatctatctggacaaactcgcgacgctgctgagcaacgccggggtgaaagtggatcaggtgattctgcccgacggtgagcagtacaaaacgctggcggtgatggacgag

SEQ ID NO: 3126 - DNA, 457 bp, Zea mays
  Peptide Sequence Number=SeqID_9376
  Probeset Number=SeqID_17529
gataggatcgagcttggcgcaagggcacccgacgctggtcctgctacagccggagatcggcctggacatcgacaagctccagatgttgccatcctttgaggcccagggcgcgtggctggtggaggcgtcgctggaggaccacgcaggcctcctcgccgccgttgacaactatcgcccaccgccacagcggccccatgacatgcacccatcgcctggccgacctcgatgcctccgtggcttcgctcctctacccgcccacggcccgcccacatacctccgcctacagtcgaccactgtctggctgtccactcaacgcctgaccttcgcctgcggccgttgcctggccacccgtacagccgcaggtcacagccccaccttcgaccgccagactccgcccctccacccggcgtcctctgccacagtgctcgaccaccccgcgccgtcacagcagcaacag

SEQ ID NO: 3127 - DNA, 691 bp, Zea mays
  Peptide Sequence Number=SeqID_9377
  Probeset Number=SeqID_17530
atggaacaggttttgacccgcgaacaacggcttagccgcctgcgcgcgcgcagttcgctgccggtgctgatcgtcggcggcggcatcaacggcatcagtacttttcgtgagctggcattacagggcattcctgcggtgctggtggagaaaggtgactggtgccaggcggccagcggcgcgctgtcgcgcatgatccacggcggcctgcgctatctggagaccggcgagtttggtctggtgaaggagtcggtgatggagcgcgatcgcctgctgaaaaacgccgcgcactatgtgtttccgctgcgcaccaccgtaccgatcgataatctcggcggtgggctggttaacgccacgcgacgtttcctgcgcctgagcgataagcccacccggcgcggcgcgctgctgatcaaaaccggcctgagcctgtacgacctctacacgcgacagtatggcgctatgccgcgccaccagctgcgtaacgaagccgccacgcgcgatcgctggcctggcttcgcaccctgggtgaaatacagcgccagctactacgatgcgtggatcagcgcgccggagcgactcgggtttgagctgattgaagatgcggaacgcgcctgcccggaggcgctggcgctcaattatctgcgggtggtcagcgccagcgacgagacggtgctgctggaagatacgctgagcg

SEQ ID NO: 3128 - DNA, 528 bp, Zea mays
  Peptide Sequence Number=SeqID_9378
  Probeset Number=SeqID_17531
tgcagccgccgcccgccgcgatgccggcagcgcgtgaggtgctgacggaatatgtgcgcaccagccagaaccggccgcaggtgctgccggcgcttggcatgatgctcggcgatatcggcgaacagattcgccagtacggttcggtagaaaatattccggcgcaggcggtcaccaacacgcgcaacgatatgtatctcgcctcggagaccatcaagcatctgcaatcggccaacgtcgcgctgccggaagagacggcgcgcaacctgacggcggtgaagcacgagctggacgcggctacgcgctttatcccgatgtgggtcaaagtggtggtggcgattgcgctgggtctcggcaccatggtcggctggcgccggattgtggttacggtgggtgagcgcatcggcaaaacccatctcacctatgcgcagggtgccagtgcggagctggtggcgatggccaccattggcgcagccgatgcctttggtttaccggtgtcgaccacccatgtgctgtcgtccggcgtggccg

SEQ ID NO: 3129 - DNA, 804 bp, Zea mays
  Peptide Sequence Number=SeqID_9379
  Probeset Number=SeqID_17532
tgcatgcctgcagcaggcgcaccttcaggtgcttttccagatactggacggcattgctgaccgtcggacgcggcaattgcagctgctcggcggctttcgtgaagctgccgagatgggcgacgcgcgcaaagatgcgcattgcatgcagatggtccatgcggggcgggtgcgggggcggattggaacagcctccattgttaatcagcgtcgaatgaattggttgggcgtttcgcgtttatcgcgcgccgcgatgcgtccagaatccggttcattcactcaccaccgcaaggacacggacatggacaagcgtcaactgggccgcacgggcccgcaggtttcggcgatcgggctcggctgcatggggatgtcggatctttacgggccggcggatcgcgacgagagcatcgcgacgctgcacgcggcgctcgacaacgggatcacgctgctcgatacgggcgacttctacgggatgggcgacaacgagatgctgatccgcgacgcgctgcgcggccgcacgcgcgaccaggtgctgatcagcgtgaagttcggcgcgctgcgcgatccggccggcgcgttcgccggctacgatgcgcggccgcaggcgatccgcaacttcgtcgcgtattcgctgaagcggctcggcaccgaccatatcgacatctaccggccggcgcgcgtcgacccggcggtgccgatcgaggacacggtcggcgcgctcgcggatctcgtgaaggccggatacgtgcgccatatcggactgtcggaagtcggcgccgacacgatccgccgcgcggcggccgtcgc

SEQ ID NO: 3130 - DNA, 261 bp, Zea mays
  Peptide Sequence Number=SeqID_9392
  Probeset Number=SeqID_17533
atgccgtcccgtatggccgtatcttaccgcgacggccaacggttgggcgataccacgcctgagcaggaggaggacgggccggcagaggcagggcgctggaatctgggaggaagcgtggagcagatgcatgcgcgcggccgcgggtactgcccaaaacgctcggagcatcaacgcggacgtgtcgaggagccgcggacacgcggggcacgggtgtcgtcgggtgctacgcgccgccgcgacgacgacgggatcacaccacgg

SEQ ID NO: 3131 - DNA, 277 bp, Zea mays
  Probeset Number=SeqID_17534
cttgttcgtcaaaaaggacctaacacgccgccgtttcctggccctctcgcccgtggagctcgagtgagatcccttcctcttggtccccttccgcagcccaccgccgcggcagccggctgccgcagcctttccgcccttggcgccagccaaaagctgagcctgccccgccgggagctggtgcttccgcctccagaacagagaaatcgggtccatatgcgggtgccgcggcggcagttctccctccccttcgctgcaggtcgatatagaggatcggggg

SEQ ID NO: 3132 - DNA, 420 bp, Zea mays
  Peptide Sequence Number=SeqID_9393
  Probeset Number=SeqID_17535
ctcaacctggtgtttaacggcatgagttccacgctcaacggcctgatccagacgcagcagggtaatctcaatctgggcggcaacgcggactggagccagctggataactggcgcgcgcgcgttactgcgcagggcagtcgtattcgcgttaccgttccgccgatggtgcggatggacgtttcgccggacctggcgtttgaagccacaccggcggcgttcaatcttgacggcaaggttgatattccgtgggcgcgcatcacggtgcaggaagtgccggagagcgctaccggcgtgtcgtcggatgaggtgatgctggacgagaacctcaagccgattcagccgaaaaccgccgcgatcccaatcaacagcaatctggtgatccacgtcggccacgatgtgcgtctctcggcctttggcctg

SEQ ID NO: 3133 - DNA, 568 bp, Zea mays
  Peptide Sequence Number=SeqID_9394
  Probeset Number=SeqID_17536
tgcagcaggcgccgctgaaggtacaggaccagctcgcgctcgccttctcgcagtcgggcaagagccccgatctcgtcaacacgatggccgcgctgcgcgaagccggcgcgcgcaccgtcgccgccgtgaacgtgctgccgtcgccgctcgccgatgcgtgcgagcaccagctgccgctgctggccggccccgaactgtcggtcgccgcgaccaagagctatatcgcgatgctgtcgctgtccgcgcagatcgtcgcgtactggcagcgcgacgccgcgctcgtgaccgcactgcgcggcctgccggacgtgctcgcgcaggccggccggctcgactggtccccggccgtcgacgcactggcgaacatcgagcggatgatcgtgatcggccgcggcctgggcctcgcgatcgcgcaggaagccgcgctgaagctgaaggaaacgtccggcatccaggccgaggcgttctcgagcgccgaggtccgtcacggcccgatggagctgatcgatcgcgactatccgctgctcgtgttcgcgccgccggggccggaacaggccgggctgctgca

SEQ ID NO: 3134 - DNA, 589 bp, Zea mays
  Peptide Sequence Number=SeqID_9395
  Probeset Number=SeqID_17537
gctactacgtgagcccggagaacccggcgcacacggtcggcgaaccggcctacggcgcgccgttcacgtccgcggtcgcgcgggacaacatcttcgcgacccaattccatccggagaaaagcgccgaggtcgggttgcgtctgtatcgcaacttcgtacactggaagcccgagacggcgcggcaccggtttggccggtacgcgcctgattcttttcattttccacgacgacacccgattgctatgctgctgattccggccatcgatctcaaagacggtcagtgtgtgcgcctcaaacagggcgatatggaccaggccacgattttctccgaggacccggcggcgatggcccgcaagtgggtcgatctcggcgcccggcggctgcatctggtcgacctgaacggcgcgttcgccggcaagccgaagaatctcgaggcgatcgaagcgatcctcgacgaagtcggcgacgaaatccccgtgcagctcggcggcggcatccgcagcctcgagacgatcgagaagtatctcgacgccggcctgtcttacgtgatcatcggcaccgccgccgtgaagaatccgggcttcctgca

SEQ ID NO: 3135 - DNA, 515 bp, Zea mays
  Peptide Sequence Number=SeqID_9396
  Probeset Number=SeqID_17538
ccgcagctgccgggcagcgcgtgggcgtggtgtgaaaccctgctggctgcgctgaccgccgacatccgcggtgacttcgcgctgggtgcggagcaacgtgccgccgcgctggcgcaggccgaagccaatccgggtcagctgcaacagcaggaacagacgacagacttcgcgtggctgatggacggcgacagccgcttcgggccggtgtgcgaagccatcgccaacggccgctattactggattccgttcgccgcgatccgcgagatggaatttcaggcacccgccagcgtgaccgatttggtctggcgccatacgcgcgtgcagctggtggatggcagcgagcagatttgccagatcccggtgcgctatccgctgctgccgggggcggatgagcgttatctgcgcgccagcgtcacggaatggcagccgctgggccacgatgacagccagtttaccggccatggccagaagctgtggctgagcgacagcggcgagtatccgctgctgacgctgca

SEQ ID NO: 3136 - DNA, 571 bp, Zea mays
  Peptide Sequence Number=SeqID_9397
  Probeset Number=SeqID_17539
cgcaagcattaacgcctttgccggttggctgaataatgggtgaccaccggagatacggagcgtgagtggaccatgattcaatcagtaccgatggtcctgttgactgacaataatgagttcgtgtgcgcacaactggcctaattatggcccctcgaagccattggggttatgcagcaggatccatggacggatagatgaactatttggaactctcccgccggttggtgaacaactaaaccgttatttcagtctcacggagacgaaagaataacttgcgcctcgggttgcagatctgtaagaggatcttgattacacgaagtctaagcttgtgactgtacgtggtttctcaacgaaattactgtgaaaacactgttgctccccacataaaagcccttggcatacattgtcaagtctgcagctgctaatgagtgaaataagtcacattaattcggccttgctaactgttgcgcatccagaatggagaacggcgcctgcagctgcattaattaattacgcatctctccgggataggacacctgatatatgtgcactctctttacattctgctctg

SEQ ID NO: 3137 - DNA, 284 bp, Zea mays
  Probeset Number=SeqID_17540
atgacgcgcggggacacgcccaggctcagggtgctcgaccagtgcatccgccagcacaaggcgctcacccaggccgccggcatgatggagagccacccgtggcgcccgcagcgcggactccccgagcgcgccgtcaccatcctccgggcgtggctcttcgagcacttcctgcacccgtatcctgtgatggtatgtatgtatggtatcttccagtccgcttaggtttccacagctagctaccattgttctttccggaccacggttttgtcttcttggccggtact

SEQ ID NO: 3138 - DNA, 594 bp, Zea mays
  Peptide Sequence Number=SeqID_9398
  Probeset Number=SeqID_17541
gtcaaccatgcattagtgatacggaaagtaagctggtactgggtacagtcgtggctctggatacgcgcatggtcacacttatgtttcccgccgcgggcgaatctcgcttatatgctcgtaatgattctccggtcaaccgcgttgtttttaataccggtgatgccgtcaccagccatcaagggtgtcagatgcaggttgattaagtccgcaatcaaaacgattaagtgacttacattggcaggtgtcttgatacatcagagagcaaagtggtgttgccagaagtgatgctgtccaccgtactggtgttcagcaagcaacaggattgcatgtttgccggcaagttggaccgcatggatcgttgtgccatgcgcttccgcgcacgcaaatgctagagcgctcagtatcgcttcccgatcaccggcctgtcgtgtatgcgcactagcgctgattcgtgaaccatcatgcacgtcgcacatgacgtcggtcgcagtcatgctccgcgcgtgtctgctgacccatcaagtcggcctgggtcagtccattgaagtcgggatgattattcagcagcatctcctggccgaacgcgtccagcgc

SEQ ID NO: 3139 - DNA, 339 bp, Zea mays
  Peptide Sequence Number=SeqID_9399
  Probeset Number=SeqID_17542
tgtgattctcacgaagagagcaagtgctctcttcgtgtttatcacacgtatagagtcgtagttggagcttgtcctgttagtgcatggggatccagcagaaaaagagggggctcgtgcttctcttgtccaggtcatacgcgatggtaggattagcggtttcctaagacttgtgctagcctagtagaaatattttgcgtagaccaagaaggcatgatagccctagtgtaggatcgatagcccataataggctagatcgggaggaaaccaactccctctatatctaggagcagcctctttcggaaaatgaacatctccgagttagatggcgcgtgctgtatg

SEQ ID NO: 3140 - DNA, 521 bp, Zea mays
  Probeset Number=SeqID_17543
tgcagcagctcgacagcggcatcttgcgcgccacgcggctggtcgatcagctgctgacgctgtcgcgggtcgaagcagacgatctgcgcagcgaatttcagccggtccccctcgcgccgttgctgcaccagctggtgaccgaacatcaggcacaggcggcaacgcagcacaccaggctgacgctgacggctgacgcggaaccggtgatgaacggtcatccactgctgctgggtttactgctgcgcaatctgctggataacgcgctgcgctacacgccgtccggcagtgagattcagctgcggctcagcgcgcgcaggctggagatcgcggataacggaccgggcgtcagcgcagagcagctggcgcggctgggcgaacgcttctggcgaccgccggggcaggcgcaaaccggcagcgggcttggcttgtcgattgtgaaaaatgtggctcagctgcacggcatccggctaaccttcagcgcggtgcagccgcaggggctgcgcgtcaccctcagctggtga

SEQ ID NO: 3141 - DNA, 226 bp, Zea mays
  Peptide Sequence Number=SeqID_9400
  Probeset Number=SeqID_17544
atggccaaataccagcagctggtagatcagctacgtacgcaaatcgaagcacgcatctggccgccgggtgaaaagctgccgtcgctgcgccagcaggcggagcagagcgggttgagcctgatgactgtgatgcacgcttacgaagtgctggagagccagggctggattgtgtcgaagccgcagtcgggctactacgtggcaccgcgcgcggcggagagccgtccgc

SEQ ID NO: 3142 - DNA, 582 bp, Zea mays
  Peptide Sequence Number=SeqID_9401
  Probeset Number=SeqID_17545
tgcatgcctgcagcttaatcgctgctgggatttctttacccccggcgtgccgtcagaattcaaagtgatggttgagcagcagattattccgcgtcttaaggcgcgttttacgttgccagaacccccgctgtgcctgcgtctgaccacctttggtcgcggcgagagcgatatcgccgccgagcttgaaccgctgccgctgccggaaggcgtagtgatgggctaccgttcgtcgatgcccatcattgagattaaactgaccggcccggccagccagcgcgtggcgatggagcaggtgtggcagcaggttaagttactgctggccgagtgcaccatttttgaaggctttgaaggattgccggccgtgctggcgcgggaactgcaagatcgcggcttccgccttgctctgagcgaacaatacacggccgggttgctgcactggcaactggccgccgcgcaggtgccgctcagtgccgccgagctgctgccggcacgtgaggagtcgctggaagcgcaggttacgcgtacgcgtcagttagccgctcagcagggtacggtgctggccttgtcggttggcgatctgca

SEQ ID NO: 3143 - DNA, 602 bp, Zea mays
  misc_feature (601)..(602): n is a, c, g, or t
  Peptide Sequence Number=SeqID_9402
  Probeset Number=SeqID_17546
tgcagccattttcctcttgttcccaaaccgatagctttgactcacaacagcaaataacagatcactcccgtctcccatccccttcctctccgagcaatcctctgccggacgtcacattggtaaactatatgtctccaataaagaaattggtagagggagcaatggcacagttgtttttgaaggatcgtatgatggtcgtcaagttgctgttaaacgtctgctgcgttcccacaatgacatagctgaaaaggagactcagaatcttattatatctgatcatgatccaaatattgttagactatatggttgtgactatgacagcgattttgtttatatctcccttgagaggtgtcactgcagtttggctgatctaattcaaaaacactcatatctgtcttctggagagtctgtttctaacaatgaggccagtttcagcatcaagtcaaagatttcaaatgttaagggaatggatgtggaattgtggacacatgatgggcttccttcagcacaactcctgaagctgatgaggtacatgaatgatctcatatgttttctgctgcttgtagttgtagttcatcgtcaactcacagtctcacactgnn

SEQ ID NO: 3144 - DNA, 609 bp, Zea mays
  Peptide Sequence Number=SeqID_9403
  Probeset Number=SeqID_17547
atgcaggaagcgctgttgcatgcgctcgactcgcagaacttcatgcggatcggcggcacgagctcgatcgcgagcgatttccggctgatcgcggccacgcgccgcccggcccgcgaggcggtcgccaacggcacgctgcgcgaggatctgtggctgcgcctcgatgcggcgtcgatcacgatgccgccgctgcgcgaacgcgacggcgacgcgctcgcgatcgcggatgcgctgatcgacgagctgaaccgcgaagcgcgcgcgaccggccgcagcacgaccgacaagcgcgcggcgcccggcttcgtgcgcgaatgcctgtcgtacgaatggcccggcaacgtgcgcgaactacaggagcgcgtgcgcttcgcgtacgatgcgtccggcgatttcatcgagacgctgcgcgcgggcgaagcgagcttcgcggccggcgccgcgctgaacggcagcagcgtgcagatcaaggtcggcaccccgctgtccgacgtcgaggacctgctgatccgcgcgacgctggacgcggtcggcggcacgcgccatcgcgcagcgacgctgctcggcatcagcccgaagacgctgtacaacaagctgcaggtcgactct

SEQ ID NO: 3145 - DNA, 358 bp, Zea mays
  Peptide Sequence Number=SeqID_9404
  Probeset Number=SeqID_17548
gcagctgtccggggcattaacgggatttgcccgtgccggcacggttattgtgataagcatcgtgatcacggcagtggttaatttcgtgcttatcacagaaaagccactgagcactttgccgggaagcgtttacggcctgctgctggtaataaagaccgctctgttttttctgatgttattgctggctgccgccaaccgcttccggcttgcaccaaagctggaaaatgccctgcttcagggccactataaggcgggtattgcactgatgcgtaaaagcattattacagaatttaccgtagcggtactgatactggcaattgttgcctggctgggcaccctgtcgccaggaaccggtatg

SEQ ID NO: 3146 - DNA, 450 bp, Zea mays
  Peptide Sequence Number=SeqID_9405
  Probeset Number=SeqID_17549
atgattgaacgtatctggagcggacgctcgccgctgtggctgctgttgtggccgctgagtctgctgtatggcgctatcacctggctgattcgcctgagctatcagcgcggctggcgtacccgctggcgcgcgccctgtccggtcattgtcgttggcaacctgaccgcaggcggcaacggtaaaacaccgctggtgatttggctggtgcaggcgctgcaacagcaggggctgcgtccgggtgtggtgtcgcgcggttacgccggtaaggcggaacgctatccgctgctggtcaatcaggatagcgcgacggaacaggctggtgatgaaccggtgcctgatcgcccagcgcactcaggtgccggtggcagtggcaccgcagcgccggcaggcaattgaggccctactagcggcgcatccgctggatgtgattgtgacggatgatggcctgca

SEQ ID NO: 3147 - DNA, 425 bp, Zea mays
  Peptide Sequence Number=SeqID_9406
  Probeset Number=SeqID_17550
tcacttctgacgcacagtgattgcgcgggtaccgtgctgtgatagtcttcgcctgatgcaattaatcaggtgtatgtgatgaaaaccaggccgccacgagccacaatcagtgacgttgcccgcacggcaaaaaccggtaaaaccagcgtttcccgctatctgaatggcgaagttcatctgctttcgccggatctgaaagcccgtatcgaacaggcgattgccgacctcaactaccgccccagccagatggcgcgcggactcaaacgcggccgcacccggctgataggcctgatcattgccgatatcaccaacccctactcggtggatgtgctgagcggcattgaagccgcctgccgcgcgcgcggcttcacgctgctgatgtgtaataccaacaacgaaatggatctcgaacagccctacctgca

SEQ ID NO: 3148 - DNA, 454 bp, Zea mays
  Peptide Sequence Number=SeqID_9407
  Probeset Number=SeqID_17551
tcagattttggaggttgcagcggcgtcgggggaggggacgggcgaggcagcggcgtcggcaagccgcggcggaggacgggacgggcgcggcggggtcggcagcggcggcgtaggcgcgtgcggcgctcgggcgcggcggggtcggcgcacggcggcggcggcgcaggcgcgggcggcgctcgggcgcggggcggggtcggcggtcggcggcggcgcaagcggggttggcggtcggcggcggcgcaggcgcggacggcgatcggcggcggcgcgggatcggcggcggcaggcgagtggccggcgcgtgatcggcggctgcgcgggaacgcgatggacaaaggcctgggcgagtggccagcgcgtgtttagcctggcccgccctaaaccccgtcggccataacgaagccgacgggagataatgtagctcccgtcggcctccggactaaccgacggg

SEQ ID NO: 3149 - DNA, 203 bp, Zea mays
  Probeset Number=SeqID_17552
aaatatactgatgcacgcggttaccgattttatagagccacctcactgatgttatggctggaattcttgccgtgaagggcgagagttgggctgaagaggtagggctgctgcacaatgcttaatggtacgttctggcaccttttgactgctggctctgctttaggggaatcataactgtggatgcgtgggtggtgaaacaaccg

SEQ ID NO: 3150 - DNA, 383 bp, Zea mays
  Peptide Sequence Number=SeqID_9408
  Probeset Number=SeqID_17553
tgcagcccgctcgagcccgccaggatggccccaccacgccgccattagcaaccgcatcctggctctgcaagctgtcgcaatcgcaacccaccgcgtccaagatgaagttcatcgccgcgtacctgatggcgtgcctgggcgcggacgccgccagcccgccactatagagggggtggccccggccgccgcgctcccgaccaaggacgacgtgtgccacatcctgtgctccgtcggcaccgaggtggagtgggaccgcctcgatctgctcttcgagctcctggaggggaaggacatcgccgagctgatcgccacggggcagggagcagctcgcctacgcgccgtctggagccgctgctgccgtggtcgccgctgctgccgctgca

SEQ ID NO: 3151 - DNA, 421 bp, Zea mays
  Peptide Sequence Number=SeqID_9409
  Probeset Number=SeqID_17554
tgcagctttatcacacccgctatctgcgcccggtcagcgaccatctggtggcgtcggttaagaaagtctatgcgccggcgtaaaatggtgaaagcaccgcgggtgttcaacttcttcctgaaacagccgtggatgcgcgacctcagccagcgccacatcggcatggtggatctgccgctgctctcctcgcccagcctgaagcagcagctgagcggccacccggcgatgcgggtcacgctggagcaactgcaggcgatggatgcggcccagcgcgaacagcacgtgctggtggtgcaggatccgtttaccaggtattacgaagcgcagctggtgaccgatttcatccggctgattgaaaaactcggctaccggccggtgcaactgccgttctcacctaacgggaaagcgcagcacgtgaaag

SEQ ID NO: 3152 - DNA, 483 bp, Zea mays
  Peptide Sequence Number=SeqID_9410
  Probeset Number=SeqID_17555
gcagctgtagatacccgcaccggtgagcgggttgctatcaagaagatcaacgatgtggttgagcatgtctcggacgccacacgcattctgggggagatccagcttcttcaggtggttcgatcacccaaccttattggaaataaagacaatgatgttccttcattttcgaagggagtgccagaattttattgtggttttggagctcatggagtttgatctccatcaagtgatcaaggccaaggatgacctcacccctgaacatcaccagtttttcctgtaccaacttcttcgtgctctcaagtacatccatgctgctaatgtatttcatcgtgacctaaagcccaagaatatactggctaactcggactgcaaactgaaaatatgtgactttggtcttgcccgtgcatcatttaatgatgccccttcagctatattttggacagattatgtggcaacgaggtggtaccgggcaccctgactatg

SEQ ID NO: 3153 - DNA, 231 bp, Zea mays
  Peptide Sequence Number=SeqID_9411
  Probeset Number=SeqID_17556
cgcctgtgacaacctcaccggcaacaaaatcaaagtggcgatcaataccggaccggatgaggcgctgtggcagaccgtgaagcaggtggcacacgataaatatcagctgcatgttgatgtggtggcgtttaacgattacgtgcagccgaacaaagcgctgttcaataaagatgtggacgccaacgcgttccagagcctgccttatctggagatgcagtccaaagagcgcgg

SEQ ID NO: 3154 - DNA, 669 bp, Zea mays
  Peptide Sequence Number=SeqID_9412
  Probeset Number=SeqID_17557
ctggtggatggccagctatattatcagtcggatatatgtagtgtagtactgaacagtgtggcttatcatgcatgcagttcgtgatctggatcgtcataccgaggctgaatgagtctccgacgaggaagaggaagagcagagcatcctccggttcagcatcatcttccagtacctcccgcggctgttccagatcttcccgctctccacgcggatcgtcatggcgatgggggtcatgacggagacggcatgggccggcgccgcgtacaacctgatcctctacatgctcgcaagccacgtgctgggagcgctgtggtatctcctgtcggtggagaggcaggaggcgtgctggagggaggcgtgcctgctcgagagccccagaccatgttcttcgattgcaaggcgttgagcagcaacagaacgatctagtatgagatgagcaacatcacaaacctgtgcactcccagcaacgagttctacccgttcggtatctacgaggaggcggagcaggccaagctcacgtcgtcgtccttcacgtcacgcgcaagtacttctactgcttctggtggggactcaagagcctcaggtgtgccgtgtgctgcatgcaggaactggcatcttaagctcagctcaatttacttctaactcgcgtttcactcgacataatggaca

SEQ ID NO: 3155 - DNA, 437 bp, Zea mays
  Peptide Sequence Number=SeqID_9413
  Probeset Number=SeqID_17558
atggcaacagcgtccccgcctgggaagggcgaaatcacttctttgaggcttggctgtcgcagggtgacctgcttctcaaaaaccgcctggcgttcgccttccttgacaacccggcagctcccaccgacatttcgtccttcatcgacgccgctctcgggtctgcgtgtcccggcatccgcgtcgaactcctcccatcttctaggggggtcaaactcctgcggttcgccaacaactcagaccgggagcggctgcgggcgctcagccccatcagttttggggggttgtccctctccctggagcgcccggaggagacctctaacagattcatccgcactcccgagtggttggccctggtggcccttactgacttccctccggagcagtggtccgacgcctctatcaaaagctgcttcgcgtcgggagctgcagttatgtag

SEQ ID NO: 3156 - DNA, 401 bp, Zea mays
  Peptide Sequence Number=SeqID_9414
  Probeset Number=SeqID_17559
atcgcaccgcggcccgtgccgggcgtgtagcggtcacgggcgaggtgtgcgttcccccgtgccgtgccgtgccgttgcgctgtgctgaacctgaactcgacgtgacgggacgctacgccattttggtcccgagccgcgcgggcgcggcccgcggctccgtgtccgccggtgtctcccatgccgtccgtggcgggcgcggtcgtgagtggtgtgtgcccccccggttgcggtccttcccgaccttccgtggcgatccaacgtgggtgcgacagcatgctgagaacgcgcggaagctacgcttgataaggagggaacgtggactggggccgaacgctgcaaggaaagaagattcgcggccgtggcatcagcctggagcacctccgtcgcaggctggactctaa

SEQ ID NO: 3157 - DNA, 341 bp, Zea mays
  Probeset Number=SeqID_17560
tgcaggcgaacgtggcgtttgtcggcattggcgaagtgatgccgggctgcccgctcaatgccgaaggctttatcaccgatgcgcaggtagaagcgctcaacgcgcgcggcgtggtgggtgaaatgctggggcattttttcaatcagcagggagagcgggtgtacggcgaaaccgacgagctgctgaccagcgtgctgctggagagccagacgcagcgcaatatcatcggctttgccggcagcgcgcgaaaatacgcagcgattcacgccgcgctgcacggcggctggatctccgggctggtgacggatgaagacaccgcgctgaaactgctgaatgattaa

SEQ ID NO: 3158 - DNA, 296 bp, Zea mays
  Peptide Sequence Number=SeqID_9415
  Probeset Number=SeqID_17561
atgcatttccccctgatccttgtctcacccgctcgcccggagaatatcggcgcggctgcccgcgccatgaaaaccatgggatttagcgagttgcgtattgtcgccagtgacgcctggcaggatccggccgcgcggcgagtggcccacggcgccggtgagattcttgaccatgtgaaaacctatgacacgctgagcgctgcgctggcggatgtcgatttttccgtggccactaccgcccgcagccgggcgaagtttcgctattacgccacgccggcgcaggtcgaaaccatcctgca

SEQ ID NO: 3159 - DNA, 289 bp, Zea mays
  Peptide Sequence Number=SeqID_9416
  Probeset Number=SeqID_17562
ctactgggaaagctgctgaatttggtcagctgaaagatggttatatgtttgacacatcaactggcatgtcaagaatgttgttaagtacgccaacatgtccagttctggaggcccttgggaaaaaaaactgtcgtttgagattgctgttggaatcaatggtcgagtctgggtgaatgctcctgcggcaagtactgtcattcttgtatcaaatgcaattatgaggtcagaatctttgagtggcataaaacaaagagctatggtagaaaatctcttggagagatagtcatga

SEQ ID NO: 3160 - DNA, 255 bp, Zea mays
  Peptide Sequence Number=SeqID_9417
  Probeset Number=SeqID_17563
atgaatctacagaaatggaagcatctgcgccagcagcaaagccgtgttcattcggttcggttcggttcattcagaagaaagagctcggccgtgacgcgaagggtacgggcatggaacaagaggaaaacaccggcatgcacgccttttcagttaatcaggcgatcgaggcgcgccgagagatctcttttgcgcacggcacgctcgcggcgacccccgacgaaagcgagtgccgccgccgtggccccgacgacgcgt

SEQ ID NO: 3161 - DNA, 677 bp, Zea mays
  Probeset Number=SeqID_17564
atgtcaaccgactgttccacgctgatcggcatcgcggcgacccaagccagcggactgcgcgcccagtttggttcagcggtgaagccgctgcatgccggactggcggcagagcgtgcagtgatggcggcgcagctgacgctggcgaaattcgatggccggcatgaaggcgtgatcgacgcgtttctcgccgccagcagtaacggcgaggcgcagccgcatcggctggtggaaaactggggcgcgccgtggcgcatcagtacccccggtctggagttcaaacccttccccacctgcgccgggactcacagcgctgccgaagcggcacgtctgctgcggcgcgcctggctggcagaaggtcactcgctggactcgctgctggaaaatattgatgacatcacggtcgccttcccgcctggtggtgacatcgcggcggcagttcgcgtgccggctaacggcatcgaagcacgctttagcctggagtacgtgattgccgccatgctgatgtacgataatttacggctggaagattttgccgaaggcgcgctcaatccggcggtgatgccgctggcggccaaagtgcgtcgcacgccggatgcgtccgcgccgcccgatgcgctcaacccggcgcggcgttttcatctcgtcacgctgacgctgaaagagggtcgtcagctgca

SEQ ID NO: 3162 - DNA, 374 bp, Zea mays
  Peptide Sequence Number=SeqID_9418
  Probeset Number=SeqID_17565
atccccttggaccagacggacaagcagtctcctcccagcggaagcacgcacggacatacaacagaccagacctttattcactatgaccaggtggcaccggtaccaaacgagagcaccgaaccaagatcgaagcctgagcccgcgacaatagagaccgcgcacaagaccacaacaacgacccggaagccaaatgaaggccaggcgcccaagaggcccacaacaaaatgcaagcccccagccaagtcacccgacacccggagccacaccgttcggaacggccacccagaggggacccgcaacggcgccagcggacaacacaccgacccagacaaccatccgcaaacagcggtccgacgacaacgcgaaaccgaagc

SEQ ID NO: 3163 - DNA, 382 bp, Zea mays
  Probeset Number=SeqID_17566
ccgcacgctggacaacctcgatccgctaaaaaccccgctcacggtctcggaagtgggccgcgccgacccggacgtggtgaagagcatgttttatcccgccaaccgcgatgcgctgctgcaaaaaggcggctccagcgacaaagtccggcatttccgtgacgaccaactcaacaagcttttggtggcaatctcggccgaagtcgatccggcgaaacgtctggcgctcaccggtgacgcccagcgttatctgctggatcaggcttatgtgatcccgatctttgaagagccgcaggtgtttgccggcgcgccgtggctgaagggcgtgagttttgaagccgtaggccggccgtcgttctacggcgcatggctggaaaaacattga

SEQ ID NO: 3164 - DNA, 341 bp, Zea mays
  Peptide Sequence Number=SeqID_9419
  Probeset Number=SeqID_17567
tggtttactgctttggcctttgctggactgctgctttactgttacggccgacgggcgactggggtccggcggttcggcttgcgggcggcgggttcggggttcaggcttcaaccgctttaggcgaacaaccgaacaagaacaagttaagttcggccgttcggcctggttctgggcgggcggaagctggccccgtgggccggttccgtgggccttcaaactggttctgggcgctgggcgggcggacaaacggtgggccggttccgtgggccgttgttgttcccgccttcccggtgttccggtgggtccgtggccgggggccctggcggctggttttccttaag

SEQ ID NO: 3165 - DNA, 1055 bp, Zea mays
  misc_feature (1)..(19): n is a, c, g, or t
  misc_feature (1038)..(1038): n is a, c, g, or t
  misc_feature (1055)..(1055): n is a, c, g, or t
  Probeset Number=SeqID_17568
nnnnnnnnnnnnnnnnnnngtttccgtggcccgggccaggtatcggcgatgccctcggcgacgtcgaaatctactccgcggccaccggcgagcccgtcctgttcagagacctgtgggaccaggacgagggagtgtctgttgttgcgctgctaaggcatttcgggtgcccatgctgctgggagttggcctctgttctgagggacacaaaggagagattcgattctgctggagtaaaactgattgctgttggtgttggcactccagctaaagcccgtattcttgccgagcgcttgccctttccgttggaatacctctatgctgatcctgatcggaaggcgtataatctcttgggtctatattttggtgttggtcgcacgttcttcaatccggccagtgcgaaagtgttttcacggtttgactcccttaaggaggcggtgaagaattatacaatcgaagccaccccagatgacagggcaggtgtcctacaacaggggggaatgtttgtgttcaaaggtaaagagctgttgtacgcaaggaaagacgagggcacaggcgaccatgcacctttggatgacgtgctcaatgtctgctgcaaagttcctgtaacctaacccgacggctcgtcccacagctcagtagtaggtacttggaaagcactttcggcgtccttgattcctgaacttccaggatcgcctgctgcaagagtgtcttctccaccaatgtgccaagcttcatgtatattttgttttgagatgcttggtttactttgatatcttgttggtgatggatcgtgagttgttggcttgttgcattgtgaattgcgtactgtaagtatcccatttgctgtttagcactttttccattcgaaagcaaagttcgaagtcctggctgcctggctcttccttggagatggaagttttagcacttcctgaaatatcgggaacataaagtccatgtgatcttttgtgcctttaaaattttggatcgttggtcctaatggaaatctgttcgatttttaaaaaaaaaaaaaaaagcggnccctcgagctcagcttn

SEQ ID NO: 3166 - DNA, 549 bp, Zea mays
  Peptide Sequence Number=SeqID_9420
  Probeset Number=SeqID_17569
tgcagggctcactgccaccgtgcatcggcgacatctcttttgggcgtgcaccgtacgacgcgcaagctctcttctcggtctacgacgatgtggagctgctgccagtacagcatcgtccagagcttcacgttctctactaaggggagcgttcgtgtgtacagttcaggctttctcgatctcatgtttggcatcgacctgtctgcgaacatgctctccggagaaattccgtttcagatggggaatttgagcagcgtcaagtcgctcagcctatccaacaatttcttcacgggacagattccagccacctttgcaggcatgcgtgcgattgaaagcctggacctgtcccacaatggtttgagtggacagataccatgcgagttgactaagctatggtcgctggaggtgttctcggtggcatacaacaacttgtcaggatgcatgccatggtcaggtcagttcagcacgttcagcacggacagttacgttggcaacgtcaaccttcacagtacgtgcgtatccgattccagcccgataaaggaggaagctgca

SEQ ID NO: 3167 - DNA, 229 bp, Zea mays
  Peptide Sequence Number=SeqID_9421
  Probeset Number=SeqID_17570
accggaaatgtgacacgcagtgacgtcgccaaagccgccggaacctcggtggcggtggtcagctatgtgatcaacaacggaccgcgtccggtggccgaagccacgggtcagcgcgtgctggccgccatccagcaaaccggctattggccgaattcggtggcgaaagcacttgccttcggcagttcccaaacctttggcctggtcgtgccggatattggcaaaccgtttg

SEQ ID NO: 3168 - DNA, 259 bp, Zea mays
  Peptide Sequence Number=SeqID_9422
  Probeset Number=SeqID_17571
tattgttgaaaaggttactcagcgtccagtcgagagcttggtgtgccttgacaccaaggctattttgtgccattgttccccaaggcgagctagggcctggaccggaaagcacaacgacccgatgaccaggcactgtgcttccgcaaccgccgctgccatccacaccaacctccagagcaacggaggactgctatcgacgttcgaggcgatgcaggacatggccagggatgggcagatcgtgttcgtatgcatctcccag

SEQ ID NO: 3169 - DNA, 397 bp, Zea mays
  Probeset Number=SeqID_17572
tgcaggccgaactgacgctgcgtcagggcaacgatgagcgcacggtgatcatcaccgccatcggcgaccagcggcgtccggccagcgaagcgcagcagatgtacgcggagacggccgccagcatcgaaaagcgcgaaaagaacgcgctggctcgcaaaatgaatgccctgaccatgccgcatcccgatcgtcgcccggataaaaaagagcgccgcgatctgtttgaaaacgtcgccttgcgcggcgagctggtcaacgcatctcaaacctggcgcgacatcgtgcagaaccacgactacgccgagccggtcaaaaccctgctgggcgaactgctggtcgccaccagcctgctcaccgctacgctgaaatttgacggcgacatcaccgtgcagctgca

SEQ ID NO: 3170 - DNA, 203 bp, Zea mays
  Peptide Sequence Number=SeqID_9423
  Probeset Number=SeqID_17573
gcactggccgttcttctccttctgatgtgcaactttggtacgctgatgaccggtacacttgactggaaaggcataccttcatacgcgaacaatatgatgcggtgcttgagcaccattgttttgatcggcagctaccctggtgtacccgctcgtgcactcgcgggtgatcactctccataccgtgctgtggtccatctggatgc

SEQ ID NO: 3171 - DNA, 267 bp, Zea mays
  Peptide Sequence Number=SeqID_9424
  Probeset Number=SeqID_17574
aggctgtttccaaagcattccaaggaggattacaaaagaactgttcagaaggctcttctaaatgttgttcctttcaccccaagtgctggtgttgttgaatgggtaaacggtactgttccactaggcgattatctaattgggagtactagaagtggtggagcacatggacgatatggaattggggactggacatatcttcaatgcagagagtacctgatgagtgaaaaggacaaaaggagggcatttcttaaaatctgcaggcatgca

SEQ ID NO: 3172 - DNA, 477 bp, Zea mays
  Peptide Sequence Number=SeqID_9425
  Probeset Number=SeqID_17575
gcactcgtcggggccaggccatgcactcctccatcgggctggcggctcactctcgtcagtagtactgaccttctggaactcctacctggctgggcccaccgactccccctcccctccactgaccatgtggcgactggcgagacatcagacatggcatccccgccgctcaaacgcccagggcccccccacccgcgcctcctccttccttccccacctcctcctaccaccctcgccgaggccgcgccacacaaaagcagtcacgccgtctgacagccataaaaaacacgacgccatgcaggagcacattcctcaccccagggaggcacaaggacccaccgtcgcccaaccggctctggcggtcgtcacgcccggccacgacgctctagctcccgtagcccagctgctgtcgtcctcgggcgatgatgagtcgtccgacgacgagggggagctcgagctggaggtcgacttcgagttccc

SEQ ID NO: 3173 - DNA, 427 bp, Zea mays
  Probeset Number=SeqID_17576
atcctttaaagtcgacctgcagagttgctgccgccgggctacttccattgcaagcataaactccgttattgctgtgcttggtggggcaacgagccttctgagcaatgagtatcaggaggcactacagtggaggatgcgggagccaaatttgggcgcaaagctcttccttggtggtgttggggtgcagaagactggtgaggagattgcaactgcacttaacaacattgacattagctccgagtatgttctgaagctccgccatgagattgaggagctctgtgtagagtatggacatggttatcacagtgccacggcgaagcgagtcgccagctggacgcctaggcgcccatttgctgaagaagaggggctgctgcaacaactttcatgcaggaggaaacttcacagggtctccatgtatgcagacgat

SEQ ID NO: 3174 - DNA, 284 bp, Zea mays
  Peptide Sequence Number=SeqID_9426
  Probeset Number=SeqID_17577
caatatcatgcaataaatctctgagcgagttgacggaccagaccgggaccaggagaggagggatatcggatttcctctttagtgtgcagcagagccatccgtgacaacagattcggggaagaaggggccagagaggatgggaattccactggaccaaatccggagggcactgatgcgaacgcgggccaatgatccagtcaaggtgcaagaactcatggacagtatccgtgtcatcggcctccaagtacctattgatgtgttggaggtcgatggggtctattatg

SEQ ID NO: 3175 - DNA, 735 bp, Zea mays
  Peptide Sequence Number=SeqID_9427
  Probeset Number=SeqID_17578
atgtctgacttaacttcttcggcgcacgtggcgctggcagggaatacgccgcagggcgagacgcagtggattcgcagtgcagccgacgtgacgcggctggtcaacaacagtaacgcctcgcgcagcaatgcacgcatcgtcatcgccattgcgctgggcggggtttttctcgatgcctacgatctcggtgcgctggccttcggtattaaagatgtcacgcgcgagttcaatctgacgcccgccggcaccggcatggtggcgtcggctatcacctttggcgcgattgttggcgcgctgatcggtggctatctcaccgataaaattggccgctatcgggtcttcatggccgatatgttcttcttcgtggtagcggcactggcctgtgcctttgcgccgaacgagtacgtgctggcggcggcgcgctttgtgatggggctcggcgtcggcatcgatcttccggtggcgatggcgtttctggcggagttctcccgactgcgcggtcagggcaataaggccgccagtgtcgcgatgtggtgtcccacctggtacgcggcgatcagcatctcctatttgctggtgctgctgctgtatgcggtgctgccagagagccatactgactggctgtggcggctgatcctcggctttggcgcggtaccggcgctgttgatcatcgccatccgcagtcgttacatgagcgaatcaccgatctgggcagcaaatcagggcaacctgcag

SEQ ID NO: 3176 - DNA, 777 bp, Zea mays
  Peptide Sequence Number=SeqID_9428
  Probeset Number=SeqID_17579
ctgcaccttctcaaggctaatcaaaagtattctagagccagatgggtcgcaacattttcacctatgtcgacaaggtagtcatcgcaagcaagaataaagaagaccatctctgagacctcgcagaaaacgccaacatgcacgaagctagactccgcttaaaccctgaaaagtgcatatttggtgtccagcaaggcaagatacttggctatctagtagcccactaaggcatagaagcaaacccaactaagatacaagccataatggacatggctccaccgcagtcgacccgatatgtccaacgattgacaagaagactcgcagcgttgaatagatttatctcacggtctgccgagtggagtctacctttcctaaaaatgctgcgcggagctaaggacttcgcctggggccctgagcaggctacaacctttgaatcactaaagtagtacttgctgaactcgcaactctgactatcccaaaccccgcactacccctcctgctttacgttgtagcatcgcccagcgtggtcagcgcagcactggtacaagaagggtgtaaaaatggcaggccccagtagtgcccgatctacttcatctccgaggtcctcaccagttccaagtgcaacatgacaggactagaaaagatagcctacggagtcgtcatggcttcacacaaactcaggcattacttcgaggcacccaaaataagaatcaccaccgtctgagatctaggcaatctattcaataatcaaaagataaagggaaaaggaggaaaggcgtt

SEQ ID NO: 3177 - DNA, 577 bp, Zea mays
  Peptide Sequence Number=SeqID_9429
  Probeset Number=SeqID_17580
tgcagcagcacacggtcacactcaacactacgacaatcaatcgaaaatctgtccttttgtttcgatttttttggaggggacaaattgttggcgattgctcggtgctcatttggatccagatctcctgtcccttccctgtataaacaattcatggggtctccccctctacaattccacgttcccaacattgcgagaggcgccacctcagtacctcacaaagccagccatccaccgcattgccgccccctctcctctcctcacgacctcacgtcacccgcccgcctcagcctcgccaccgaggcgcgcgctgccaatgctgccacggtcccgtgacgcggcaccgaggctcgcgtttctcgagccgctcgcctgcgcgttgctgctcctgctggtgtcgccgtgccactgcgtcaacgagcagggccaggcgctgctgcgatggaaagacagtctgcggccggcgagcggtgcgctggcgtcgtggcgctccgcggacgcgaacccgtgctggtggaccggcgtgtcgtgcaacgcgcgcggcgacgtcgtcggactgagcatcacctcggtcgacctg

SEQ ID NO: 3178 - DNA, 466 bp, Zea mays
  Peptide Sequence Number=SeqID_9430
  Probeset Number=SeqID_17581
tgcagggcgcggccattggcggcgaggtgccgggcgcgtgggtgtttgttgcggagcatgtgccggagaagcgcatcggttttgcctgcggcacgctgactgctggcttaaccgccggcattctgctcggttcgctggtggcgacggtgctgaatacttcgctctcgccggcggcgatacgcgatcacggctggcgcattcctttcttcctcggcggcctgtttggcctgctggcgatgtatctgcgtcgctggctgcatgaaaccccggtgttccgccagatgcagcagcgcaaagcgctggcggaaaagctgccgctacagaccattctcgccagccataagcgcggcattgcggtgtcgatgctgcttacctggctattatcagcctgtattgtggtggtgattctgatggcgccgacgctgatgcagaagcagcatggcgtgccggcggcgctcagtctgca

SEQ ID NO: 3179 - DNA, 366 bp, Zea mays
  Peptide Sequence Number=SeqID_9431
  Probeset Number=SeqID_17582
ttgcatgcctgcagaatcgcccgccgaattcttcgctgagaacaagaacattgccgggtttgacaatcctggtaaatccctgtacaccacgttgcgggagctagttgagaatgcccttgattccgccgaatccatatcggagctccctgaaatagagattacaatagaagagatcacgaagaccaagttcaacacaatgattgggctagtggatcgacagcgtgttgacgaggcactatatgatgattttgagtcagaaaaggctcgtgaggtaagatgagcacctaggtttgtagtagtttgaccatggatgatgtgttgagaggggtgagacttcacaaacttacctctttgtattatcataat

SEQ ID NO: 3180 - DNA, 585 bp, Zea mays
  Peptide Sequence Number=SeqID_9432
  Probeset Number=SeqID_17583
ttatccccaccgctgtcctttttccttatccggtctgaagctgttggatattttacgtgcccatctcctttgtccgacgtcgcggcttactgctccctgcgcgtccccagccccagctcgcccatgccgcgctcctccaagccggagcttcctctgctcggccgtggccgccgccgtttccctcgttctcatccgctcggccatccttgatacaaatccagccgccgcccttcgtccgtggatttttccggccgcccacgatatttcccagcgcttgagctcatcctcttcttcagatcctgcacgccgtgcttcttctggcggtgcgctctccctgctccatctccctccgcgccgcgcgcccaggtgcctgctcgctgcctgcttgccccggcccccctgcgtccagccgagtggctcccccacgcgtgcctctctttcccccagccccctcgtctccatggccgctcgtcctagctgcgaccctgtcgcgaagctcctgcgcacccgccttcttttccctctgccgagctcccttattggccgacgcccagcctcttcccaaaccgcctcatctccggccat

SEQ ID NO: 3181 - DNA, 233 bp, Zea mays
  Probeset Number=SeqID_17584
atggctccgcttttcttcctcctggctggcctgcttggggcgctgggttcttccaaaatcgccgtcggtcgttgggaggagcgcccgactctctctctctctcgtcctgtgtgtggtctcccggccttgcggcgcgcttccgccaagcggtgtgggccgcgggtgcgggagctcggcctgcagggctcggactgtgctgctttaggttggagcgacgggtttccggagagtga

SEQ ID NO: 3182 - DNA, 532 bp, Zea mays
  Peptide Sequence Number=SeqID_9433
  Probeset Number=SeqID_17585
gcaaaaaggtgaaacggcgccagctcaagccggcggaacgccagcagcagatggcgcgcatcagcggcggcactgattatcagggcttccgccagcgcgatctggtgatcgaagcggtgtttgaggatctggcgctcaagcagcaaatggtggccgagatggaagaacactgtcagccgcacaccatctttgcgtctaacacctcctcactgccgattgcgcagatcgccgccggcgcgcagcgcccggagaatgttatcggcctgcacttcttcagcccggtagacaagatgccgctggtcgaggtgattccacatagcggcacttcagcacagacgctggccaccacggtggatctggcgcgtcgtcagggcaaaaccgccgtggtggtcgccgaccgtcccggcttttatgttaaccgcattctcgcgccctatataaatgaagccatgcgctgtctgctggagggcgagcccattgaacacattgatagcgcactggtgaaatttggtttcccggtcggcccgctgca

SEQ ID NO: 3183 - DNA, 331 bp, Zea mays
  Peptide Sequence Number=SeqID_9434
  Probeset Number=SeqID_17586
gtgaacattaacgtcgcagaattgttaagcggaaatgacgttctgttattatttgtcgtattagccctcggcctgtgcctgggtaaattacgccttggctccgtacaactcggtaattctattggtgtgctggtggtttcgctgattctgggtcagcaacacttcgcgataaatactgacgccttaagtctgggctttatgctgtttattttttgtgtcggggtggaagccggtcccaactttttctccatctttttccgcgacggtaagaactatttctttctggcgatcgtcatggtggtcagcgccctgctgattgcgctgacgctcg

SEQ ID NO: 3184 - DNA, 308 bp, Zea mays
  Peptide Sequence Number=SeqID_9435
  Probeset Number=SeqID_17587
ctgcatcccgccgtccggccacaatcgcagccaggtgaactatggcgaacataacctgtatcatgctcgcacggcgctggagcgcctgtacgccgggctgcgccataccaaagccagcgcaaccccggctggcggtgaggcgtatgaagcccgctaccgaaccgggatggacgaagatttcaacacggcggaagctaactaggtgtggttagatatggcgcacgaagtaaagcgtgtcaacggtgaacataaaagcgtcgtcgatgcgctggccgcaaaactgcattagctggacgaggtgccgggca

SEQ ID NO: 3185 - DNA, 516 bp, Zea mays
  Peptide Sequence Number=SeqID_9436
  Probeset Number=SeqID_17588
tgcatgcctgcagcgtaacgtcaccgccattgcgctgacgctgtcgaaacgcggcgagacctggctgttcgactgtggtgaagcgacgcagcatcagtttatgcgatcggcgcttaagcccggcaagctggaaaaaatctttattactcatttgcatggcgatcacatctttggcctgccgggtctgctcaccagccgttcgatggcgggcctgaccgagccgatgacgctgtacggtccgaaaggattgcgccagtttgtcgacaccgcgctcagcctgagcggctcttataccggctatccgctggagattgtcgagatcgaagccggtccggtgctggataacggtgagtttcgcgtcactgcttatgcgctaaaccacgtggttgagtgctatggctaccgcatcgaacagcatgataagccgggctttcttgacgcaccgcgcctgaaggcggaaggcgtgccgcgcggcccgtggtatcaggatctgaaacagggcaaacgcatcacgct

SEQ ID NO: 3186 - DNA, 383 bp, Zea mays
  Peptide Sequence Number=SeqID_9437
  Probeset Number=SeqID_17589
atgctggagcgtgtgcatgcggatggggcgggactgctggcgccggcgcgcatgctgttcgacatggcgctgcatgatttactggcgcagcaggccggcgtgagccttgcgcactggctcggtgccgctgcggccagccccggttacccgaccaaccagacgctgttctggggcagtgaagcgcaaatgctgacgcaggctgaacagtacgttgcacgtggctttacccagctcaaactgcgtaccggcgtggcggatgtggcgaccgatctggcgcggttgcgcgccctgcgcgcccgctttagtgaggccatcacgctggcgattgatgtcaacggtcagtggtcactggcgcaggcgcacgccgcttttccggcgctgca

SEQ ID NO: 3187 - DNA, 317 bp, Zea mays
  Peptide Sequence Number=SeqID_9438
  Probeset Number=SeqID_17590
ctgaagccgttgttgcgtcgcgccccggtctggagcgagcgtgatgtacgtaccttgctggccagctacctggcgcagcctgccgatggcacgctggtcgatacatggctgcaacgccccgcgttgcccctgagcatcaccctggccgatgccgccggcacggctgacctgcaattgctcagcctgctgcgcgtgctgccgggccagcgctatgtgggcgccggtgtttggcgcggtaccccagtgctggccaagctgctggtcggtggtaacgctgcgcggcatttccagcgcgaactgcaaggcgtgaagctgct

SEQ ID NO: 3188 - DNA, 421 bp, Zea mays
  Peptide Sequence Number=SeqID_9439
  Probeset Number=SeqID_17591
atgcgcaaagtgatgcatgcgctgatcagctggggcgtcaccattcagggactggtgtacgccagcgtgatcgtggtcggggcgccgatggtgatcaacggcgatatcaccaccggggcgattgtcgccgcgtcgctgctgtcttcgcgcatgattgcgccaatggcgacgctgtgtggcgtgctggcgcgctggcagcaggtaaaagcggcgaagagcagcctcgatgcgctgatgaatctgccggtggagaacagtaaagacgaaacgcgcattcactgtccggtgctgtttggccactatcagttcaccgatgccatgttccgctactacagcgattcgctgacggtggcgctacgcatcaagacgctgaccatcaagccgggtgagcgcatcgccgtgctggggcgcaacggctccg

SEQ ID NO: 3189 - DNA, 229 bp, Zea mays
  Peptide Sequence Number=SeqID_9440
  Probeset Number=SeqID_17592
caagatatccaaggtgtgctctgagttgaacgcagatgtactcagaggccacattgtacatagcaggtctccccaggcgctgactgcgctagaatataggaacagcgtcaccgtgtagggcatggctactgtcattccaaactacgagaggcatcgtttccgcaaagatccgcttgaatccatttaatggggtttcctagtcattgataacttgtattcagtcttcagt

SEQ ID NO: 3190 - DNA, 404 bp, Zea mays
  Peptide Sequence Number=SeqID_9441
  Probeset Number=SeqID_17593
ctgagaaacacaacataagcaagaaaagtggggtggccaaatctgctgctatgttatgtcatgatatgcaacctttgaaacctgctgaaatggttgaacatctgaaacaaggacttggaaaggaggggcagatcgtacatatccaagagatatcatctagagaggcatcatttacagaacttccttgtaatctttcagaagctatgagagaagcgctgaagagtattggaatatctagactgtatagccaccagtctcaagccataacatcctctatttctggaaggcacattgtcgttgcaacttctacatcaagtggaaagtctctatgttacaatattcctgttcttgaatgtctttcccaagacttgatggcgtgtgctctgtacatatttccgatgaag

SEQ ID NO: 3191 - DNA, 280 bp, Zea mays
  Peptide Sequence Number=SeqID_9442
  Probeset Number=SeqID_17594
tcacaatgccggcgacgcccacccagcaccgcagccgcagtcgcagtacaggccagcaccaccggtcagcaggcggactccacgcaccgtacatgcagcacaacagttcatccgctcgacaaaccggcttcgcccgcggttggtgcgtgtggcggtgtcatagatcccgctcgccaccaggcggacgaggcagcagtccgtgaccgcgacggagccggcgattccgagcaacttcctgtgaccgatctcgctggagatgatcaaggaccccgtgacggcg

SEQ ID NO: 3192 - DNA, 354 bp, Zea mays
  Peptide Sequence Number=SeqID_9443
  Probeset Number=SeqID_17595
atgacgaaaaaatggctgtttgccgcgctgaccgcgctggtgatgattctggttctctgggcatattcggcgtcacgcagtaaacccaatccgctgatgactgccgcggtgcgtcagggcgacatcgaaaacgtgattgccgccaccggcaaaatggacgcgattgagcgcgttaacgtcggtgcgcaggtctccggtcaggtgaaaaagctgtatatcaaagccggcgacaacgtgcgtaagggccagctgatcgcggagatcgatgatcagccgcagcgcagcgatttgcgtaatgcgcaggcggcactgagcgtggcgcaggcggatttacagacccgtcaggctacgctg

SEQ ID NO: 3193 - DNA, 692 bp, Zea mays
  Peptide Sequence Number=SeqID_9444
  Probeset Number=SeqID_17596
atgctgtttctctgaatccaataagccttccccccctttgctacccatcgctcacttgaactagagggatggctaatggttgccccacgtctaccacaagctccctgcccctcttcttccttctctcttgcctgctcatcggccatgctctctgcagccaagcccacaatggcagaacatcaggtgctgattatgtggtgcaatttccccaccaggaattgcctgctaagcatatagttttgccggaggccgtcaagggtctaaacaagggcatactgccaaagtatgcacggagaatgttgatcggctcaattgcgccaatatgcacatacaacgagtgcagggggtgtcgattcaagtgtactgctgagcaagtcccagtggatgcaaatgaccccatgaacagtgcttaccactacaagtgtgtttgccacaggtgatcttcaatgagtaggaggagctgctatgttatggtgtgtcctggagaatagtagtattttcctccccgttcttggttctcccttctccctcttcgcttccttctattctttggtttctctgttgaaaagaggctcctttgtcttcatttctattttacaagaggctagctagtagaggactggagcctggaggagcattttgtactttaaaatgcctagctcaggttatggactagtaattttgttaggaaa

SEQ ID NO: 3194 - DNA, 530 bp, Zea mays
  Peptide Sequence Number=SeqID_9445
  Probeset Number=SeqID_17597
ctgcaggccgcagccgacggcgggctctacggcgcctcacatcgcgggttgccgcttcacgtgatcgtgtcgatcaccgaatcccagcttcgcgcagatgtacctggcggtgttcgacgaccacaccggcgaccgctgtacttcggacgggccaagcggctcgcgtcggagtcccagcggttcgtgacgttcgccgagtacggcggctgctccaaacccggctgcccgcgcccgttctcccacaccgaagcccaccacgccgaacaagactgggccgacggcggcatgactgacatcaccgacctcgcgccggcctgcggaccccacaaccgagccgtgcacgacggacccggcggctggcgaaccgagaagatcctcgacggccccgaccgcgggaagtacggatgggtcgccaacggcaccaccgacccaccccgaaccaaccacctccaccgacccgaccggatccttgacgacaccggaccacccgaccccgaatggtcggacatcgaacactcgctggaactgat

SEQ ID NO: 3195 - DNA, 399 bp, Zea mays
  Peptide Sequence Number=SeqID_9446
  Probeset Number=SeqID_17598
aaaggcgtaaagagagtagaatagtttattggatcatctgcaacattgtatcttgaacaagtatcacatcaaagtaaagcggaaataaataacaggggcaatctcccacaggaagatgaccggcgcatcgttagacttagaattcgccgtcgacaagatctccatcaaagtctccagcatcaccctcttgctcaaacgcgtcctgcagatcgtcttcgaacggattcggttcgtctaccacaccgtcagcctcttcactgtctcctatgtgcagaacgatgggtgagcagggagggtcgtcgagcagaggggtttggccggcagcagttgcctggggtcgcggcttcactcggctcaacggcgttctgggtaggtattcgtcgaaggggactcgtcttt

SEQ ID NO: 3196 - DNA, 675 bp, Zea mays
  Probeset Number=SeqID_17599
tgcagcgaagcaggcgatttttacccgtcccccggaacgccggtgcgtgctccgctactcagattagcctactgcaacgcacaacagcagcaccattccactgcgctgcacagcacaaccgtcacacgagacgagacctcgcaccagccacgactactcgcctcccctttcccctcctcctcgtgctctcttgtcaacccccaacgcagcacgcacaccctctcctctctcccgtcccctcacgcatccctgccgggtgccggcctcgtacaagcaaaagacagacagttcccgcatcaaccggctagccagctagcccttcaggacctcgctgcattccccatgggaggcgccatgaggcagctgcttagctttctgggagcgatcaatggccgcccgaccccagggagaagacgaacgacgacgctgcggcggcgcctggtgcgggacggtggagctgaggaggagcccaagtttaccgcggcgattaataactctgatgaagctgcccgcctgcctgcaggagtgcagcatgtggaggtgaacaggctgcagcagaaggtgacggtgacggtgacggtgactggcgaggtggacccggtcgtggtgctgcggcctgcggagggcccagtccacggggaagaaggcggcggagccgtggacgggcccccataa

SEQ ID NO: 3197 - DNA, 510 bp, Zea mays
  Peptide Sequence Number=SeqID_9447
  Probeset Number=SeqID_17600
atggccgccatcaccggacgcaaattcagcgccaccacaaaaaccagtaaagcaaacaagccaatagcagataagcgggtgcgcacaaagcgacacattgcccgccgtgaactgatgagaattaacatgactgaccacgtagattttgtcgttgcgcaatgggccagcgccatgccggagctggacgcctcttccatggcgatttttggccgcatgctgcgcctgatgaagcatctggcgaaaaagcgcgctgaggcgctggcgccctttggttttcgcgatggcgaatttgatgtgctggcgacactgcggcgtgccggcgcaccttaccgcctgtcgcccacgcagctctacaaatcgctgctggtcacctccggtgccatgaccaaccggcttaaccggctggaagaagaggaattgattgcgcgtgttgccgatgccgatgataagcgcagcacgctggtgacgctgacgccgcccgggctggcgaagattgagcaggcgctgcag

SEQ ID NO: 3198 - DNA, 989 bp, Zea mays
  Peptide Sequence Number=SeqID_9448
  Probeset Number=SeqID_17601
tgcagcagctgctgatcccgtcgaacaagatacaggggaggctcgaccccggacgcatcgccaagctgagcaacctcgtctctctcgacctcagctacaacatgttcaccggagagctgcccgagtccatcagccagctgcccaagctggaggagctccggcttgggcacaacaacctgaccgggacgctcccgccagcgctcagcaactgtaccgggctccggtgcctcgacctccggtcgaacagctttgtcggggacctcgacgccgttgacttctccggcctcggcaacctcaccgtcttcgacgtggccgccaacaacttcaccgccacgatcccgcagagcatctactcctgcacgtcgctgaaggcgctccgctttggcggcaaccagatggaagggcaggtcgcgccggagatcggcaacctgcgccggctccagttcctgtccttgaccataaactcgttcaccaacatcagcggcatgttctggaacctccaggggtgcgagaacctcaccgcgcttctagtatcgtacaacttctacggcgaggccctgctggacgccggctgggtcggcgaccatctcaggggtctccggcttctggtgatggagaactgcgagctgacgggtcagataccaacgtggctgtcgaagctgcaggacctcagtatcttgaacctcggcgacaaccgcctcaccggcccgatcccgcgctggatcggcggcatgaagaagctctactacctggacgtgtccggcaatctgctgtccggtgggattccgccgtcgctggcggagttgccgcttctcacgtcggagcaggccatggcaaacttcagcacaggccacatgccactcaccttcaccctgacgcccaacaacggagcggcgagcaggcaaggccgcgggtactacctgatgacaggcgtcaacacgaccttcaacttcagcaacaactacctcaccggctcgataccgggcgag

SEQ ID NO: 3199 - DNA, 529 bp, Zea mays
  Peptide Sequence Number=SeqID_9449
  Probeset Number=SeqID_17602
tactcggcacgaggccttccaaaaaaagcgcacacgcctttcgtgcacctccccggtcccttccccgtcccccccccccgcccccttcccccgcctccgccctcgccgacgcccgacccccacaccggccgacgcgcgagccccggctccatcttcacaccagcataaatgggtgatgcgtgtttctcaacacagctaattgatggagaatgggctcttcaacgtctccggattggagaacttcatgaacgactgtcagattgggtgaatgcgggctgtcctatgctgttgtatcaataatgggcccgcatagtagtgggaaaagtaccactttttgaatcatctttttggcaccaattttagggagattggatgccttcagaggaaggtcacagacttaccaaaggtatatggctagcgaaggcccagaatattgaaccgtgcacccttgtaatggatttggaaggaactgatggaagaaagaggggagaagatgatacagcatttgagaagcaagtgcattgtttgc

SEQ ID NO: 3200 - DNA, 498 bp, Zea mays
  Peptide Sequence Number=SeqID_9450
  Probeset Number=SeqID_17603
ctggttcagtcggtagtggattacgccatctacatgctcgacccgtccggccatgtggtgtcgtggaacgcaggtgcgcaacgcatcaaggggtatcgtgccgatgaagtgatcggcaagcatttctcgttgttcttcaccccgcaggattgcaccgaaggccgcccggagcgcttgctgcgccaggcgctggagcagggcgtggcgcaggatgaaggctggcgtgtacgcaaggatggcacgcagttctgggcgctggccgcgctggatgtgatccgcgatgaccagggccaggtcgtcggcctggccaaggtgacccgggacatcaccgaccggcgcgagtcggcgctgcaactggatgcggtgcgcgctcagctgttccaggcgcagaagctggaggccctcggccagttgaccggtggcctggcacatgacttcaacaacctgctgaccataataatcagctcggcgcgcctggcgctgaccacccaggacccg

SEQ ID NO: 3201 - DNA, 302 bp, Zea mays
  Peptide Sequence Number=SeqID_9451
  Probeset Number=SeqID_17604
atgtatctactgattgtctttttgcctttggtcgggaggtccggaaccgggtttttcggacggtttttaggatttgaaggaaccggtaaaaaggcccccacggggggttccattttcttcggttctatctttgaatgccttttaagaagtcgccctgggaggtagggcctggtaactcaaaaaaggccccaggatttccacggaaaaggtttaaggcttctgggggtttcttggcggccggtaaagccccgggatgaatgccggagtagatagtctgatcccggacgctgcaggcatgcaag

SEQ ID NO: 3202 - DNA, 726 bp, Zea mays
  Probeset Number=SeqID_17605
cccctgaggaagtgtttgcgctctgcccggttaaggatatggtggcatggacggcaatggtgacagggtatgcacaaaatgccatgccagtgaaggcactcgaggcatttgagcagatggcggtggccggcatgcccattgatgaagtttcactcaccggtgctatctcagcttgcgctcagctcggtgcggtgaagcgagccgcctgggttcaggaaattgcagaacggaatggtcttgggaggaatgtggttgtcgggtcagggttggtggacatgtatgccaagtgcggtctcattgacgaggcgcgcaaggtttttgaagggatgcacgataagaatgtgtatacctatagctcaatgattgttggcctagcatcgcatgggagggccaatgatgtaattgctttgttcaatgatatggttaggagggcagatgtggaacccaaccatgttaccttcattggagtattgacagcctgcagccatgcaggtatggtaaaagaagggcgctactactttgcgcagatgaaggacaggtatgggatattgccttctgcagaccactacgcttgtatggttgatttgcttgcacggtctgggctggtaactgaagcccttgaccttgtgaaatcaatgactgtggagcctcatggtggtgtctggggggcactgttaggggcttgccgaatccatggaaatactgaagttgctaaaattgcagggg

SEQ ID NO: 3203 - DNA, 307 bp, Zea mays
  Peptide Sequence Number=SeqID_9452
  Probeset Number=SeqID_17606
gcgccggcgtgcccccctcccaccccctgtgaacgtcgcaccgcgcgatccggcgatccgccgcgtgcggccgagcgtgcaggacgccgcgtgcgaacacgcgctgttcgacctgaaccgctattaccagaagctgcgccgcaagatgcccgcgcattcagcggcgacgctcgtgcgggcgcagcgcgcgtgggtcgcgttccgcgatgcgacggcgccgctcgtcggcgaggacggccgcgtcgacctgatcggcgcgcgcatcgcgacgatgaagcggctgtcggagacggccggcaaccagtag

SEQ ID NO: 3204 - DNA, 852 bp, Zea mays
  misc_feature (601)..(852): n is a, c, g, or t
  Peptide Sequence Number=SeqID_9453
  Probeset Number=SeqID_17607
gccgcggcgcgggagctcggcgccgcggcgctcgtggtcgacttcttcgccaccgccgtgctggacgtggcgcgcgggctcgccgtgccggcgtacgtctacttcacctccacggccgcgctgctcgcgctcacgctgaggctgccggcccttgccgagactctcgccgccgacttcgagacgttcgagggcacggtggacgtgccgggcctgccgcccgtgcccgcggcaagcgtcccggggttcctgggacgcaaggacagccccaacttcacgtggttcgtgtaccacggcaggcggttcatggacgccgacggcattgtcgtcaacacggtgatcgagctcgagccgggcgtgctctccgccatcgcaaggcgcggggccggctgccctgctcccccggcgctgtacccggtcggcccggtcatctcgttcgctccgccggccgagccgccgcacccgtgcgtgcggtggctggagacgcagcccgcggcgtccgtcgtcctcctctgcttcgggagcagggggttcttcggcgcggcgcaggcgcgcgaggtcgcccgcggcctggagcgcagcggccaccgcttcctctgggtgnnnnnnnnnnnnnnnnnnnnnnnnnnnnnnnnnnnnnnnnnnnnnnnnnnnnnnnnnnnnnnnnnnnnnnnnnnnnnnnnnnnnnnnnnnnnnnnnnnnnnnnnnnnnnnnnnnnnnnnnnnnnnnnnnnnnnnnnnnnnnnnnnnnnnnnnnnnnnnnnnnnnnnnnnnnnnnnnnnnnnnnnnnnnnnnnnnnnnnnnnnnnnnnnnnnnnnnnnnnnnnnnnnnnnnnnnnnnnnnnnnnnnnnnnnnn

SEQ ID NO: 3205 - DNA, 373 bp, Zea mays
  Peptide Sequence Number=SeqID_9454
  Probeset Number=SeqID_17608
cgccgaacgcatggcgctcctcctcctcctcgtcctgctccgctccgccgccagcgctggcgcgggcgctgaaccgcatcgctccccggccactgccctcttcgtcctgggcgactccacggtcggctgcgccgcggcgacggcgagcagcattctgtcgctcaacctgaccaccaccaccaccacgctgccgtcctcgctctccggcgagccgtgcctcttcttccacgaggcgcggctccgcgtcccggacctcctcgcggccaagatgggcctcccttcgccgcccccgatctcaaagctcaacggcacagcgtccgccgccgcgcgcggcgtcaacttcggcggcggcggcgggcaggaacatatctag

SEQ ID NO: 3206 - DNA, 359 bp, Zea mays
  Peptide Sequence Number=SeqID_9455
  Probeset Number=SeqID_17609
gcgaccataaagaaggggggaagcgcgtgaagggggagaggcgcaaaccacaagaggaaagtgagcaagagaggccgcaggaccatcggcagggccctgggtcgagctgggacaccgagatacaacggaagaagcgagggatgcagaagccaaggaaacccgcggcgaaagacaccggaactggggggaaaaccgtgaccgacaaccacacaaagggaaggaaccggggcatacggggaaccgacaccaacgcgagcacaaggcgcaccgagagcaggggcctcagcgacaacaacagaaagcgagggggcgggaactgggacagagccaggaacacccacggtgaccggaaggggacc

SEQ ID NO: 3207 - DNA, 268 bp, Zea mays
  Probeset Number=SeqID_17610
gtcaggggctggtggtgctgtcccgacggcagttgggggcactccgccgacaccactctcaacaggctcctgctgctgggagccagacccgccggcggacctgatatccggtggagcaggtgcgaccttggggcaggaggggcagcacgcccttccagcgaccctgcaagcggggcgacctgtgctgttgttactgccgctcctgtggttgttgatgctgtcgttgttgtagttgcagccgaagaacatgcttctccccctgggggat

SEQ ID NO: 3208 - DNA, 213 bp, Zea mays
  Peptide Sequence Number=SeqID_9456
  Probeset Number=SeqID_17611
ttaaagttaaatgatgaattgtggtttgagtataaatgtaaatgtaaaggtttattatgcatatatttaggcaagacaatttagatcatgttttgttgggtgatggtagatttggcaggaaaattgagttccatctgcaaggagggcgtcaaaaaaggcttgtttttcaagtaagagtatctaatatcccatgtcaaccatgtgtgggtcttt

SEQ ID NO: 3209 - DNA, 553 bp, Zea mays
  Probeset Number=SeqID_17612
cgccgccgcccgcgcctgggcaaccgcctccgcctccgcctcctactctccctccccgtccaccggcctcgccctcatcgacgcgctccacgccgcgctcgccgagctcctcctcctcccggagccgcaggccgcggtccgccgcccctccgccgcctccgaccgcctcctcgacgccttcctcctcctcgctgacgcgcaccgcgggttccaggaggtgctgctcgcgctgcggcgcgacgcggccgacgcccgcctcgccctccgcaggcgcgacgccgccaggctcgcgtccgcgtcccgcgcccagcgcaggggcgacagggagctcgcccgcctcgccgccaggtccgccgcgcgcctgcctgctggggctgggctcggcgggagcggaaccgccgaggaggccgagatggctgccgcgctcatggacgccgcggccgccagcgccgccgcctccgccgccgtgttctcggccgtcgcgtccgtgtctgccgccgtgtcgttgtgctcgaacaagaaggccctcggggccttcgtggctgctgccttc

SEQ ID NO: 3210 - DNA, 243 bp, Zea mays
  Peptide Sequence Number=SeqID_9457
  Probeset Number=SeqID_17613
atgagacggcgagcgggcttaagcagggaccatgcgaggcgcatacgagccccatgcctcgatgctggggacaccgccgagggaaccaaggagacttctccacctcaatgcgaccggcacactgacggcatcaaagcacgggctggaacacaggggtccgaagtagcacggacgccgaccagggaaggcggcatagccagacgaagacaagcatgccacgcaaacgtgaaaaacaaaacacag

SEQ ID NO: 3211 - DNA, 216 bp, Zea mays
  Probeset Number=SeqID_17614
ctcgacatggtcgcagacgagctcaccgagcgcgcgcgccgctcggtctccgtagcgcggagccacaccgtacgtattcctgctcgtgccgcagttgttcctagtcggcgtgcgcgaggcctcgcgctacatcagacattattacttattcttgcacgagtgcactaggggcatgaagaccatgagcgctgtcctatttctcagcacgctgacgct

SEQ ID NO: 3212 - DNA, 288 bp, Zea mays
  Peptide Sequence Number=SeqID_9458
  Probeset Number=SeqID_17615
atgtacgtcttcagcgtgctccggtggacggaccgggcccggtcaggccgcgcatgcgtgaaggggatcttggagcagcactgccggcttgcagacgaggcctgccggcgcctcggcgccaagcagtacctggcccgacagccgtcgccggcgcactggcgcgaccacttcggggcgagctgggaccggttcgtggcccggaaggcccgcttcgatccctcgcacgtgcttgggccgggtcaggggattttcccgtggtcggactccgcgtccgcgagctcggtgtga

SEQ ID NO: 3213 - DNA, 419 bp, Zea mays
  Peptide Sequence Number=SeqID_9459
  Probeset Number=SeqID_17616
gggggaagcccgcacgaaagccacggggaagacaccgacaacggggacgccggcagcgcgcgcaagaagcacgaaagcacacccgacgcgaacgactggatgggcctggacggggcgcacaacagacccatcggctgcgacaggctgtacaccggcgccggggagacgcacaacagggagagcaaagaggaccgcaacggggggggcgacaccgacgcacaagagcggaaggggccgctgcaccacagcacactcggaggcgacaacgacggggggggcttcgcggaccacaacgccaaggaagcgcacgtcggccgaccacacgggagcgagaacgggcagcggagcaaggcagcgccccaagagaagaagggggacgcgcacacgaggccgaagaggaggcacaggcaggaccaaga

SEQ ID NO: 3214 - DNA, 281 bp, Zea mays
  Peptide Sequence Number=SeqID_9460
  Probeset Number=SeqID_17617
ctgttgtcgagcgaggcgttttttttgctgcacgacatcgtgtccgtggacgctgccgggaccgggggcagcgccagcgcgcacgtgtcgaacgcgtcgtcgctggccccgagcgtgagcagctcccgcgagcagagcccggaccggggcggcgtcagcgccagcctcgccatgctcttcgccaagcccgaggtggcgcccaggctggcctgcccgctgccgctggagtcctgggtctcgccgtcgtcggccgccaggcccagcggcgtgtccatcgcgca

SEQ ID NO: 3215 - DNA, 599 bp, Zea mays
  Peptide Sequence Number=SeqID_9461
  Probeset Number=SeqID_17618
gtacgtaggccgaggcttgatcatatatatgttcaacataaataacactagctagataataaggcaagaagtactgctactgatgaagtcatatatactaattgaacgaaaagtactgtgaccgactgatgccacctactggctttccgctgcagctacataacggcatcgcatcacatcacaggagaactgatgtggagcaccgagacgcggagataagcggttcatatactacataagtaaatatatgcaaacgttaatttaattagttaaaataattaattgagaaatttgaaggaagggagccttgatgctgggatggttcgggcgaccttcgcgctttggccgctagactgcaaaacctggagtagacccaccatccgagaaagcccgcaacggccatacatcctatgactgcgatggcggctatggcacctgctttgagcccggggcgttggccattgctgttgccgagagctggcagcggtggggacacaacaatgaagtagtgattaagaaatgtggtgctgcacaccagcaacctcacacatgtgttctcttactcaagaacaagttgttggcactacaccccccaatag

SEQ ID NO: 3216 - DNA, 590 bp, Zea mays
  Probeset Number=SeqID_17619
ctgcggtgtacgtcgtcaagcaggcgcgccacttcgcgccggacgccaccgacgtcgcgtcgggcttcaacatcgccgcgttcaacctcggcgtcgcgggcggctcgtcgctcggcggcctgatcgtcgcgaacgtcggcctcggccatacgccgtggatcgccgccgtcgtcacgctcggcgcattcgcgctgaccgcactgagcggccgcttcgaccgcggccagggcctgccggaacgcacggccgaatccgagcgacacagcatgaacgcatcgacccaacgtccgccgttcgccggcaagactttcgaagtccgttacgacggccttaccgcactcaacgcctatgacgaggacggcgtccacatgcgctacgagatcaccgaaggcgcgtacgccggcgcgaagggcgaagtcgcctatacgtggcagcacgtcgccggcgagacctacgcgatctcgtggcaggaagccgatcgcgcgaccgtcgtgcatatcgacgatttcgccgccggcacgtcgcgctcgttcttcaccgcggcatcgctcgatttctaccggctcgaaggcagcctgcgcgcggtctga

SEQ ID NO: 3217 - DNA, 296 bp, Zea mays
  Peptide Sequence Number=SeqID_9462
  Probeset Number=SeqID_17620
atctgtttggctgtattcagactggtcttgtaatgtctccgttaagtaataaatcattgtttgctgaaaaccaccagaaccctttcccaacaattttcttaagatgtcttaacctgtttttttttcaactgacgaccctttacaaatttacccgacaaaggaaccactggttgaagaataaagtattgcggcttcactttggaagctgagctcatgttgcttgtatgaattcactagaaattttgtctaccagtccggtttctctcacaggctgctatcatactgaatttctgcag

SEQ ID NO: 3218 - DNA, 589 bp, Zea mays
  Peptide Sequence Number=SeqID_9463
  Probeset Number=SeqID_17621
cgacagcggcgacgtgatctccggcggtaacttccacgccgagccggtggcctttgccgccgacatcatcgcgctggcgattgccgaagtcggtgccatctccgaacgccgcctggcgctgctgctcgataccggcctctccggcctgccgcccttcctggtgcgcgacggcggtgtgaactcgggcttcatgattgcgcaggttaccgctgccgcgctggcctcggagaacaaatcgctggcgcacccgggcagcgtcgacagcctgccgacctcagccaatcaggaagatcacgtatcgatggccacctacgcggcacgccgcctgggcgagatgtgcttcaacaccgctgccgtggtcggcattgaagcgatggcggcggcgcagggcatcgacttccaccgcccgctgcaaagttctgccgcgatcgaacaggagatgagccgcattcgtgcgcaggtcgccttcctcgatcaggaccgtttactggcgccggacattgatgccatgcgcctgtgggccagcagttacgtctggcctgaaacccttactgcgctgctgccaagccagcgttctactgctaattaa

SEQ ID NO: 3219 - DNA, 359 bp, Zea mays
  Peptide Sequence Number=SeqID_9464
  Probeset Number=SeqID_17622
tgcagccgtagcagctccaactccagtgcggctccctcgcctacggctgaggagattaccgaaaagtaggggctcgagttcggcctctggaaagtgttcagctccaaggaagaggaggagggagccgaggggaagaagtcgcggacggcgaaggagctcctggccaagtacggcggcgcgtacctggccatctccatctcgctctccctcgtctccttcgccctctgctacctcctcatcagcgccggcgccgacgtgcagagctgctcgccaaggtgagctgctgctagctcaagccagccagccgggtaggccaagtgtctccatcttacgtctacttgaccactataggacctgca

SEQ ID NO: 3220 - DNA, 680 bp, Zea mays
  Peptide Sequence Number=SeqID_9465
  Probeset Number=SeqID_17623
cctgccaatggcgatgccaacgcggtagtcagtccggcgaccgcggccatcacgccgtcagacagcgtacagccgcagcagcccgccgcacagccagctgtcgcgcagcctgccagcagcgcccaggtgaaagtgtatgacaccagcagccagccgattgctcaggtgatgcagcaggcgcagcaggatggtgccaccctggtggtgggtccgctgctgaaaaataacgtggaacaggtcgccaacagccagacaccgctgaacgtgctggcgctcaacgagccagagcagatccagaaccatccgaatatttgctattttgcgctttctcctgaagacgaagcgcgtgatgccgcgcaccatatctgggatcagggcaaacgccagccgttgctgctgatgccgcgcagcagctatggcgaccgcgtgggcaaagcgtttgcgcaggagtggcagaagctgggcggcgcatccgtgctgcaacagcgtttcggcggtgtgggcgagctgaaacagggcatcaacagcggctccggtattgcactgagcggcacgccattgacggtacagccggaccagccgcagggcgtggcggtcgccggtcaaaaattaaagcaccgcagaccagcgctccggcacctgagagcgccagcagcaacggcagcgttatcgagtttaca

SEQ ID NO: 3221 - DNA, 945 bp, Zea mays
  Peptide Sequence Number=SeqID_9466
  Probeset Number=SeqID_17624
ccacgcgtccggggaggtggctgatgtcgttgtgtgatgttgtctggaaccggcaagatacctaaaggccttctgcaaatgttgttgacaaaatcctccctgcgtgatctccctgcgagcccttcatcttcaacattctgagccaatctagagggcggcaacagagcagcttaattccatgatggatcttggaagcgatgttcaagttcgtgctgctggaggtctcctagcaatattagacaatgagagacttcttgacaccattgagcagatggaaggtggagcatccattgcgatcgattctgtggtacagatctcattttatcctctgatggagataaattgaacacactgatgtgttgagatttaattatatcttctgtcatgggctgggcttatggccccagatggcagtatgccagatcagatccgaccttatatactgctgctgccctggccggccgcccgtacccaacagattgcccatgacaactttcagtggcagtctagtttgtaatcaacaaaattatatacataatttatttcctaaaaaaaaaaaaaaaaaaaaaaaaaaaaaaaaaaaaaaaaaaaaaaaaaaaaaaaaaaaaaaaaaaagaaaaaaactaaaataaaaaaaaaaggcaaagaaataaaaaatctaatagaatacctaacttaaattcaatggccgggcctttacaaaaaaccagactggaaaaaaactgactttacgtaacttaattgacttgcatggcataaaactttggttagatggggtaatatccaataggcctggcccgatctgacttcccttcagattggcagcccaaatggcaaagggaacgcgccctgcattggagcataacttaagcgcgtgaggaggaccggtacactgggaccgttacactagccaggcgcctaccttaccctcctttcttttgcttt

SEQ ID NO: 3222 - DNA, 294 bp, Zea mays
  Peptide Sequence Number=SeqID_9467
  Probeset Number=SeqID_17625
atggcgcggttaggacacgcggtggccaacggcgagggcacgtcggcggtgagcagctttatccacgacggtgagcaaggggaggggtaccgcggctggccgggatggcgtccagctcaccggcggcggggatttttaccgagctatgtttatccgatggccacggcgcacgaatcacggcgagcggcaatcaacggcgacgggccaccggcggtgagcaaatggatgggatcttcttcagttacccgatactgtaccatggcaagcgcttcatcagtcgcctggcaaccatag

SEQ ID NO: 3223 - DNA, 921 bp, Zea mays
  misc_feature (879)..(879): n is a, c, g, or t
  Probeset Number=SeqID_17626
ccgctcgaggcggcgggcaggacccgctcaacaaccagtcaccacagacacacaccccgatccctcactccctcgcgtgtactagcaaccaagggaaacaatggcgccggtgaaggtgttcgggccggcgatgtcgaccaacgtggcccgggtgctggtgtgcctggaggaggtcggcgccgagtacgaggtcgtcaacatcgatttcaaggccatggagcacaagagccccgagcatctcgtcagaaacccgttcggccaaatccctgcgttccaggatggggatctgcttctcttcgagtcacgcgcaattgcaaagtaccgtgttcgcaagtacaagacgagcgaagtcgacctgctgagggaaggcaacctcaaggaagcggcaatggtggacgtatggacggaggtcgacgcgcacgcctacaaccctgccatctcgccgatcgtgtacgagtgcctcatcaacccgatcatgctcggcctgccgaccaaccagaaggtggtggacgagagcgtggagaagctgaagaaggtgctggaggtctacgaggcgcacctgtccaagcacaagtacctggccggggatttcgtcagttcgcggacctcaaccatttcccctacaccttctacttcatggccacgcctcacgcggtgctctttgactcgcacccgcacgtcaaggcctggtgggagaggctcatggcgaggccggccgtcaagaagctcgccgcagaaatggttccgaagaagctgtgatttgctatgggggatttcgcgtcctgggatcagatcactgatctgtacggcgttttcttgttggtgtcgcgaataaggcaatgagcttgtgttgctggaattgcattgcaccagcgtgcnagtttttgtgcttgcgtgtgtgtggtcgcttgaaaagaacca

SEQ ID NO: 3224 - DNA, 581 bp, Zea mays
  Peptide Sequence Number=SeqID_9468
  Probeset Number=SeqID_17627
atgccacaaaacacgcaaggatcttcatttaaagtcctgacgatcaatacccataaggggttcaccagctttaaccgtcgctttatcctgccggaactgcgcgacgcagtgcgcgcgacctcggcggatatcgtctttttacaggaggtgatgggcacgcacgccatccactccgctcacattgaaaactggccggaaaattcgcactacgaatatcttgccgacaccatgtggcacgatttcgcttacggccgcaacgcggtctatcccgagggccatcacggcaatgcgatattgtcacgctttccgatcaccgaataccaaaaccgcgatatttctgtcgccggcagtgagaaacgcggcatgttgcactgccagatcagcctgcccgatcggccggaaccgattcacaccttgtgtgtgcacctcggcctgaaagagaagcatcgtctggcgcagatgcgcatgatgtgtgaactgattgagtcgctgccaccggatgcgcccctggtggtggccggcgattttaatgactggcaggtacgcgctaatcgatttttacagcgcggagccggtctgca

SEQ ID NO: 3225 - DNA, 234 bp, Zea mays
  Peptide Sequence Number=SeqID_9469
  Probeset Number=SeqID_17628
tcgtttcgaaaattgagggaggagccatgctccactttgccctctctgggtccgctcccgatggaaggcccttggcatcggcgtgcacgccgccgaaccactgttggagcgccctgccgcgagcatgcaggtgcagcacctgcattgcccttccccgttgcagtacagtgttctgcttgggttgccagttgtatttctccatgccgttcccggtcggcttctcgagccctgtgc

SEQ ID NO: 3226 - DNA, 265 bp, Zea mays
  Peptide Sequence Number=SeqID_9470
  Probeset Number=SeqID_17629
atgtcggtttcacacgcacaactcaaggccttccatgccgtggccgttcacggcagctttacccgcgctgccgaaaaattgtttctgacccagccagcggtgtcggaccaggtgcgcaaactggaggagcgcttcggcgtcttgctgttccaccgcaacaagcgttcggtgcagctcaccgaccttggcgagcgcatgatgggcatcagccagcgcctgatcgctgcgaggccgaggcccatgaactactgcaggcatgcaagct

SEQ ID NO: 3227 - DNA, 517 bp, Zea mays
  Peptide Sequence Number=SeqID_9471
  Probeset Number=SeqID_17630
atgggtattatcggaaccatctccatcggccttatcgtcggcctgctggcccgcttcatcaagccgggcgactacagcatgggctggataatgaccatcttgctggggattgccggctcgctgctcgccacctacggcggccaggcgctgggtatctaccaggccgggcaggctgccggtttccttggcgcgctgatcggcgcggtgatcctgctgctgatgcccaagtcggaccagcaggcgctcgagcaaatgcctgatatcgaccacaactcgccggaagccatgggcacctttaccgacaagggcggcctgaagcagagcaagggtctgccggcggtgatgtactcgaccaagaccgtggcggccatgaatggcaaggatattcgcctgggcggctacccggtgcctctggagagcgatgccaagggtaacagcacgttgttcttcctggttccgtacccgggcgcgtgcattcatgtgccgccaccaccaccgaaccagctggtgctggtgc

SEQ ID NO: 3228 - DNA, 455 bp, Zea mays
  Peptide Sequence Number=SeqID_9472
  Probeset Number=SeqID_17631
atgaaaatcacccgcctcgaaactttcgtcgtcccgccgcgctggctgttcctcaagatcgaaaccgacgaagggatcgtcggctggggggagccgatcgtcgaaggccgcgcgcacacggtcgaggccgcggtgcaggaacttgccgactacctggtcggccgcgacccgctgctgatcgaggatcactggcaggtgatgtaccgggccggcttctaccgcggcggcccgatcatgatgagcgcgatcgcgggcgtcgaccaggcgttgtgggacatcaagggcaagcatcacggcgtgcccgtgcacgcgctgctcggcggccaggtgcgcgaccgcatcaaggtgtattcgtggatcggcggcgaccggccgagcgacgtcgcgaacaacgcgcgcgcggtggtcgagcgcggcttcaaggccgtgaagatgaacggttccgaagaactgca

SEQ ID NO: 3229 - DNA, 441 bp, Zea mays
  Peptide Sequence Number=SeqID_9473
  Probeset Number=SeqID_17632
atgggcaatacccccgtcaccatcagccaggctctgcacagttacttcgcggtcagtgatgtgcgccaggcgcgggtcgaaggggtggaggggctgagctatatcgagaccctggctgactgggagcagcgccagcaacaggggccgctggcgtttgccggggagactgaccggatctacctggcgaccccgcaaacccttagcatcgtcgacccgcattgggagcggcgcattaccttgaccagcagcgggtcgcgctcggcagtgatctggaacccatggactgaacgggccagggaactgccggacatggccgacgatgggtggcagcggatgctgtgcatcgagacggcaaatgtgtgggatgacctggtggaattgaaacctgtgggcagcagctcgctgggggtcaggattggctgtgaaatgatctgagttttg

SEQ ID NO: 3230 - DNA, 509 bp, Zea mays
  Peptide Sequence Number=SeqID_9474
  Probeset Number=SeqID_17633
atgtcagtctcgcaggtcgccatagtgtccacgcctgtcgctgtttccgcctcgcctgccgggtctccggtcgagcccgtcgtgccggtcaccgtgcgctggcgcggcagcgaggcttaccaggcgagcttcgacgcgatgcgcgcgttcacagacacgcgcacggccgacaccggcgacgaaatctgggtcgtcgagcatccgcccgtctacacgctcggccaggccggcgacccggcccacctgctggtggccgacagcggcgtgccgctcgtgaaggtcgaccgcggcggccagatcacttaccacggccccggccagatcgtcgtctatctgctgctggaccagcgccggcgcaagctgatggtgcgcacgctcgtgacgaagatcgaggaggccgtgatcgaaaccctcgcggcgtataatctcgatacggtccgcaaggcgggcgcgcccgggataaacgtagcatccggcgcgcacgaaggcgcgaagatcccggccccggc

SEQ ID NO: 3231 - DNA, 383 bp, Zea mays
  Peptide Sequence Number=SeqID_9475
  Probeset Number=SeqID_17634
atggatcaaggtgctcggtgcgggggtcccgctctcgaccgggctcgcactgtgccctccggggacagcaccgaagtccgcgaccggggccgggtcgtgttcctgagcagtcgcgcaggacgagtgcgacgagccgcctcggccggcctcgtgctggctgccgtgcctatctcggtggccggcatcgtcgcggccccgcaggcggcccacgccgccgagcagctgcccgagtgcagtggcgtctccgccgagcaaccgaaggggacgacgctgatcaacgtcccgacgaacgatccggtgacccagatcggcgtgccacgggcacagcagtggttgcgtgggcacaggacgcagcccggcgccggcgtgacggtcgcggtgat

SEQ ID NO: 3232 - DNA, 447 bp, Zea mays
  Probeset Number=SeqID_17635
caccagccagcctgctgtgactctgccggcgcgcccggaagccatcgccctgccgccggcgcaaagcgcactgattgtggtggatatgcagaacgcctacgccagccagggcggatatctcgatctggccgggtttgatgtctccgccacgcagccggttatcgcccggattcatcaggcggtcaccgccgcccgcgcggcgggaatgcagattatctggttccagaacggctgggataatcagtatgtcgaagccggtgacgccggttcgcctaatttccataaatccaacgcgctgaaaaccatgcgtcagcggccggagctgcacggcaccctgctggcaaaaggcggctgggattatgcgctggtggatgaactggtaccacaagccggcgatatcgtgctgcccaaaccgcgctacagcggctttttcaacacgccgctcga

SEQ ID NO: 3233 - DNA, 442 bp, Zea mays
  Peptide Sequence Number=SeqID_9476
  Probeset Number=SeqID_17636
ttaggcacagtcctgacgacatgtcatttgagcgtacacgtggcctacgaccaggcggcgtaccgtcgccgcggggacgcggcgcggctcaacttccctgacgacgcggcgtccagggcgacgctcgaccccgtcgtcaacgccaagctcgaggccatcagtgccaccatcgccaccgccgccgcgtcgtcgtccaagaatgccgccagggccaagagcaaggccgtgccaatcaacgcacccatcctggaagcggtggcgtctccgagcagcagctcctcctccgacgaaggctccgggtcagacgacgagatgtccatgtcctcgccctccccgacgccggtggtggcagaattggggcagcttgacttcggcgaggtgccgtgggacgaggccgagaacttcgtcgattggccgccatgcccggccgtcgcagatgagg

SEQ ID NO: 3234 - DNA, 804 bp, Zea mays
  misc_feature (1)..(38): n is a, c, g, or t
  misc_feature (804)..(804): n is a, c, g, or t
  Peptide Sequence Number=SeqID_9477
  Probeset Number=SeqID_17637
nnnnnnnnnnnnnnnnnnnnnnnnnnnnnnnnnnnnnnagctcgagctcaagtacgcgagaccagaccgacgctctcgagccgccgcaccggtacgtgccctgggtggtcgtcgacgggcagcccctgctagaggtaagttcctttctttcccctgaacttcaacggcgccgcctttgcccaactgtctgatcaaagttcattcccccgttggtgttggtggtgatgatgaacatgttctcgtcgatccaggattacgagaatttcgaggcttacatctgcaaggcttacaagggcactccaccgaaggcctgtgagggcctggaacgtctgcagatggccctcgagacagccgagggccgccctttttttgggtcatgtgaagttgaagcagcgttccatctcgttgtccggttttttattgtacagtaatagctaatatgataatgataataattacatttctaaaaaaaaaaaaaaaaaaaaaaaaaaaaaaaaaaaaaaaaaaaaaaaaaaaaaaaaaaaaaaaaaaaaaaaaaaaaaaaaaaaaaaaaaaaaaaaaaaaaaaaaaaaagaaaaaaaaaaaaaaaaaaaaccaaaaaaaagcaaaccaacctgccggctcttaaacttggttctttccaaacacaaaaactcgagtcccctggcccgcttccccccaacgggaaaaacccgggaaacccccccgttttaaaaacccttaaaggaccagccccaatttcccccctttgccaaatttgacaaaactcccaaaaccccactccctaccccccattgccaaagn

SEQ ID NO: 3235 - DNA, 251 bp, Zea mays
  Peptide Sequence Number=SeqID_9478
  Probeset Number=SeqID_17638
aagttttgaggcgcctttttataccacccgaacccacttgatggtcggcgagttcggggtcaactccatggccggggtgttccattggatcatgcagaacgaagggtggaccggcctgttccgcggcaacgccagaaacgtcctgcgcgtcgctccgagcaaggctattgagattttcacctatgaaacggtcatgtaatttcctaaccccgaaggtcgacaagtccgcccaagaacccgatccccactcc

SEQ ID NO: 3236 - DNA, 343 bp, Zea mays
  Peptide Sequence Number=SeqID_9479
  Probeset Number=SeqID_17639
atgaagctgatactggccgaaccgttcaagcgtctgtgggccgagcgtgatgccttcgagtccgtggaggcgctgcaaggcgaggtctatcgcgaactggaagggcgccgcacgctgcgcaccgaggtcgctggcgagggcttcttcgtgaagatccaccgcggcattggctggggcgagatcttcaagaacctgcttaccgacaagctaccggtgctcggtgccggctcaggaatggcaggcacatccagcgactgcaccaggttggcgtgccgaccatgactgccgtcgcctatggcgagcgtggcagcaacccggccgtgcagaacttgctcatcatcac

SEQ ID NO: 3237 - DNA, 1146 bp, Zea mays
  Peptide Sequence Number=SeqID_9480
  Probeset Number=SeqID_17640
tacccctgaggccgccgccgtcaccatcgcaggtaattagctgcgacgacccaattccagaccggccaatccgcaccatgtcctccgatggccccacgccgtcgccaccgtcgtcgcacgctgcgagccgccgcctgtcgaccacgcacagcttcggcagccatggcaagctcctgccttctcccggacacggcgcgacggcgtcgcagatcgccgtcgcggcggccgccgcggcgctgctcctcgccgtcctcgctgcctgctgttgctgctgctgctgcaggagaaggaggaggaagggggacgcggcgcagcgtcagcatcggccgccgcctcacggcggcatgaggttctacgccgactcctccggcgcaacgcagtacgtaaccgatggcatgcgtgcgcgcgcgcgcagggaacacctcggggtactactggccgagcggcgcgaggccgccgcagtggcagaccggcggccaggcggtcaccgcggcgatctcgaccatgcagcacggcgcggtgctcccgccgccaccgctgccgccgccgccgccgccgccgatgcccgcggacacggcgacgttcagctacgaggagctggcggcggcgacgggcgggttctcggaggcgaacctgctggggcagggcgggttcgggtacgtgcaccgcggcgtgctcccggggcccggcggccgcgtgaaggaggtggcggtgaagcagctcaaggccgggagcgggcagggcgagcgcgagttccaggcggaggtggacaccatcagccgcgtgcagcaccgccacctcgtctccctcgtcggctactgcgtggcgcagcaccaccgcatgctcatctacgagttcgtgcccaacggcaccctggagcaccatctccacggtcgtggcatgccggtgatggactggccgacgaggctcaagatcgccatcggcgccgcgaagggactggcgtacctgcatgaagactgtcacccgaggatcatccacagggatataaagtccgccaacatcctgcttgactattcgttccaagcacaggttgcagatttcggcctggccaagctcaccaacgacacgaacacgcatgtctccactcgcatcatggggacgtttgggtgcgtccacgtcagtcca

SEQ ID NO: 3238 - DNA, 211 bp, Zea mays
  Peptide Sequence Number=SeqID_9481
  Probeset Number=SeqID_17641
ctgagcagacgcggctgcgctgtatctatctcaacaggatcagcatttgtattcaccgaggtgatgcttatgatcggcatcggccgggagtgctgccacatgagcaactggcggaagccacctctagtgtgccaccagatgcgcccggagatattctcggcatcggtgatactggagctcataaacgtagtcggcggctctagtggtatac

SEQ ID NO: 3239 - DNA, 212 bp, Zea mays
  Peptide Sequence Number=SeqID_9482
  Probeset Number=SeqID_17642
tccctgggtcccctgatccactgagccgtcggaagttagtagtagcagccacatgtactacccaggtgcagctcctaaaattcctaactgttcatggaaaagggtctgcttgcgcttgtatgcaacatttgcatagtccgtggctcccaacctcttttgatagtcagagtctgtgttgtgggaggtttacccaggccaaaaaagcacaaaaa

SEQ ID NO: 3240 - DNA, 651 bp, Zea mays
  Probeset Number=SeqID_17643
atgacgggcattccgttcttcctcgtcaaaaccgacatcgccggcaacgtactcaaacgtagcagcgccacgcgcttcaagttcgcccgcttcggcggcccttgtccactctggaatgtctaccgcgctttcgtacagcccggccgcttgatggtgcagcttgcccgcaccccggaccaggtgtcctatctcaacatcgcgcgcaccgtgggccgcggcggcggggcctatctcagccggccacgcaacgtcgcgatcgtcatcggctgcgaggtctcctacgccgcgcagaccgtctatgcgaccgggcttgatctgtcagaccccaccgtcgccgacccgatcggccccggctgccgggcctgtgaacggatcgactgccgtcaccgcgccgtgccaccggccagcggtacgctggatacaggcaccgtggaacgtggtgtcgagtttgccgtggccttgccgacccagcggacgccggccgaagccggccaccgtcctagtgtgaccgtcatcggtggcgggctgagcggaagcgtgttcgcgctcaccctggcgcgcagccccgtcgccgccgacatcaccgtggtcgaaccccgccccgccctcggcactggcctcgcttattcgaccgaagaccctgcgcatcgg

SEQ ID NO: 3241 - DNA, 241 bp, Zea mays
  Peptide Sequence Number=SeqID_9483
  Probeset Number=SeqID_17644
cgcctgctagaatgcgcacggatgataatgctacgagcgcaaatgctaggagccctgaggattgtcaggtgacttgcttcaacagttgcagctatagtgcttacacatataacaacactgctgttttgtttggcatggagacctacatggtcaacctccaagaacagcacactggtgatggaggaggaaccctcttactcactcaggcttgttgcatccaaggtgccagctgctgcaggca

SEQ ID NO: 3242 - DNA, 664 bp, Zea mays
  Peptide Sequence Number=SeqID_9484
  Probeset Number=SeqID_17645
gtgggactggcccgccgaagtgaatcagctggaagccgcggcattctgccgctggctggcggaagagagcggcaaagcgatccagctgccgtgcgaagccgagtggatgcagctgcgcgagcaggttgccggcgatcagccggactggatcgacgcgccgggcaacatcaatcttgcccgctgggcctcttcctgtccggtagaccactttacccagggtgacttcttcgacattgtcggcaacgtctggcagtggaccaccacgccgaccaacggctttgaaggcttcagggtacatccgctgtatgacgatttctccacgcccacctttgacggcaaacatgcgctgatcaaaggcggcagctggatctccaccggcaacgaagcgctgaaatcctcacgctacgccttccggcgccacttcttccagcatgccggtttccgctacgtggtttcctcgcatcaggagagcatggcgctgaatccgtatgaaaccgacagcatggtatcgcagtacctcgacttccagtacggccccggctattacggtgtgccgaactacgcggcggcgctggtcgatatcgtgctgccgcactgcgcgcagcgtggccacgcgctggatatcggctgcgccaccggtcgtgccagctttgaactggcgcgc

SEQ ID NO: 3243 - DNA, 721 bp, Zea mays
  misc_feature (95)..(95): n is a, c, g, or t
  misc_feature (601)..(721): n is a, c, g, or t
  Peptide Sequence Number=SeqID_9485
  Probeset Number=SeqID_17646
gattcggactcggtacccggcgatcctgtaagactcgaactgtatgcatcggtcgccctttttttttttttgtagcgataatttatacatatgcncatttaaaaaaaaactgagggtgtagacaataaccaacataatcacatgctacgatcactttctccaagcaagtttttcacagtatattttttaactacggtgctacataactcatattaacttgtgttgcgctctctgaccaagttacctgcgcaatcctatccctagatccctctgctcaacacacagatggctgtggcatttcagaggggcacacacactcccagcgtgcacggtgtcgaactgtgttgctcctcgctagcacttgtgaagtaatcataatttatcttcactacaagagttcaagcctcctttctagttatcctcaagcaatagattccgagggcatccttgatttcatgcacaaccgactcagcgaggtgcaggtagagacccactgtatatgctcaataaagcagcttcagaactagttgttccactaaaggactctccatcgttgatcttgcgcagggagagcatttgctattggtaagcgaagttcctnnnnnnnnnnnnnnnnnnnnnnnnnnnnnnnnnnnnnnnnnnnnnnnnnnnnnnnnnnnnnnnnnnnnnnnnnnnnnnnnnnnnnnnnnnnnnnnnnnnnnnnnnnnnnnnnnnnnnnnnn

SEQ ID NO: 3244 - DNA, 875 bp, Zea mays
  Peptide Sequence Number=SeqID_9486
  Probeset Number=SeqID_17647
tgcagcagcgtggcgtggtgtttattcagggctattattacgcccgtccgatggacaataaccagcttcgcgcctggcttaatcagcaggggcgccaaccgcttcccgttgaggaccaccatgagcctgaactgcatcattcttgatgattatcaaaatgttgccctgtcgctggccgactgggcatcgctgcaaccgcaggtacaaactagcgcgctgcaccgccactacgccgacgaagatgaactggtcgctcacatcgcgcacgccgacattctggtggtgatgcgcgaacgcacgccactcagcgcccggctgataggccgcctgcccaacctgaagctgattgtcacctccggcatgcgcaatgcctcaatcgatctgcacgcctgtgccgaacggctgattgcggtgtgcggcaccgccagtagcagcgcggcgccgctggagctgagctgggggctgctgctcggtctggcacgccatattccggcggagagccaggcgctgcgcagcaacggtgcgtggcagcatacgctgggcatgacgctgcacggcaaaaccctcggcctgcttgggctgggtaagattggcggtgagatggctaacgtggcgcgcgcctttggcatgcgcgtgtgcgcctggagccagaacctgagcgaagcacgcgcaacggcgtgcggcgcagagaagatggcttcgctgccggcgctgctcagggcgagcgatgtggtatcgattcatctggtgctgagtgaacgcacccgtcatctgctggacggcgtggcactggcgcacatgaagccgggcgcgctactgattaacacctcgcgcgccgggattgtcgatcagcaggcgatgatcagcgcgctgca

SEQ ID NO: 3245 - DNA, 437 bp, Zea mays
  Peptide Sequence Number=SeqID_9487
  Probeset Number=SeqID_17648
tgcagcgtttcggcgacatgcacgtgcaggcggtggccgcggccgcgctcgccgatcgtgcggccgccgcgttgcagcgcgcatggtcgcggcgcgacgcgttgacggccgacgaacgcgccgcagcggcgctcgccgtgtcggacgcgaagatcgtcgcgcagcgcgcggcgctcgcgaacggcgaggcgctgttcgatgcgtgcggcgcgcgcgcgacggccgcatcgctcggactcgaccgcttctggcgcaatgcgcgcacgcatacgctgcacgatccgctcgactatcggctgcgcgacgtcggccggttcgcgctgacgggggaatggccgcaggcgtcgctgtatacgccgtcaaccaaacgttgctatcggaaggcccggtgcggtgccgctgcacgagcggcgctgcgctgctcgcagcttgcgtga

SEQ ID NO: 3246 - DNA, 229 bp, Zea mays
  Peptide Sequence Number=SeqID_9488
  Probeset Number=SeqID_17649
atggccgcacaacgtaacgctaagatttctgaaagaaaaaagccgcagcaggcgcgatccagtgagctggtggcggctattttgcaggcggcgactcaggttctggagcaggaaggtgccacgcgctttaccactgcccgcgtggccgaacgggcgggcgttagtattggatcgctgtaccagtattttcccaacaaggccgctatccttttccggctgcaggcatgca

SEQ ID NO: 3247 - DNA, 375 bp, Zea mays
  Peptide Sequence Number=SeqID_9489
  Probeset Number=SeqID_17650
aaagaaaatcaagtagtaggactacaccatataacagctatcgccaatgaagcgaaaagaaacctggatttctataccaaagtattaggattacgcctggtcaagaaaaccgtgaattttgacgatccgggtacttatcacttctattatggtaatgagtcaggcacgcccgggaccatcctgacctttttcccctgggaaggcatcggtgccggccgtaacggaaccggactggccacacatatcggctacagtgtcccgaaaggggctctggcattctggaaagaaaggctgacacagtttaatgtaccctatgaacagggagaagtattcggtgaatccatgatctcctttaaggatccggacgggctgcag

SEQ ID NO: 3248 - DNA, 338 bp, Zea mays
  Peptide Sequence Number=SeqID_9490
  Probeset Number=SeqID_17651
ctaggggccgtggcggtgcaagtgcatggaggcggcgcaaagggggagcatgcacgggtagagcacgagcgccctgtggcagtccccggcgcggaggagggcatagatcatggtggtgcaagtgcatggaagcggcgcaagggggggcatgcacaggtagaacacaagcgccctgtggtagtcctcgacgcggaggagggcatagatcatggcgaagacgagggaccaagcaagaacagggttggaggtggtcaagccccgatgacacgtctggatgtgaggcgacagtcgcggcaccagagcagggcgtggccagcgacaacgacggtccaggcgac

SEQ ID NO: 3249 - DNA, 748 bp, Zea mays
  Probeset Number=SeqID_17652
ttttctactggtattacctgtaaaaggcacaatagaccaaaagtgaaaaagcgccagttttgcgggtcacgacccaagagggcatgaccaatccgagtgccgccgatgaactggcgctgatcgatcgctactggcgcgccgccaattatctgtccgtcgggcaaatctacctgatggcgaatccgctgttacgcgaaccgttgcagcccgggcatatcaagccgcgactgcttggccactggggcacgacgcccggcctgaactttatctatgcgcacctcaaccgcatcatccgccagcgcgaggtggatctgctgtacgtctgcggcccggggcacggcgggccggggatggtggcgaacagctggctcgaaggcagctacagcgaaatctatccgcacgtcagtgaagatgccgccggtatgcagcggctgtttaagcagttttcatttcctggcggcattcccagccatgcggcaccagaaacgccgggctcgattaacgaaggcggcgagctgggctattcgctgtcgcatgcgtttggcgcggttttcgatcatccgcagctgatcgtaccctgcgtgattggtgacggagaagccgaaaccgggccgcttgccgccagctggcacggcatcaaattcctaaatccgcagcgtgatggtgcagtgctacccattctgcatctgaacggctacaaaattgccaacccgacgctgctggggcgcagcagtgatgacgatctgca

SEQ ID NO: 3250 - DNA, 255 bp, Zea mays
  Peptide Sequence Number=SeqID_9491
  Probeset Number=SeqID_17653
ctgcctgagagggagggaggagtgttggtcgctcgccaggagccagcatgggacctcgtcggcgcaagggaggggacaccgttgcccggagccaagagccatctaccaggaaccagcgccgacaccacttctagagctcaatcgatcagcggctcaggtcagatccaccttattccatccataaacaccctaaggcatccgcttctcatcgccttatgcttctccaaggcggcggggcaacaccatagaggctga

SEQ ID NO: 3251 - DNA, 290 bp, Zea mays
  Probeset Number=SeqID_17654
cgttgacctccctctcctcttggcccaccgaagcatatccccttcttgttacgattggatccttccgttagacctgtatcttctgcctcccttctatttatttcccccctcccttctaaacctgtcctccaggttctctccattcgctatggcgtctactcacaactccaagcagcgcctggcgctcgctatctgcgatttcctctccgcttcgacaaatgacggcactctcaccgccgacgacaaggactccatcgatgtggctatcaactgtatcgcccaatccctca

SEQ ID NO: 3252 - DNA, 844 bp, Zea mays
  Peptide Sequence Number=SeqID_9492
  Probeset Number=SeqID_17655
cgcatcgccgttgcgcgggcgctgctgaaaccggcccgcctgctgctgctggacgaaccgggatccgggctcgacagccagagcgagcagcacgtgatgggcgcgctacagcaggccgcacagcagcaaaccaccttaatgattacccatcagctgcacgctctcgaccagtgggatgaagtgtgggtgatgcaggctggacaactggtgcagcagggccactggcaacagctgatcgctgaagccggcccgctgcgcgagctggcgcagcatcgtcttggcgtggtgctggcgattgtcacgctgctcgccagcatcggcttgctgacgctgtccggctggtttcttgctgcctcttcgctggctggcgtcgccggcctgtacagcttcaattacatgctgcccgcagctggtgtgcgtggcgcggcaatcacccgcaccgccgcgcgctattttgaacggctggtgagccacgacgccactttccgcgtgctgcaacatctgcgcgtctttaccttcagccggctgatggcgctggcaccggcgcagctggcgcgctttcgcaacggtgaactgctgaaccgctttgtcagcgatgtcgataccctcgaccatctctatttacgtgttatttctcccctgctgggtacggcggtggtgattgtggtggtgacctgtggcctggcgctactcgatatgcgactggcgctgctgctcggggcgattatgttgctgacgctgctgctgaagccgccgctaatctggcgactcggcgcgcgccccggggcgcagattgcccgttaccaagctcgctggcgcctgcaactgacgccctgggtcaatg

SEQ ID NO: 3253 - DNA, 528 bp, Zea mays
  Peptide Sequence Number=SeqID_9493
  Probeset Number=SeqID_17656
ccatcgcttctggcagcagatcaaagaccagccggtcgaattcgtctggcagtcagaagatcacatcagcctggtagcggtgctgcgcgtcggcccgacccagcatctgattcagggactgcaccagtcgttgttccgcgccgagaagcgcatcggcctgattctgttcggcaaaggcaatatcggctcacgctggctggagctgttcgcgcgcgagcaggagacgctgtcggcgcgtaccgggtttgaatttgtgctggcgggcgtggcggacagtagccgcagcctgctgagctacgacagcctcgacgccagccgggcgctggccttctttgatgatgaagccgaagcgcgcgacgaagagacgctggtcctgtggatgcgcgcgcacccgagggacgatctggtggtgctcgacgtcaccgccagagattcgctggcgcagcagtatcacgagtatgccagccacggcttgcacgtgatcagcgcccacaaagaggccggcgctgccagcggccagagctggcg

SEQ ID NO: 3254 - DNA, 801 bp, Zea mays
  Peptide Sequence Number=SeqID_9494
  Probeset Number=SeqID_17657
cgttgatgcacagggtgatgcctgggccacgctgctggaaggccagcccggttttatcttgtcgcccaacgccaccacgctggatatcgcggccggtcctgacgccagcgatccggcggccgctggcatgaccgatggcgcgccggtgggcctgctcggcattgagctgcacacgcggcggcgcaaccgcatgaacggcgtgctgacggcgattggcggcggcctgcgcgtgcaggtcgaccagagctttggcaactgcccgcgctatattcagctgcgcgatttccgcttcgatcatgcgcccggcagggcttatcagggcgaggttgagacgctcagcgcgctggatgacgccgcgcgcgccgccatcgggcaggcggacacgttttatgtcaccacttatgccgaccaggcgcgccgtcaggtggacgtttcgcatcgcggcggcaaagccggttttgtgcgcatcgctgccgatgatgtactgaccattccggacttcaacggcaacctgttcttctccaccctcggcaatatcgtgctcaacggcaaggccgggctgctgtttatcgactacgccagcggcgatgtattgcaaatgagcggcgatgccacggtgataaccgattccgccgaaatcgcggcctttcagggcgccgagcgcctgtggcgctttagcgcgcgccgcatcgtgcgccggcgcgctgccctcgccctgcgctgggccgatcaaccagacggcgtatcgcccgcctcgctgatgaccggcgactggccgtccgccagcgaacgccgcaggca

SEQ ID NO: 3255 - DNA, 351 bp, Zea mays
  Peptide Sequence Number=SeqID_9495
  Probeset Number=SeqID_17658
ccgtcaacgcagtccattttcggcgcggcggccggtggattcgggcaggcggcgtccagactgcacgatccggcgccgtcgccatcggattttcacggcggactcttgggctccgagggcctgcacttgcaccacccaaggagcgacgtccacgggcacggcggcgacgagctgtcgggcgtggtcgcgggcggcagctgcaagctgaactactcatcccacgccggcgcggccgccacctcgtcaccgggcgcagccagcggcgacaagccacccgacggcggtgccggcgctcccggaaggccgggacggggcgagggcctggatccgtggatttgtacatcggagtag

SEQ ID NO: 3256 - DNA, 431 bp, Zea mays
  Peptide Sequence Number=SeqID_9496
  Probeset Number=SeqID_17659
ttgcatgcctgcagccgaacacaggactgtcatattatcacctcctaccacaggtggcctttcggacagactggatctggtcatttctccccaattggtggctaccatgccgagcagaatatggtgttcatcttggatgtagcatgtttcaaatatcctccgaattgggttccatcgcaacttctttgggaagccatgaatatgactgatgactcaactagacttcttagagggttcatgcttatatcaagaaaggttgcagcccttcattgttgcacacagtgagttgcagagatgaaaactagaaaagcatgtcaatgttttgtgttgaagatttaccaagtcttctcaaggtagagattggtactagcgtgggcttggttacctctggtctgagtgctagctatcgaatttcagatggagggctgcag

SEQ ID NO: 3257 - DNA, 243 bp, Zea mays
  Peptide Sequence Number=SeqID_9497
  Probeset Number=SeqID_17660
aaaaaacaaaccaatttgggataagattaggaaatcacccctaaaaaaaacaataattttatttgttccactacaagcttggaaacattcccaggatcaggggctgccctcagggtttattcttaggtccggaaacaattttgtggttgtaaaaaaaaggcctcacaaaagtccccaaaaaacattagttttttttgaaaactgagagtcgtttggggcatttttagatgtccatagtccctt

SEQ ID NO: 3258 - DNA, 485 bp, Zea mays
  Peptide Sequence Number=SeqID_9498
  Probeset Number=SeqID_17661
catacgcaacgtttaactgctctgcgccgccgcgcaacgcctgcgttgaagtcggcgggaaaattcatcatcatcagtgcagtaacctatgcgcccggcggcctggccggctgggcagtgaaatcggtggcgcgccgtccgctgcgcctgttgctgccgaccgccctggaaccgttgctgagcaaggcgtttatccgcctgtcagcacgtttcatcagggagagcgatgaaaagactcgctggttaaccagctgctcaatgtccacagcggcgcgcgtttgccgctgttttccgtggtacgcgaagagcggctgctgggcgtgaagcgcgtaccccagcgtgagctgggcacgccgcgctttacctatgacgaagggctggcccagctgtacggcacaccgccgatgtggccaaccccgacgcgcggcgttagcgagatgcgcctggcgctgcgctaccgaccggatcagtctctgctgcgccat

SEQ ID NO: 3259 - DNA, 283 bp, Zea mays
  misc_feature (140)..(140): n is a, c, g, or t
  Peptide Sequence Number=SeqID_9499
  Probeset Number=SeqID_17662
tgcaggttgcagggcaacattggctttatgtccaagctgtcgaatgtagcggaccacttgatgtgtctcagcctggcgaaagtgctatttggcgccgctatgctgtttgcggcgctgcctcggctgggtggctttgccgnctgcggtgaatcgttcgctacggttctctccgctttcccttctacctgtgtcggcagcagcgaagcccttttctcccgttcggttttctttcccctacttttccttggctgtcgttgatcgtattggttctctccgcctgccc

SEQ ID NO: 3260 - DNA, 672 bp, Zea mays
  Peptide Sequence Number=SeqID_9500
  Probeset Number=SeqID_17663
ataaaccgaccgcgccagcagccggtgctgctggtgctgacgttgctgatcacgctggcgctgggagcgctaccgctgctgagctacgcggccaaccggctggtctccggacagccgctgatgctttggcaggtaacggcgggctggctgctgctgctgccgctgttatggctatggctgggattgtggtggccgccgggacgcggcgcggcgctggcgcagttgctgggcgcggagctactgttcgccctgctgattggcatcggcggccacgccgccagtgagctggcccgcagcggcagcccgctggcgcgtaccgcgctgggcagcggcctatggtgtgcggcaggattagcgctgctgctggccgccgaagcgattcgccagcttagccagcagacgccgctgcgtattctgcttaatctgcaactgtggctgccgccgctgatactgctgctgagtggtcagctggacgcgctgtcgctgctgaaagagtacagcaatcgcaccgctgtctttaacgccgcgttcagccagcatctgctgctgctgggcggtacgctgctgcccaccttactgattggtctgccgctgggactcgccatcgcgcgtcgcgcccgctggcaacatgccgccttcagcgtgctgaatctgatccagaccgtgccgtct

SEQ ID NO: 3261 - DNA, 310 bp, Zea mays
  Probeset Number=SeqID_17664
ctgcagctcttcgcgcggctgtgctaccgcgattgcgccagtatggcctcagcgtgccgggcttggaccgatgggctcgtcatcttgcctgtggagcacgttcgacctctgcgcacaccgctacgactgggaggtggcgtctggcatcgtcacttgcctcctagtgtggaagcctgcgtcggctacgcctacgcgatcacgaggtagcaaaagtcgtcctggacctccaagcgcgcgacatccgcgaggtggtggctgatggatgccgcagccacatagatgcgacgctcgctatcatcgccacgcggcg

SEQ ID NO: 3262 - DNA, 225 bp, Zea mays
  Peptide Sequence Number=SeqID_9501
  Probeset Number=SeqID_17665
ctgcagagcaacgcgctcgccgcgctcgaggccgtcgacgccgccgcggccgacgaggtcatggacgccggctgcgtcacgggggaccgcgtcaacggcatcgttgttcgttgacggcgtttctggctcctggtacatcaagtttgatacgtttactcctgcagttttttctcgtctccaaacgaccgagtacattcatcatgatgagctaatgaagcctctgca

SEQ ID NO: 3263 - DNA, 248 bp, Zea mays
  Peptide Sequence Number=SeqID_9502
  Probeset Number=SeqID_17666
atggtcgagacactactggaagttaaaaacctgacgaaaactttccgttaccgtacaggcttgttccggcgccaccatcttgatgccgcgaagccggccagttttaccttgcaaccccgaaaaacactggcaattattggtgcaaacggttccggcaaatccacactggccagaatgctgtcaggtgtaatataaccgacatcaggtgaaatattaattaatcatcacaagctgatttatggcgatta

SEQ ID NO: 3264 - DNA, 1396 bp, Zea mays
  Peptide Sequence Number=SeqID_9503
  Probeset Number=SeqID_17667
atgctaaggtctgaccgaaataaagttagttatgttctttgatcacttctcatgatgaatctgctaataccaaatcttttaatctacacaccttttatgtatttaatatcaaacttaaatatggtaggaacctaaaatggttcgtatctgtgatgatgagaggtagtacattgtccttttttaataattgcatgcttatgaacatctgtccatttagttgtttttgcatttataaaaaatgatagttgtttttcaatcaggaattcaagctaaatcctaatgccaagagtttcactccgtcagcatctttgaggccaccacaccctgcatcatctgatgcatcatattactatactaataacattccagcagcaccacttggacctggtttgccagtgggcatgggggtgagcctttgtatcactctttctttttcgtgtttattctttgaaagtttgtatgaaatagatggaacatgatttcaaaaatgcagattgtcaaattctggtctcagattaatgagttagttttctcagtagacatcactgaagagagcactagtttaccgacaaaaataattggtcattaagaagcagttacctgcttgtcaggcaccttatataatgattcttattgttatttttaatgtaattgttattgttttggccctataaactctccaatattagatttctgaactggtatctctggtttcctgaattgtttacgatattaagtagaacctgaaagtttactgaccagtatgttggtaagatcacaattttgcagacagatattcactgaaacaagtaggctttcatgtcctttttttctctcaaagtatctcatggtatgtttgtactcccaattataagatgttttggcttttttagataaatcatgttaactgttttgaaaagtcaaaacgtcttataatttggaatggagggaatactattttattgttattgagtattaatgaagtgtaactgttttgattctcttcatggatctattttaatttctcggtcaccaaatcagtcctaaatgtttgagattgccccaaaaaaaaaaaaaaaaaaaaaaaaaaaaaaaaaaaaaaaaaaaaaaaaaaaaaaaaaaaacaaaaaaaaaaaaaagggggggagggttttaaagaatcaaatttttacttcccgcttgcttcccaaataaaaaattttgggggggggcgccctaaaaaaaaatttattgcccccggttttaaaacgacaaaacttgttaaaatttgggggtccccaaatttaatggggggggggataaacccctttccgccagggggaaaaaatgggtaaaagccccaatttattggttttttcaaaaactctcttcacctccgaaggtgaaaggaaaaccg

SEQ ID NO: 3265 - DNA, 287 bp, Zea mays
  Peptide Sequence Number=SeqID_9504
  Probeset Number=SeqID_17668
tgcagcgcaaatgggcccgcgagctggattatcggttgattaaggagttgtgggcgtggcaccacgacaagctggcggtgcgttttgcctatgagtggcgtgatgacagcggcaactggtttcgcagctacggcaatgaaaactggcactttggtgccgatggtctgatgattcagcgcttcgcctgcatcaacgatttgccgatcagcgctgaagcgcgactgtttcactggccggctggcagacgcccggacgatcatccgggcctgagcgagctgggcctgtaa

SEQ ID NO: 3266 - DNA, 481 bp, Zea mays
  Peptide Sequence Number=SeqID_9505
  Probeset Number=SeqID_17669
ccccggcgatccgcgccccggtggcggtctggtgctgacattgatcgtcgcccgggcgcgcaacggcgccattggccgggcgggggctatcccctgggatgtgccggaggatctgacatccttccagcgcgagtcgctgggcggggcggtgatcatgggccgcaagacctgggagagtctgccggtgaagccgctgcccaggcggctcaacatcgtcgtctcggcgcggccggatgcggcggagctggtggcgccggatgtcggcgcggcgatcgcgctggcctatgagcgtggccatgaccgggtttacggcatcggcggggcgcggatctatcaggagatgctgccgcttgccgaccgtctggtgatctccgaggtcgcgctggatgttccggatgccgacacgttctttccggatttcccggcgccagcgtggcggctggtgcatgagcgggtgttgcgggcgcaggcgccagactga

SEQ ID NO: 3267 - DNA, 675 bp, Zea mays
  Peptide Sequence Number=SeqID_9506
  Probeset Number=SeqID_17670
atgggcaccggcctgtatctggagccgtcgcatccggagtgtgtaaaaaccatcagcgtggaacagctgaccgacaagctgatttacgacctcggcggactgccggagaagccggaggtcctggccgggctgatcggtgaaatcggcatctccagccgcttcacgcctgatgaagagaaatcgctgcgtgccgccggacgcgccagcgcggccaccggcgtaccgattcaggtgcatctgccgggctgggagcggctcggccataaggtgctggatattctggcgcaggaaggtgccgatctgcgccacaccgtgctgtgtcacatgaaccccagctttgccgacaaaacctaccagcgcgagctggcagatcgcggcgtgttcctcgaatacgacatgatcggcatgagctactactacgccgacgaatcggcgcagtcaccgtccgatgaggagaacgcgcgcgccatttgcgcactgatcgacgacggttatctgccgcagattttgctgtcgcaggatgtcttcctgaaaaccatgctgacgcgttacggcggtcacggctatggctacatcctcaaacattttgtgccgcgcctgaaacgtcatggcgtcagcggcgaacaactcgaaaccctgatgatcactaatccgcaacgggtgtttggcggataa

SEQ ID NO: 3268 - DNA, 338 bp, Zea mays
  Peptide Sequence Number=SeqID_9507
  Probeset Number=SeqID_17671
ggtcataggatagaaatggttaagagacctgtatttgcgagtcgattaggggttcatagtgtgaggctgggctactttccaggaggattccccgtaaaagctcctttgtctcattagagtcgtgtctacggcttatgtcttactgttttccgagcgatgcgtgcggatatttatagccagaaaagtctgggtatgcattgcggtgtattagctacagcattgtgtatgtcgggggtaggtcatatcctctccggaacagcagtaggtgagttataaggggtatcgaactataagtaggaatgttatttgtgggcataatttgtggaaggtgtctccgg

SEQ ID NO: 3269 - DNA, 654 bp, Zea mays
  Peptide Sequence Number=SeqID_9508
  Probeset Number=SeqID_17672
tatgccggggcaccagccaaaaatgcccatcgcctgccggcgagcattcttgaccttttcgccagcctggttgagcccttcaccattgccgcgaatatcacggcgttcctcaaaccgcagccacaggatgtggcgctgatttacggtgccggtccgatggggctgaccgccattcaggtgctgaaaggcgtgtacggcgtacagcaggtgctggtggtggaccgcctgccagagcggctggcgctggcgcagcaaaacggtgccgatcgcctgtataacaacagcgagatcccgctggcggcgcagctggaaggcgttcagccgacgctgattattgacgccgcctgccatccggcgatcctcgccgaagcggcggcgctggcctcgccggcagcgcgcattggcctgctcgggttttctgctgagccgtgcagcctgacgcagcaggcgttgaccagcaaagagctgtcgctgtttacctcgcgcctgaacagcaaccgcttcccgcaggtgattgcgtggctggaacagggactgatccagccggaaaaactggttacccactatttcccgctggcgcagatcgagcgcgccatgacactgtttgaacaagacccgcgcacctgctgcaaagtgatcctgcaaatggattga

SEQ ID NO: 3270 - DNA, 221 bp, Zea mays
  Peptide Sequence Number=SeqID_9509
  Probeset Number=SeqID_17673
tgcaggttgactataaaggatccccctggcgtcgcgcgagatatacggcacggcggcgtccgcgcacaaggacctgcgcctgtaacgacgggttcctgcacgacctgctttttgagcccgagcgcgacgaggtcggcgccgagattgtcgcctggatggacgggatgctccggctccggcggcaggctggatgaagggatggccgtgctgcttctctcctt

SEQ ID NO: 3271 - DNA, 801 bp, Zea mays
  Probeset Number=SeqID_17674
atgggcaaaaacgccgagcgcgaaaaagtgatcgacttcagccgcgcctacgcaccgttcttcctcggcgtgttcggcccgaaaggcgagacgctgaaagatgcggcggcgctgagcggtaaatcgattggcgtgacgcgcggtgcggtagaggacatggtgctgagcgatgtcgccccgaaagatgctcaggtgaagcgctacgaagataacaacaccacgctgtccgcctatctctccggtcaggtgcagtatgtcgccaccggtaacctggtggtcgcggcgattgcgcgccagaacgcggaaaaagccccggtgccgcagtttatgctgaaagattcaccgtgctttatcggcctgaaaaagaatgagccagcgctgaaagagaaagtgaacgcactgattgagcaggatctctggccgcactggccagagctgctggccggactgtgggtcacggtgcagcttacggtgctggcgacggtgggcggtgtcggactgggtattctcggcgcggcgctgcgcagcggcaaaccgggctgggccagccgcctgtggggcatctacgtcgagctgattcgcaacacgccgttcgtggtacagctgttttttatcgtgtttggtctgcctaatctcgggctgaaactgacggccggtgaagcggcgctgctggcgatgctgattaaccttggcgcttacagcactgaaatcatccgtgccggtatccaggtcacgccgcgcgggcagtgggaagcggggcgagtgctcgggctgagccgcacgcaaaccttcatccgcgtg

SEQ ID NO: 3272 - DNA, 1121 bp, Zea mays
  misc_feature (601)..(1121): n is a, c, g, or t
  Peptide Sequence Number=SeqID_9510
  Probeset Number=SeqID_17675
aattcggcacgaggctcctcccaaccctagctcgccggccgcgccgggccccttcgactcttccccttcgcacctctgattcctcgcgccctcgtcccccgctcaatttccagaagcttctagaaccgggtttccagccctaatcccgcaaaaagatgctttcttgcgcctagtagcctgggacggaggcatggacagcggcggcggggagggaggctcgactggcgggaggttccctattctgcaggcgaatagggaccccgagtcaaattgggaggtggacgttgccaaaagcctcgagcagtacctgctcaagatctgttcaggggaggtctccggcgaggacgagtcccattctgtcaactttgccgaagcggcgttactactccaaggatcggttcaagtatacagtaggaaggtggagtacttgtactccttggtgcttcacgcgatagagttcctctcacacaagaaacaggatcaacaggaaaatgtaacagctcaatctaatcaaagcgaccctagcacgattcccagtgaagattatatatttatggggttagatgatgtcctaatggaaacaaggacgtctctggataannnnnnnnnnnnnnnnnnnnnnnnnnnnnnnnnnnnnnnnnnnnnnnnnnnnnnnnnnnnnnnnnnnnnnnnnnnnnnnnnnnnnnnnnnnnnnnnnnnnnnnnnnnnnnnnnnnnnnnnnnnnnnnnnnnnnnnnnnnnnnnnnnnnnnnnnnnnnnnnnnnnnnnnnnnnnnnnnnnnnnnnnnnnnnnnnnnnnnnnnnnnnnnnnnnnnnnnnnnnnnnnnnnnnnnnnnnnnnnnnnnnnnnnnnnnnnnnnnnnnnnnnnnnnnnnnnnnnnnnnnnnnnnnnnnnnnnnnnnnnnnnnnnnnnnnnnnnnnnnnnnnnnnnnnnnnnnnnnnnnnnnnnnnnnnnnnnnnnnnnnnnnnnnnnnnnnnnnnnnnnnnnnnnnnnnnnnnnnnnnnnnnnnnnnnnnnnnnnnnnnnnnnnnnnnnnnnnnnnnnnnnnnnnnnnnnnnnnnnnnnnnnnnnnnnnnnnnnnnnnnnnnnnnnnnnnnnnnnnnnnnnnnnnnnnnnnnnnnnnn

SEQ ID NO: 3273 - DNA, 743 bp, Zea mays
  Peptide Sequence Number=SeqID_9511
  Probeset Number=SeqID_17676
atgcacgggccggccgtcggcgcggggctcgtcgccgggctgctcgccgacatctcgatcgccgcgaaggatgcgcgcatcatcgacggccatacgcggctcggcgtcgcggccggcgatcatgcggcgatcgtgtggccgctgttgtgcgggatggcgaaggcgaagtactacctgctgctgtgcgaaccggtgagcggcgaggaggccgagcggatcggcctcgtgtcgctcgccgtcgagccggccgacctgctgccgaaggcgtacgaagtcgcgcagcggctcgcgcacggttcgcagacggcgatccgctggaccaagtacgcgctgaacaactggctgcgcagcgcggggccggcgttcgatacgtcgctcgcgctcgaattcatgggcttctcggggcccgacgtgcaggaaggcatccggcggccgcacctgccgtgccggccgcttcgcccaccagtcaaccaggatgcccgtatgacgaacgatgcctccggctccaatcctttcgccggctttgccggtttcaagcctgccgacatgctcgaccggatgtgggacatgatgcggatgtcgccgttcggcgggatggcgtcgtttccgggcgccgcatcggggctgccgccgtcgctgtcgagcatgtccgacatgatggcaacgctcacgagcgtcgaggaactcgacaagcggatcaccgatctgcgcgcggtcgagcaatggctgaagctcaaccgggc

SEQ ID NO: 3274 - DNA, 213 bp, Zea mays
  Peptide Sequence Number=SeqID_9512
  Probeset Number=SeqID_17677
ctgcaacacatccctttgggccaccattaccaaggttgccgttaaggaaaactgcaggcggcagggccacggcgaggcgcttctggcgggcgcaatggaacggttccggcggcggaaggttcaacggctttcccttcaagttgaccccacgaggacggcttccgtggcgctgtaccgcaaggccgggtttcaggttgacaccaccgttgaggg

SEQ ID NO: 3275 - DNA, 344 bp, Zea mays
  Peptide Sequence Number=SeqID_9513
  Probeset Number=SeqID_17678
cgcatgcggcatactggaacgtcggcgagagcggcgccgttcatccggacatctgggaattcggcctcacgccggtgttccgcatcatcaaggacacgggctggttccggccgttcttcgaggccggcatcggcgtgcggctactcacgcacgcgcggcagacggcggaccgcacgatgtcgagctcgtttcagtttgcggatctggtcggcgtcggcgcgcagttcggcgcgcaccagaattatctggtcggcgtccgcttccagcacctgtcgaacgcgggcctcgaccagccgaatcccggcgtcaacttcagccagatctacgtgcagtacaacttctga

SEQ ID NO: 3276 - DNA, 1130 bp, Zea mays
  Peptide Sequence Number=SeqID_9514
  Probeset Number=SeqID_17679
tacaatgaaggttctcatcgttctcgccgcctgtgtggtggccgctctggccggagttccctccgagtctgagatcaaggcccactgggagagcttcaaggccacccacggcaagacctacgccaacgctgtcgaggaggcctacagggccaaggtcttcaaggaaaatgccatcaggatctccaagcacaacgaccgtttcgccagcggcgaggtcaccttcaaggtcggctacaaccagtacgctgacatgcacacccacgaggtcaccgagaagatgaacggtttccgcatggagatgaagaagcccagcgccttcgtgcactctgcttccaacgactcctggccctggagcaagaaggtcgactggaggtccaagggatacgtcacccccatcaaggatcagggccagtgcggttcctgctggtctttctccgctaccggctccctggagggtcagctcttcaagaagaccggcaagctggtggctctcagcgagcagaacctggtcgactgctcttgggactacgataaccagggttgcaacggtggtctgatggactccgctttccagtacgttcaggctaacggcggtatcgacaccgaggagagctacccctacaccggcgaggacggcagcgcttgcgcgtacacaagcgataacagcggtggtgtcaacaccggctacaccgacgtcaaggccactgagaacgacctccgcgacgctgtcgagaaggttggccccgtgtctgttgccatcgatgccagcaactggagcttccagatgtactccaccggtatctactacgaacctgcctgctcctccaaatccctggaccacggtgtgctcgccgtcggcttcggcagcgactggcccaacaaggagttctggatcgtcaagaactcatggggtacctcctggggtgaggaaggttacatcaagatggcccgcaacaagaagaacaactgtggtatcgccaccatggccagctaccccaccgtttaagaccgagactgatttaatagaaggccgagttaataaaatctggaaaaataaaaaaaaaaaaaaaaaaaaaaaaaaaaaaaaaaaaaaaaaaaaaaaaaaaaaaaaaaaaaaaaaaaaaaaaaaa

SEQ ID NO: 3277 - DNA, 361 bp, Zea mays
  Peptide Sequence Number=SeqID_9515
  Probeset Number=SeqID_17680
tgcagcagagcggcgcgctgctctccggcatgctgaatatggacgcctacgcttacggctttaccaccgagaacacccattatggtgccacccgcaacccgcgcgatctgtcgcgcgtggccggtggctcatctggcggttccgcggcagccgtcgctgccgggctggtgcacttttcactcggcaccgacaccaacggctcgattcgcgtgcctgcttcgctgtgcggcattttcggcctgaaacctacctttggtcgtctgtcgcgcagtggcagccatccgtttgtcgccagcctcgatcacatcggtccgtttgcccgctcggtggaagatttgagtctggtctacgatgcgctgca

SEQ ID NO: 3278 - DNA, 340 bp, Zea mays
  Peptide Sequence Number=SeqID_9516
  Probeset Number=SeqID_17681
tggttcaggaacccattgaaagccattgcaaagtggatccgcaattatttaacccgaatgctgatattataatgcgtgcccgtggtatgtccataagcgatatcggtattatgaatggtgattaactcgctgtgcataaaacgcagtatgttcaaatcggacaggtcatcgtggcacggattgaagatgaagtcacagtaaaacgtttcaaacaaacaggaaacaagatagaactgattgctgaaaatcctgagtttaagcctatcgttgtggattaacgcgaacagaatttcaccattgaaggctagcagttggcgtgattcgtaacggggattggttc

SEQ ID NO: 3279 - DNA, 586 bp, Zea mays
  Peptide Sequence Number=SeqID_9517
  Probeset Number=SeqID_17682
cggccgtctgtcgattccttaccgctttggtgaggaggcgatagatacgcagcactattacgggctgtggaacggcgcgcgcgagcgtatcgcggcgcacctcggccatgcggtgaagctggagatcgagccgggccgcttcctggtggcggaatcgggcgtgctggtgtcgcaggtgcgggcggtgaagcagatgggcagccgtcactttgtgctggtggatgccggtttcagcgatctgatgcgtccgtcgatgtacggcagctatcaccatatttcgctgctgcctgccgatggcagcgcgccgggtgacgcgcatgtggagagcgtggtggccgggccgctgtgtgagtcgggagatgtgtttacccagctggaagggggcaaagtggaaacccgcgcgctgccagcggcacaggtcggcgattatctggtgttccatgataccggcgcttacggcgcatcaatgtcctccaactacaacagccgtccgctgatcccggaagtgctgtttgagcagggcgtgccgcgtgagattcgccgtgcgcagaccattcaggaactgctggcgctggagctgaactga

SEQ ID NO: 3280 - DNA, 350 bp, Zea mays
  Peptide Sequence Number=SeqID_9518
  Probeset Number=SeqID_17683
tgcagcgcattcatgctgactggcagcagccgctggatgtgccgcatctggccagcgtttcgttcatgagcgttccgcgcttccatctgcatttcaaaagcgtcacgcagacctcgccgattcagtatctcaagtcgctgcggctgcatcaggcgcgtttgatgatgattcgcgataatctcaccgccgccggtgccgccgcacgtgtcggttacgaaagtgattcacagtttaaccgggagtttaagcggatgtttggtcgcaccccggctgacgaggcgcgggtgatgaaacgcgcctttgcgctgctgccgccggaacagttatccgcgcggctacaggcacattag

SEQ ID NO: 3281 - DNA, 319 bp, Zea mays
  Peptide Sequence Number=SeqID_9519
  Probeset Number=SeqID_17684
gatccccctgaaggaaacttccaatattaggtatgagctattgccagctcttgatattgtttgtcaaggtgctgatgttgccaaggaaggagctaaattcagtccttccaggttgaggagttttgactacgaaccgctagctgcagttagcatcggctaggtccatcgagcagctttgaaggatgggtcgtatgttgtcgtgaaaatgcaataacctggggttgcagatagtatataaagtgatgttgagaatgtaagactacttctaacttacacaaatctcattcctaaaggtatttttcttgatagacctatgaag

SEQ ID NO: 3282 - DNA, 769 bp, Zea mays
  Peptide Sequence Number=SeqID_9520
  Probeset Number=SeqID_17685
ctgctggcgcgcaaggtggatgcggtgatcgtgccgaaaatttttgccgactaccatctgcgcaaccattttggcagcgggctgatcgtcgagggtacgctgggcgccgatcccgcgcgctttgtgatgcgcgtagagccaggcaatgagacgctggtcagcattctcgataaagcgctgctggccatcccgccggaaacgctgtttaagctgatggcgcagtggcgtcaggcggaaccgccgtttctcagcggctcgtggcagaactataagcaaacgattctgctgattgtttcggtatcgctgggattgattctgttgatcctgctgtggaaccaccatctgcgcaaagtgattcagcagcgaatgcaggcagagaatgcgctgaaaaatcagctcaattttacccacacgctgtttaatgactcgccggtggcaatgtacatccgcgataagcaaacgcggctggtggactgtaacaatgcctatctgcgctttttgcacatcaaacgcgacgaggtaatcggcaaacgactgtcggacgtattcaacaccaataacgccagcattcacacaatcgaagatggttatcagcagacactgctggatggtgaagcggtaatgcgcgacgtccagctgatgtttggccagcaggccttccatctgtatcactggacgctgccatttcgcgatcggctgggggaagttgccggggtgatcggcggctgggtcgatgtcaccgaacgtaacgcgctgctgcaggcatgca

SEQ ID NO: 3283 - DNA, 444 bp, Zea mays
  Peptide Sequence Number=SeqID_9521
  Probeset Number=SeqID_17686
caggcgcatctggcgtgtcaaaacgccgcgtatgacgagctcggctgggcgcgccatctcactgcgccggcgctggacgcgctgctgctgccgctgaatccggtacggctggggaccagcctgatgagcgacaccatggccagcgcctggcagcagcgtttacgggaagcgctgagcgcctttcaccagcagcatccggagctgccgggcattgtctctgatcgcctgcgtcgtgtggcgctgccgcatgcgccggcaccgctggtgccgggattaattgaccagatgctggcacaaggcgagttgcggcagaaacagggctggctgcacctgcccgacttcgcgccgcgctttaatccgcaagaagccacgctgtggcagcaggtcgagccgctgttcatcgaccagccgctgtgggtgcgcgatattgccgatgcgctgcaa

SEQ ID NO: 3284 - DNA, 576 bp, Zea mays
  Peptide Sequence Number=SeqID_9522
  Probeset Number=SeqID_17687
ggaaagcacccctcgcatgcagagggagcaataaaattttatgctttgcacacatccaacatatatttcccctttatttgatccccaaaagacgtaaatataaaacaacccccctttttggccggttccctgacacggttaattaatacccatatacgaaaagcatccagggatgccttgaaacatgcatcacttgaacaaaagctcacaaaaggcagcgcgcgtcgtcgtcggccggggcatgcatattgaaaaagttggggtttcgcggaagggcctcaagcaacaggagtaaatatgagggagcataaacgatcactattgttgcaggaccaagcaggagggaggcacccaatgtttttgcatgtctcccccgggaaacaaaggggggccgacagaatcgtcaccttgggcgtcggggggagggagccatccggcacggttccgcgcggggagggggcggccatggccgtcgggggagctgccatgagctgcaaaaccagcagtatggccaccaccggaccggccattttttttttgccacccttaatgaacgactatgcctcgggccgaatt

SEQ ID NO: 3285 - DNA, 371 bp, Zea mays
  Peptide Sequence Number=SeqID_9523
  Probeset Number=SeqID_17688
tgcagggctactttggcggccgcgttgacctgatcggccagcgattgattgaagtgtggtccggcatgccgacgctgttcatgctgattctgctctccagcgtgattcagcccaatttctggtggctgttactgctgacagtgatcttcggctggatgagcctggtgagcgtcgtgcgcgctgagttcctgcgcacgcgtaactttgattatatccgcgccgcgcgcgcgctgggcgtgagcgatagccgcatcatgctgcgccacatgttgcccaacgccatggtcgccacgctcacctttctgccgtttatcctgtgcggttcgattactaccttaacctcactggattttctcggcttcggcctgccg

SEQ ID NO: 3286 - DNA, 922 bp, Zea mays
  Peptide Sequence Number=SeqID_9524
  Probeset Number=SeqID_17689
tgcaggtgatcgacaacgtgggtgccagccagggcccgctgacgtcgggcgctaccatttattttacacacctaccctgagcggcagcggcgaagccggtgcgctgatcagcatttacgacggcagcacgctcctgggcaatacccttgtcggggccaacggcagctggagctttaccacgccagcgctcagcaacggcagccacagcctgaccgttacgcaaactgatgcggcgggcaacgtcagcagcgcgaccgcggaatttgtggtcaatgtggacgctgcgctgccgcccgccagcgccagcattgagctggtgggcgacagcggcaataccctcgtctcactgcaaaacggcgccgtcaccaatgacgacagcccgaccctcgccggcctgacccgtgcgggcagcctcgtccgcatctttgacggcggcgatctgctcggcagcaccaccgccgacggcaatgggcagtggagctttgccctgagcaacctgagtgagggcggccacgcgttcagcgccaccattaccgacgttgacggcaatgtgattgacaccgtcaccctgaacattacggttgataccacgccaccggcggcagccagcgatctggcactgctgaacgatgccggcagtaccgcacagccggtgacaggcggcagcgcgatcaacgatgcgacaccgctgctgagcggcacggcggaagccggcagtattgtcacgattcgcgatggcaacaccgttctcggtagcgtcagcgtgggcagtaacggtagctggagcttcaccacgccagcgctgggcgagggcaatcacagcctgagcaccacggtgaccgatgccgccggcaacgtcagcccggcatcaacgccgatcgcctttagcgttgacaccaccgcgcctgccgccgtcagcggc

SEQ ID NO: 3287 - DNA, 263 bp, Zea mays
  Peptide Sequence Number=SeqID_9525
  Probeset Number=SeqID_17690
cctcctagcaaagcagcacattcggaagagagaaggaagcaagagacagagaggggtggagggggaatgacagtgggaatcacgtgtgtttgcccttgctcatgggtttattttggtgtctactaaatggtaggtgaggagcactctttgaaggtggagaaggtgttgttccaagggaagccagactaccaaaatgttatggttttttagtcatctatgttcagcaagacagaagttaataggttacattcagttttttcagg

SEQ ID NO: 3288 - DNA, 254 bp, Zea mays
  Peptide Sequence Number=SeqID_9526
  Probeset Number=SeqID_17691
gcgactttcaggcacaactccggtgcggcctccctgctccgtccggcccaccccagcaagtgctgccacccggcctcgcatcgcgcggccgccccaccctgccgtcagctcgtcggccaacacccgtgctccggcccgctccaccctgcctcgaccgtccacgaaccaccctgctcagtgctcagccggctcgccccaccacgctgttggtttctgtcccgcccaagggcgtcatcaaccaccaccgtgatctg

SEQ ID NO: 3289 - DNA, 548 bp, Zea mays
  Probeset Number=SeqID_17692
caggctatttctgggtggtcgatccgattgacggcaccagcccgttcctcaacggtatgccaaactggtgtgtttccgttgcggtgctgcatgacggcgtgccggtgattggcgtgatctttgcgccgacctatcaggagtgctacgtcgccgcgctcggccagggcgcaacgctgaatggccgccgtttacaggtggatccgtcacgtacgctgcaaaatcacgtgaccggctttggcgctaatagctatgtcagcccggaagaggtgggccgcctgctggcgtcgctgctggcagcggggggcaactttatccgtatcggatctggtgcgctgatgctggcgtgggtggcagccggacgcgtggtgggctatttcgaaccctacatgcacgcgtgggattgcctggccggttactgtctggtgaaagaggccggcggctggtatcacccgtttaatactgagggcgaccggctgttgaaaggcgcgcaggtgctggcggtggcgccgggtgcacaggcggagctgaggcggattgccggcgtttaa

SEQ ID NO: 3290 - DNA, 498 bp, Zea mays
  Peptide Sequence Number=SeqID_9551
  Probeset Number=SeqID_17693
cctagatgcagatgttgcgaaacaagcagaaaaatcgctcttgccgggtgtctgcacctctgccactgcaacggcccagctacatcaacgggagttaattcctgtgatcacttctcttactcagcctgttgtgggtattcgcctaggcatgcagcttctggctgaaagcagccaagaaagcggtgatatccgctactgaaattaatcagcgctcctgttaaaaaaatggccacttgtggcctgccattaccgcatatgggctggaataaggctaattttccatcagatcatcctctgtttcatggcatcgaaaataatgcctatttttattttgttcacagctgcgcactacccgttggcgaatacaccattgctcaaacagattatggcggctcgctcagtagcgctatttcaaaacacaacttttttggcgtccaatttcatcccgagcgttctggtgcagcaagagaacagctattaaaaaactttctggagatg

SEQ ID NO: 3291 - DNA, 510 bp, Zea mays
  Peptide Sequence Number=SeqID_9552
  Probeset Number=SeqID_17694
atgggcgacagctataccggtacgctgacgcgcaaggatcttgagaccccgaccgggtacaatacctataccatcagcggtctgccgccgggaccgattgccatgccggggcgcgcctcgctggaagcggcggcccatccggagaagaccaattacctctatttcgtcgcggatggcaaaggcggtcacacctttaccaccaatctggccagtcataataaagccgtgcaggtttaccggctggcgatgaaggaaaaaaatgaaaataagtttatcgtcatcgaagggctggaaggcgccggcaaaaccaccgcgcgtgaggcggtggttgcggtcctgcatgagcagggtattgaagacgtggtctttacccgtgagccgggcggcacacctttggccgaacagctgcgcgtgctggtgaaacagggcattgatggcgaacaggtgaagtgataaagccgagctgctgatgctgtatgcggcgcgggtgcagctggtagaaaacgtcat

SEQ ID NO: 3292 - DNA, 473 bp, Zea mays
  Peptide Sequence Number=SeqID_9553
  Probeset Number=SeqID_17695
aatttccgggttgacgaggtccataattgggggccgcccccttttttttttttttttttttttttttttttttttttttttttttttttttttttttttttttttttttttttttttttttttttttttttttttttttgaacaaacgagcaaatgcttttatccccgggaaaaacaagcaagtcaagcaacaaacaacagcgcaggcgagcatccgagcaccacccgcctcccaattccagttgtcttccttccccgtccccggacgtgccagctcagctcgaggccccgcctcctccgccgttctctccgatccccaattttaaacgcccccccttctctctcctgcccacgtctcgcctgtgccgagtcgagcaatttcggggcggcgatggtgcggagcggagcagaggacggggggcaaggggagagaggttggagacttggagcctggaggcgctagaaacggaatt

SEQ ID NO: 3293 - DNA, 600 bp, Zea mays
  Probeset Number=SeqID_17696
gtgctgttgcttgtttatcaactactcaagaaacatgtagcctaaataagtcgatatgaattctataaatacaataataaataatcaatacataccgttctgattcttgataaagaatccatccatcctatccctataaacataaaatttaattttatcaactaacctactaatctagcaaataatggattaaagcaaaataataaataatcttacttcttacctagcacagtagcactagcagccacacgcacatagcagactagcagcagaagcagtgctagcacacggttcccttcaccttcactggttcagctgttcagagaatcaggccggccacaggcgtcgggtttagttcagcagtgcccagccacctagccgctcaggcttccttcctccatggtggccagtcggagsagcaaacgcaggagctggcgagggcgagckgckgatgggagggcgggaggtcgatcaccggtgccgcgctasagggtcgkgakggagcgccgctgcgccggcgcctggtgakggacatccctgtgcccctgtcggagtgttggctgtcgcggtgtsaccaagaccagagaggsacagcggcgg

SEQ ID NO: 3294 - DNA, 617 bp, Zea mays
  misc_feature (601)..(617): n is a, c, g, or t
  Peptide Sequence Number=SeqID_9554
  Probeset Number=SeqID_17697
ctgctggagctggtgtggaggctccacggcgccgggcgcctcctggaggcgcgtggacccgcgcctcgccgccggcgggtacgggtacgacggcgaggaagccgagcggctgctgctgctgggcctggcgtgcagccaccccaacccgcggcagcggcccaaggcgcaggccatcctgcagaacctgcagacgcggtccgtgccgccgctccccgtgcccatgtccaagccggtgttcatgtggcccgcgccgctcgccgacggggagggggaggaggaggaggaggacgcgacgcacgcttcgttcatgtcagtgcaagggggtcacacagcttgggcgtaaacttctagtgcaactaccgctacacgtggtcgtcgtcggggtacaatacccagaccttccaggtgagcagggaggtgcacgacgcggcggagagggacgtggcgaccgtttgactgagaagaagacggtgtcgagctcagcatgctgccgccggcaggacggctcactgacggtggtgcacgtggagcccggggggcgggccagtcggcagtcgggttgcgcgctttcatcaggagtcaaaaggggcttgtggcaacnnnnnnnnnnnnnnnnn

SEQ ID NO: 3295 - DNA, 279 bp, Zea mays
  Peptide Sequence Number=SeqID_9555
  Probeset Number=SeqID_17698
aacaacggccaccgaatgaaccaacattttaaattgtgccaagggcttccaggtaatcaaaggaatgacctttgctctgttgtacctccactaaaaggggaacatggtcgtggtcttccgtgactctaaggagaggacgtcctcttccaccatgatagaaacgggcggttggtacactatgaccttgggagtttaattaaccttgggccggaccctcagacaacacatatggttgtcgccatgggttacctgactattgaactggtgcccacggacaag

SEQ ID NO: 3296 - DNA, 764 bp, Zea mays
  Peptide Sequence Number=SeqID_9556
  Probeset Number=SeqID_17699
tgcagcaccggatggcgatcatcccggcgctacgcgccatgtgcgaagtggtttccctctatcagtgcgatgtgctgctgctgaccggtcgcccgtcgcgcttcccgggcattcaggcgctggtgcgtcatttgcagccgctgccgggcagccgcattttgtcgctggaggggtatcacaccagcgactggtatccgttcaacaaacagggacgcattgataacccgaaatccaccgcggcggtcggtgccatgctgtgtctgctggcactcgatctgcgtctcagcagcttctggttccgcgccggcgattttgaaccctactcgaccattcgctatcttggcgtgctggatgaaaacgccacgctgagcgatgacaatctgtgctacagcgagattgatctcgacagccacagcttcgcgctggaccgtaaaagcagcttccgcattcgcggtaacgtctgcctcggtttccgtcagctggagaacgaccgctggccggcgacaccgctctacagcctgagcattaccgatccgcaactggcgcgccaggtagcgggcgaaagcgtgctgcgcatcaggctggcggtacaaccggggccggataacctcggcccggagcggctggtgctgagcgaggcgcgcatggacgatggcacgcgcgtgccgctggagcaactgagtctgaaactgaatacgctgtcggccaccggcaacgccaatgcgcaatactggatcgacagcgggagcgtgtgtaaacgatga

SEQ ID NO: 3297 - DNA, 871 bp, Zea mays
  Peptide Sequence Number=SeqID_9557
  Probeset Number=SeqID_17700
gcagctcttcgatcttctgtacgaagtgcgcagcgtcacgcgcgtggccgagcaactcggccagagccagccgacgatcagcatctggctccgccgcttgcgcgaacatcttcacgatccgctcttcatccggacgcccggcggcatggcgccgaccccgcaggcggacgcactgatcggaccgtgccgcgagatcctcgaatcgctgcggcgcttcgccgcgtgggagatcgcattcgatccggcgacggcccagcggcgctttcgcatctgcatgaccgacgcgagtcacatcacgctgctgccgcggctgttggcgcatgtccgcgcgcaggcgcccggcgttcggctggaggctgcacgcatcgacggcaacacggaacgctcgctcgaatccggcgaggccgatctcgcgatcggctatgtgccgtggctgggtggcggcatttatcagcagaaactgtatgaccaggactgggtatgcctggccaatcggcatcacccgaggattcgcggtcgcctggggccgaaacagtatcgttcggaaggacatgtcgcgattacggcgggaacgggcgcgcaactcctcgaacaggcgctgcggcaggcgcgtatcgagcgcgacgtggtgctggagctgccgggctttctcggcctcggggcgatcatccagagcaccgacctgatcacgacgctgccgcgccatattggcgagacactcgctcaggccagcgatctggcggttcatgcgtgcccgatcgcggtcgacggattcgcggtacggcagcattggcatgcgcgatatcaccatgaggcgggcaatcgctggctgcgtggtctcgtgattcaattgttcggcgcgtcgcattga

SEQ ID NO: 3298 - DNA, 677 bp, Zea mays
  Peptide Sequence Number=SeqID_9558
  Probeset Number=SeqID_17701
gacctgcagccctgatggatatttcgctgtggtcgagcgtttacggcctgctgatcgcgctttttgccggttattcgctgcacaagctcggcaccgggcgttttcagcgctttttgctgtcgttcaccaatatgaccagcaatttcgccggcgtgccgctggccttcgcctttgtcatcctgctcggactgaacggctgcctgacgctgctgctgcgccactacggctggctggacagctttaagctgttttcgcgcgacggcatggtgctggtttacacctggttccagattccgctcggtattctgctgctctacccggcgtttgacgggctgcggaaagactgggaagagtcggcggcactgctcggtgccagccgctggcgctactggtggcacatcggcctgccgattctgtttccggcactgctcggcacctttgtgattttgctggccaacgcgctgggcgcctacgccaccatttatgcgctgaccaccggcaacttcaacgtggtgccggtgcgcatcgccgcgctggtgtcaggcgatatctcgctcgatcccaataccggcggcgcgctggcgatgctgctggtgctgattatggcgctgattaccgtggtgcagcagtatttggtgcgtcgcagctatctgcatgcccgcgtacaggagtcctga

SEQ ID NO: 3299 - DNA, 327 bp, Zea mays
  Peptide Sequence Number=SeqID_9559
  Probeset Number=SeqID_17702
ctgcagctgcgctcaagaagtacggtgctaatgtagttgtgttgaaagtggcaaggatgctatcagtctacttcaaccctcacattgatttgatgcatgtttaatggatgttcagatgccagagatggatgggtatgctaacgaggaaaggaagaacaagttggctttgactgaaggctcgacgtccatcatttacatgttcttgcaatgacaaccgatgttatccgggcaacttatgaggagtggataaaatctggaatgggtggattcgtgttctaaaccctttcaataggaggcatgtatacccaggcattcatccaaaattat

SEQ ID NO: 3300 - DNA, 393 bp, Zea mays
  Peptide Sequence Number=SeqID_9560
  Probeset Number=SeqID_17703
cgccgtttaccgcagcgtaaatccacagggcaccccatgaaaatcaaacccgatgacaactggcgttggtattttgacgcatagcatgaccggatgatgctggatctggccgatggaatgttatttcgctcgcgcttctcgcgcaaaatgctgacgcccgatgcctttaatgacagcggtttttgcgttgatgacgctgcgctttattttacttttgaagagcgctgtcgccagagcggtttaaaaagcgatcagcgcgccgagctggtgctgaacgcgctggtggccagccgtttgcttaagccgctgttgcccaaaagctggcactttaccagccatgctcacagctggcaaccccgcgcgggcgatatggtggcggtaaccgctggctga

SEQ ID NO: 3301 - DNA, 226 bp, Zea mays
  Peptide Sequence Number=SeqID_9561
  Probeset Number=SeqID_17704
ctgattgccgtctctctaaacacacatgggacaagggtagtacagaaattgatagagaaagttagcagcagagagcagattatgctcattatttcagccctacagccaagcttcatgctgcttgtcaatgatcacaatggtcatcatgtaatacagagatgtatggtcaactttggagtcgaggataataaggtacataatgattcctactagattgtgaacttgt

SEQ ID NO: 3302 - DNA, 450 bp, Zea mays
  Peptide Sequence Number=SeqID_9562
  Probeset Number=SeqID_17705
aacgcccgagctgacccacgcgctcgttatcgtaaagcgatggccttgctcctccaaccaatggctcggagagctctatcggaacttggcgcgcgcgatcatcgacgcggccgacgagatcatcgtcggcaagcatccgcgcgaattcccgctcgccgtatggcagacgggctccggcacgcagaccaacatgaacctcaacgaggtgatcgcgaaccgcgcgagcgagctgctcggcggcgagcgcggcgaagcgcgcaaggttcatccgaacgacgacgtgaaccgcggccagtcgtcgaacgacgtgttcccgaccgcgatgcacgtcgcggccgcgtacgcgatcgtcaatcacctgctgcccgcgctgcgcacgctgcgcgcgacgctcgacgcgaaatcgaaggccttcgccgacatcgtgaagatcggccgcacgcatctgca

SEQ ID NO: 3303 - DNA, 335 bp, Zea mays
  Peptide Sequence Number=SeqID_9563
  Probeset Number=SeqID_17706
tgcagagcaaaatctaagacccgcgtttgggtatgatggtcattgtgtctggcgtcgaggtgtcacgcgatctggcgtatgccgaagcgatcttgaccttactgaacgaccaggatgaataaacggacaagaacggactactaactctaaaagaagcgcgtgactacatccgtattctgctccggaaagcgattcgtgtgcccatgacgccggagctgacctttttttacgataactctgtcattgaagggatgcccatgtagaatctggagtctaacgagatcagaaacgatgctgatccaaggcgtgaaagccccgcggacgactacacggag

SEQ ID NO: 3304 - DNA, 379 bp, Zea mays
  Peptide Sequence Number=SeqID_9564
  Probeset Number=SeqID_17707
agcttttgcactggtcggccgccgcctgccgcagctcgccgccccgccgtccaccgtcgtccgcctggactccactgctcgcccgccgccccgccgtccactgctcccggcgtcctgcgtgggcacggctgggcaagctccatggcggactgctactgcgtgggcgacgtactgctcctgcgtgagcgagcgggcgtactgctactgcgtgggcgcggccgagtccctttctgtccgtgccatggagctttctgtccagcaggcagcagcaggccagcagctccagctttcccagcgtcccggcgtcctgcgtgggcggcgtactgctactgctccagctttccaagctccaactccagcgtccgctcctagcacctga

SEQ ID NO: 3305 - DNA, 473 bp, Zea mays
  Probeset Number=SeqID_17708
tgcagcgcattaccgacgaggtgatgcacagccgtgaagatgcgcagccgtgtctgcgctttggcgcgcacgaactgcggcgctaccgggaacggctttactggctgccgcgacagcactcactgagtcagcactcgctaacctggcagccgctgacgcagccattaattttgcctgatgggctgggtgaactgcgcgccagcctggcgcaggcggaactgcgccagccggcggcggatgaacaggttattgtgcgctttcaggcccacggctatcaccatgttgttggccgggctggtggtcgcgaaatgaaaaaactgtggcaggagctgggcgtcccgccgtggcagcgcgaacgcattccgttgatttactacaaccagacgctgattgctgcgccggggctgtttatcacccgcgcaggcgcggcgggcgagacgcaaggctggcaggcgatctggtcaacaccctaa

SEQ ID NO: 3306 - DNA, 960 bp, Zea mays
  misc_feature (778)..(778): n is a, c, g, or t
  Peptide Sequence Number=SeqID_9565
  Probeset Number=SeqID_17709
ccggaagatcgcggcaaggcttttggcctgtcatcgattgccattattgtcgcgccggtaattggcccgacgctcggtggctggatcactgataactacagctggcgctgggtgttctttatcaatattccggtggggatcctcacggtgctggcgatctatcagctgctggaagatccgccgtgggagcgcaagtgggcgaagggccggctgaaaatcgactatatcggcatcagcctgattaccctgggtctcggctgtttacaggtgtttctcgatcgcggtgaagacgaagactggttcgcttcacacttcattcgcctgtttgccatgctggcggccgtcggcatcgtcggtgcggtttactggctgctgtatgcgcgcaagccggtggtggatatcacggtaatgaaggaccgcaacttctgggtggccggtctgctgatggcgggcatggcgatgattctttatggcagctcggtggtgttaccgcagctggcacagcaggatctcggttataccgccacctggtccgggctggtgctgtcgcccggcgcggtcctgatcgtgctcaccatcccgctggtgctgaagctgatgccgattgtgcagacgcgctacatcatcgcctttggctttacctgtctggcgctggccttcttctattccagcaccctgacgcccaacgtggatttcaccacgctggtgctgatgcgcagcgcgcagtcgattggcctcggcttcctgtttgtgccgctcaccaccattgcctttgacncagtgccgcagcgcctgaatgcggatgcctccgcgctgttcaccatgttccgtaacgtggccggttcgatcggcatttcgctggccactgccggcatcaccgaacgtgaacaggtgcgatcggcccacatggtgggctacatgtctccgctcaatgagcagttcaacctcacgctgcaggtc

SEQ ID NO: 3307 - DNA, 701 bp, Zea mays
  Peptide Sequence Number=SeqID_9566
  Probeset Number=SeqID_17710
atggataccaacagttttcgcgccgaacacgccgacgcgctggatccggccacccgcactctgacggacaagcgcagcaaagtgctgggcgaatcgtatcgtctgttttatcgcaagccggtgcatctggtgcgcggcgaagggcagtatttatgggatgcggcgggtaataaatatctggatgtgtacaacaatgtggcgagtatcggccactgccatccggcggtcattgaggcggtgaatcagcagatgaagatgctgaacacgcacacgcgttatctgcacgagcgcattcttgactacagcgaagcgttgctggcgaccacgccggaagccatcgatcgcgccatgtatatgtgtaccggctcagaagccaacgatttggcgattcgcgtggcgcgcgcctggagcggtggcaccggtattattgtctcgcaggaggcgtaccacggtaccagtgatttgacctctggcgcgtcaccggcgctgggtagcggtcagccgctggcaccgaccacccgcctggtgccaccgccggatgcttatcgtgttgatgcgcccgaccttggtgcatggttcgccgaccagattcagcagcagattgatgacatgaaagcgcacggcattaaattcgctggtttcctcgccgactcgatcttctcctccgacggcgtgctgcctaatccgcgcggattcctgca

SEQ ID NO: 3308 - DNA, 339 bp, Zea mays
  Peptide Sequence Number=SeqID_9567
  Probeset Number=SeqID_17711
tacgtgcatggcgaggggtttgcgctcgtggcgtgcgctgccgcggcggcggcgctgctgctgctcggcgtggcggcggcggacgtggcgtcgatcatcacgcaggacgtgtacaaccagatgctgcccaaccgcgacaacacgcagtgccccgccaacggcttctacacctacgatgccttcatccaggccgccaacttcttcccggggttcggcaccggctccagcaccgacgagctcaacaagcgcgagctcgccgccttcttcggccaggcctcccacgagactaccggtcagtaacgtaatacatattgcatgatatactattcattgtttttt

SEQ ID NO: 3309 - DNA, 219 bp, Zea mays
  Peptide Sequence Number=SeqID_9568
  Probeset Number=SeqID_17712
atgtatcttaatattatgtccacacccatggtgtgtagtacactatacggtattttaggttggtttggaggatgcgatggtcatgagataatggccaccacgtgcgtttcatcataatcgatctgatccttgattgcgtgctatatagtcgcacacgcaggtagtgcgtcggatctcagaaatgtaccatggatctgttcgcgaatgattgaagcttct

SEQ ID NO: 3310 - DNA, 257 bp, Zea mays
  Peptide Sequence Number=SeqID_9569
  Probeset Number=SeqID_17713
atgaatcgggctacctaccgggaccgcgactgccaatgcgtttttctgttggataaacaccagggtgcatcctcaaacgatgtgctgctaaaagcaaaacacctggttaatgctgacaaggagggccataccggggcactcgactctgtggccagcgctatgctggccatttgtattggcgaaaccacgaagttttcccgctatctgctggattcttacaagcgttaccgcacgattgcccttctgggccaacgctc

SEQ ID NO: 3311 - DNA, 471 bp, Zea mays
  Peptide Sequence Number=SeqID_9570
  Probeset Number=SeqID_17714
tctcggtaccctggtgtgaggctgaaggaaggtagccacattaacagaagccttcttacattgggaaaagtcattcgccaactcagcaagggaagaaatgggcatatcccttacagagattcaaagctcactcgcatattgcagtcatctttgggcggcaatgcgagaactgctattatctgcacgatgagcccagcacatagtcatatcgagcaatccaggaacacacttttgtttgcaaactgtgctaaaaatgtagttactgatgcaaaggtcaatgtagtgatgtcagacaaggtgttattgaaacatcttcaaagagaaattgcaaggctagagaatgagctaaagtttcctagaccaacctcttgcagcaactatgctgatctatattctttgttcattttcaacaaagaatgttgtccttcctatgaaaaatagaattgttgtggactttcagctagaaggaca

SEQ ID NO: 3312 - DNA, 207 bp, Zea mays
  Peptide Sequence Number=SeqID_9571
  Probeset Number=SeqID_17715
tgcagaagaagggcggagctggaggagggttcagcggccacggtcaccccgccaggaggcggaccaacagccgcaccagcatggcgcagcgcgacgagatcatccgccgcaccgtctacgtctccgacatcgatcaccaggtccccgatccatttctgtgtgctctgttctgttttgccttttgtgtgcttggctgcctgtgctgca

SEQ ID NO: 3313 - DNA, 328 bp, Zea mays
  Peptide Sequence Number=SeqID_9572
  Probeset Number=SeqID_17716
atcctctttagtcgacctgcagccgcattttgccgccatcggtcagctgggcgagggcggtatctatctgctggcgattggcctgtcgcaggtgatcagcaacgtgccggccactattctgctgttacaaaaagtcccgccttccgaagtgctggcctgggcggtgaatatcggcggctttggcctgctgccgggatcgctggccaacctgattgcgctgcgcatggcacaggacgccaaagtgtggtggcgtttccatctgttttccctgccgatgcttgcctggtcgatgctgtgcggctggctgttgttacagctgctgcgttaa

SEQ ID NO: 3314 - DNA, 965 bp, Zea mays
  Peptide Sequence Number=SeqID_9573
  Probeset Number=SeqID_17717
cctcgaggccggccgggatttcatcttcaccaagtatggcaccaaccaggactcatgtcacgtgtgcgctcgtgcacgaaacgacacccgctggaagggacacaagggagtctgctcaacctggattaagaacgctgttccatcggaagggagcgaggattgcagcagctgggctccgatatttgtgaggaaatcaaacttcaaactgcccgctgatccttcagtgccgattatcatgattggccctgggaccggtcttgcacccttccgtggcttcttgcaggagagactggcttggaaagaatctggagctgagctcggtcgctctgtgttcttctttggatgcaggaacagcaagatggacttcatctacgaggatgagctgagcaatttcctcgagcagggagcgctgtttgagctggttctcgccttctcgcgtcagggccctacaaaggaatatgtgcagcacaaaatggcacagaaagcatctgaaatctgggacatgatctcccaaggtgcttacatctatgtctgtggtgatgccaaaggcatggccagagatgtacatagagttctccacaccattgttcaggagcagggctcccccgacagttctaaggccgagagctttgtgaagaatctcccaatggagggcagatatctgggggacgtgtggtaaaagacgattgtgaaatataaacgggcaaaaaaataccctagtattcaggggataaacatccagtcgtattatacatgtgtacaactattgccagaagagtaatgataatggattagatcagatatttttctttggttctctattttgtttattctctctcgttttcttttctttttgaggttctctctagagcattttttgtagctatgtatgataaatcctggatatgtataagataagaagaattttggcaataagcatgttgcctgtcagtttgtcgcaaaaa

SEQ ID NO: 3315 - DNA, 574 bp, Zea mays
  Peptide Sequence Number=SeqID_9574
  Probeset Number=SeqID_17718
acaatccgctcgtggtgccggtcaacaagaagatccgcatcatcacgaccgcgaacgacgtcgttcactcgtggtacgtacccgcgttcggcgtgaagcaggatgcgatccccggcttcgtgcgcgatacgtggttcaaggccgacaaggtcggcacgttccgcggcttctgtaccgaactgtgcggcaaggaacacgcgttcatgccggtcgtcgtcgaagtgctgtcggaagacgactacgcgaagtgggtgaccgcgcagaaggccaagctggccagcgcagcggtcgatccgaacaaggtgtacacgatggccgaactcgtcgcgcacggcgaggaagtctacaaggcgaactgcgcggcctgccaccaggtgaacggcaagggcctcggcgcattcccggcgatggacggcagcccgatcgtgaacggcccgatcgccggccacgtcgagcgcgtgctgcacggcaagggcgcaatgccgtcgtgggcgtcgctgtcggacctcgacatcgcatcggtcatcacgtacgagcgcaattcgtggggcaaccacaagaacgacctgctgca

SEQ ID NO: 3316 - DNA, 558 bp, Zea mays
  Peptide Sequence Number=SeqID_9575
  Probeset Number=SeqID_17719
ctgacaaggctgttaagcttttctctcggatgcttttggagggactcacccctgacaatgctgtgtttacaattgttttaacagcttgctgtcatgctggtctagtagaagaagggaagaagttctttgatataatgaagaatgtgtacttgatggtgccatctggtgagcattatgcttgccttgtcaatcttcttggacgttgtggtatgctagaagatgcatattggcttatcatgtcgatgcccgggaaacctcatcctggagcatggggtgcactgttgggtggatgcaagcttcactgtaatataaagcttggaaaaattgcagcaaaaaaactttttgaaattgaaccggataatgctggaaattatgtctccctgtcaaatatgtatgctaacattgacaggtggggagatgtttctgaagttagggctgagatgactggaaagagaataaccaaaatagcagggcgtaccctagttttgcagcgaagcagtgttgaccagaatggtgtatttatcttgtaccatgttactggcccccattgaaaacttg

SEQ ID NO: 3317 - DNA, 269 bp, Zea mays
  Peptide Sequence Number=SeqID_9576
  Probeset Number=SeqID_17720
gaatacatgacaactataaaaagaggaaaagacacctcgtaaacaggaaaagaagagcaaaacatggaaaacaagcaaaaaacataccatgaacaagaatgcaatggaccagaaatcatgaaggaaaactccagcagaaaacaggaccttacagaaaaagacatcgaagaacgctacgaaacacaaaaaaagaccaagcaaaagacgataatggaaaaataaacaaggaaacaaagagacaatgtcgccataaaaaagaaccccactga

SEQ ID NO: 3318 - DNA, 870 bp, Zea mays
  Peptide Sequence Number=SeqID_9577
  Probeset Number=SeqID_17721
tgccattgaggcctgcaccaaggcgggcgtcgctgtgaagatggtcacgggcgacaacgtcctcacggcccgtgccatcgccaaggagtgcggaatcatctcaaacagcgaccacgacgccatcgtaatcgaggggcaagagttccgcgccatgtcaccggaggagcagctggagatcgtggaccgcatccgcgtcatggcgcggtctctgcccatggacaaactggtgctggtgcagcgcctgaagcagaagggacacgtggtcgcggtcaccggcgacggaaccaacgacgcgccggcgctcaaggaggccgacgtgggcctgtccatgggcatccagggcaccgaggtcgccaaggagagctccgacatcgtcatcatgaacgacaacttcgacacggtggtgacggccacccggtggggccgctgcgtcttcaacaacatccagaagttcatccagttccagctcaccgtcaacgtcgccgcgctcatcatcaacttcgtgtcggcgatgacctctggcaagatgccgctcacgaccgtgcagctgctgtgggtgaacctgatcatggacaccctgggcgccctggcgctggcgacggagccccccaacgacgccatgatgcggaggccgccggtcggccgaggcgacaacttcatcaccaaggtgatgtggcggaacatcgtcggccagagcatctaccagctcgtcgttctcggcgtcctcatcttcaagggcaagagccttctccggctgaacggcggcggggatctgtccgacgcccagctcaacacgttcctattcaacacattcgtgttctgccaggtcttcaacgaggtcaacagccgggagatggagaagatcaacgt

SEQ ID NO: 3319 - DNA, 452 bp, Zea mays
  Peptide Sequence Number=SeqID_9578
  Probeset Number=SeqID_17722
tgcagcgattattgctaagaaccaaatcaccaatggcggtcccataattctatatcaaccggagaatgagtacactgagtggacaaatggcgcgtcctttgaccctcagtacatgcaggacatcatgaactctgcaaggaatgccggtgtcgtcataccgttcattaacaacgacgctgctccagatggacacgacgcaccagggtccggagtaggcgcggtggacatttatggccacgattcgtatccgcggacccatcttcatggccatcaggaggtcttccgacatatttccaccaacttcatgaggagcagagcccgtcgactccgtattcacttgttgagttccaaggtggttcttttgatccctggggaggcaccggttacgaaaaatgcactgcacttgtcaacgaacagttcgaaaacgtcttctacaagaacaatctggctgc

SEQ ID NO: 3320 - DNA, 1043 bp, Zea mays
  Peptide Sequence Number=SeqID_9579
  Probeset Number=SeqID_17723
atggcgtggaagatgttgcctgcggctagcgagctcttccccgcgatcgtccgggccggcacagccactcctccccggccacagccaccagccgcacgcaacagcccatcgcccaccgtccacaggcacgcccctcccgcggcacggcttggcagcgcggggacggtgctggtggtcgacgtcgacggcgccctgctcctgtcgcgttccctcttcccctacttcatgctggtcgcgctcgaggccggcagcttcctccgcggcctcgtcctgctgctcctctaccccgccatccgctgctgctactgctgcctcggcggcggcgacctggccgtgcgggccatggccgcggtcgccttctgcggcctgcgcgcgcggacgttccgcgccggccgcgccgtcctgccgcggtggctcctggaggacgtggcggccgaggcgctcgaggccgcgcggcgtgtcggcgacccggctcgggttgtgtgggccagcgccatgccgcgcgtgatggtggagcccttcctcagggagtacctgcaggtgccggccgcggccgccgtcgccgcgagggagatgaagacggcgtgggggttctacactggtctcatggagggaggtggtgaagactgcgaggcgacgatggcactgatgacgaagaggacgtcggcgggggaaggcgccggcgacgtcgtgggattctccgctgcacgctccgtggcgttcctctccagcagccctctcgcgtccacttgcaaggtcgaggtgtacgtggtatgcccggaggagaagagcaagtggcggcgcctggcgcggcgcgactaccccaccccgctggtcttccacgacggccggctcgcgtttctgccgacgccactcaacacggtggccatgttcacgtggcttcctctgggcgccgcgctcgccatcctccgcctggccgtcgcgctcgcgctgccgtacaaggtcgccacggcgctgctggccgccactggccagtcgtggcgcctccgcggctcactcccgccgccgggaaacagcggcgg

SEQ ID NO: 3321 - DNA, 442 bp, Zea mays
  Peptide Sequence Number=SeqID_9580
  Probeset Number=SeqID_17724
aatgtgctggtcgccgcggcgaatccgctgattaacgcgatcccgcagattcgccactccgtctcgcacgacgatccggcgcgactgcgccagcagctgatcgatcagatccgtcgctttgagctcagctgccagcagtcggggctgagttatgaagtgatcgtcggcgcgcgctactgcctgtgcaccgcgctggatgaagcggcggcgctgacgccgtggggcagccgcggcgtgtggaccagcaacggcctgctggtgacgtttcacaatgaaacctggggcggtgagaagttctttcagctgctggccaagctgtcgcaaaatccgcgtcagcacatcctgctgctggagctgatctatttctgcctgctgctcggctttgaagggcgcaaccgcgtgctggataacgggcgttcgcagctggaaaccatcaaacagc

SEQ ID NO: 3322 - DNA, 445 bp, Zea mays
  Peptide Sequence Number=SeqID_9581
  Probeset Number=SeqID_17725
atgcgattgacccttcgcgcacgtctggctgcgattgtcagcctgctgtgcctgttactgattattgctgccgtctggggaattatcggcctgcgcgctgccgatcagcgcgcgcaaaatgcctatcagaacgagctgcttccgctgcaatactcctcacgcctgtaccgcatggtgcaggagcaatccgctaccctgttcgatgcgctgcgctactggaccgacagcagtgaagtggaaaaacgcctggcgcgcattacgcagtacggtcagcaaatcaccgccgatcgtcatacctggcagcagctggcgtttgatgcgcagaccaaaccgctgagccagcgcttcctgacccatctcgacggctggcagggtgcactgcatgaagccggtgagctgctgaaaggcggtaacccgtccgccgcactggtggtcatcgaaaacc

SEQ ID NO: 3323 - DNA, 1011 bp, Zea mays
  Probeset Number=SeqID_17726
attcggctcgagttcctgtataacctctgttcggacttcgtagtgctcatctgagttctgattcggccgggcaactgtaaattctgtagtgttcgagaaaaaactgtaaattctgtaatattgccaagaattatgaatttacatgaactttacaggtaaaaaaaaaaaaaaaaaaaaaaaaaaaaaaaaaaaaaaaaaaaaaaaaaaaaaaaaaaaaaaaaaaaaaaaaaaaaaaaaaaaaaaaaaaagaaaaaccgaaaaaaaaaaaaaaagggggcccgcggtatccatttgggggcccggtcccgggggtttatatcacgagtcgccatagggggggcgctcaaaatcttggtttacgggtggcaattacacgctgcctgcgaaaaggggtaatccggtccaatgcgaaaaatgtttaatgcctgaaatttccaacattaattccgggggggctcaatgaagggataaccctggggaaacctggggggccccctcccccaattaatcgggcggcacacctggccagccttttagagaaaaaaccgccacagcccgcttttttattaattttgaaaccggcgggaaagggtggtttttctttttctgccccagagggggttttttttttcgccctaaactggttagccctaatatgccataaacccgttggcccgtggataatgccccaatatgacaaaatctgttttccccctggtagcaaaacacttctaagatgggcggaccacggcgcatacaaaacacactactggagttccttgcccacaccactaccggatttttggaatcaagccccatcccgcaaacgaattggtccttatgcaccccatgctttgtggaaaaccggccctgctttccattggaatggccgccccaataccggatgtggtggtttgggtagaaaaccggttatgccatccaggcaaattcacccgccccgtatacattatatatttgggtcccgtagaaattatttttccgaaccaaaca

SEQ ID NO: 3324 - DNA, 804 bp, Zea mays
  misc_feature (765)..(765): n is a, c, g, or t
  misc_feature (773)..(773): n is a, c, g, or t
  Peptide Sequence Number=SeqID_9582
  Probeset Number=SeqID_17727
gtgttaaggggtgtgcaaagatgacttctaggattggtggctacattggtggtggaaattggaaatctgctcatggaacagcacattttggtcggaacttctctatgcagtggcttaagctttgtgagttgtcatttcagaaaacccatcatctccgcaatccatataatgataacctccctgttaagatcagcagagattgccaggaactcgaacctttcatcggtgagcagttggcttctctgctctacctggagccagacagtgaacttacggctatgctaatcgcagcagaggccaagcgagaggaggaaaaaagcaaaaggagtcagtgccgacgaggcagctgataatcaagatattgtgctgttcgacgataatgaagaagacgaggaagaggaaagcgaggaggaggaagaaggcgccggccgagagcctcaagggaggggaggaagaggagggagggggatgatgtggccgcatcaaatgccgatgatgcgtgggccgatgatggcaggccgtggcttccctcccaacatgatgggtttcggcggtggcttcggcttgccagacccattcggcatgccacgtggcttcccgcccttcgttgggccaaggttccctggagacttccccagaagccctatgcccgggatgggggttcccttggcaggcccccgcagcccttccctctgggcctcgacatgatgatgggccctgggcgtggtccgctgatgggaatgggcgggcctgggcctggacggnctggtcgnccatgggcatggcgcccttatgcccccgctg

SEQ ID NO: 3325 - DNA, 462 bp, Zea mays
  Peptide Sequence Number=SeqID_9583
  Probeset Number=SeqID_17728
ggtaaaaaggttgccacttttccatttttcatttttaggatcaataacaatgttagtattattaaatgctacaagctaaatttctatcttgatgtggataaaatcttttttatgtttttccctggcttgttgaattgatgaaacaagtgtttttattttatgaaggttaggatatacacagcttcacaagttgacaatgagttggaagcagcaaagagggattatttacaggcagcagttggcattacaaaaacaagcaagttaataattccaaagttactagattggtatttacttgactttgcaaaggacttggaatctttgttggattggatttgcctccagctacccattgaactgagaaaggaagcaattgaatgccttgaaagaagggggagacagcccctttcgcagctggtacaaatgatgccctatgacttcagttttaggttgcttttacac

SEQ ID NO: 3326 - DNA, 519 bp, Zea mays
  Peptide Sequence Number=SeqID_9584
  Probeset Number=SeqID_17729
tttccgctatccgctgtccggcgagtttgccatgcgcacccacgtgctgaacggcatcaaaatccctggcgactgggggctggagattggcgtgctgtcagagatttatcgcaattacaccacgcggcagacctgccaggtggaaatcgcggacaactacgaccataagcatcagccgctggcggaagaggacggcaccggtggcctgaaacgcatgagtaacgatatcgtgcagtcgctgctgcgtaagctggcgacaatgggcgtgccgctcaccagcgactcgttccgcgtgctgaaggccacctattatcgcaacgcgctcgacatgatggagatctacaaccacgaagccaccatgaacggactgaagtttgatcagcacattgaagaagcggcggtcgagatgttcactcaggcgattctcgacgccggccagtcgttcatcgagcggccaaacgagaaaccgtttatccccagctggagccgcgtgcagtcggcgttccccgatatcctgca

SEQ ID NO: 3327 - DNA, 543 bp, Zea mays
  Peptide Sequence Number=SeqID_9585
  Probeset Number=SeqID_17730
atgtgtgccacgcatcagacgcagcactggatgctctgtccgcagtgtgatttaaccgtaaaactgcccgccgtaccggtgggcagccgtgcgcgctgtccgcgctgtcacaccacgctggtggctaactggcacgaaccgcgtaaacgtcccaccggctatgcgctggcggcgctgtttatgctgctgctggccaatctgtttccgtttatcagcatgcatgtggctgggctcagcagccagatctcgctgatggctatcccgcaggtgatggatcgcgaggattatcgcagcctcgccacactgttcctgctgtttgtgcagggcattccggctttctgcatgattgccattctgctgctggtgaatccggtgcgcttgccgcacagcctgcgactcgggctgacacgcattctgtttcaattgcgcagctggggtatggcagaaattttcatggccggcgtgctggtcagcttcgtacaaactaatggcctacggtgaaattggccttggcagcagtttctggccgtggtgcctgttttg

SEQ ID NO: 3328 - DNA, 298 bp, Zea mays
  Peptide Sequence Number=SeqID_9586
  Probeset Number=SeqID_17731
aactccatatgagaacggagtatacaggatgaagctttattgtcacgcgatatgcctcaatctccccctttgggggtgttctcgactaaaataccccatcctaacatatctactagtggagagatatgtgtaaacaccctgacaaatgattggaatgactgaccttgcattaaaacatgttcttctggctagattggtgtagggcacacataaaacatttcatagtattcttcgtagggctgattaatgtatttgtcaacaattacatagctctgtccaaaatacttggatgttatat

SEQ ID NO: 3329 - DNA, 564 bp, Zea mays
  Peptide Sequence Number=SeqID_9587
  Probeset Number=SeqID_17732
tgcaggcggagtcaccgggcattgaagccgacaagctgaccaaagtgctctatcccaatgacaaccatgcgccaggtaaacgtctgcggctgatgcagcagtatttccagtgcgcctgcgcggtgagcgacatactgcgtcgtcaccggctggcgggccgtgcgctgcatacgctgccggatttcgaagttattcagctcaacgatacccatcccaccatcgctattccggagttgctgcgtctgctgctggatgagcatagcctgagctgggacgacgcctggcacattaccagccgcacctttgcctataccaaccatacgctgatgccggaggcgctggagcgctggccggcgagcctgctgcgcgaactgctgccgcgccatctgcaaatcatcaaacagatcaatcgccagctgaagcagcaggtcaaacagcgctggccgaacgacagtgccctctggcacaagctggcggtggtgagcgacggcgaagtgcgcatggccaatctgtgcgtggtgagctgtttcgccgtcaacggtgtggcagcgctgcactcgcagc

SEQ ID NO: 3330 - DNA, 345 bp, Zea mays
  Peptide Sequence Number=SeqID_9588
  Probeset Number=SeqID_17733
atgcaacatcctaaccccggtgcgtttccgcacggctttctgtggggcgcttcaacctcggcgtatcaggttgagggtgcctggaacgaagacggcaaagggccgtcggtgatcgataaaggccattttcctgaggggatgacggatttcaccgtcaccagcgatcactatcatcgcttccgggaagatatcgcgctgctggcggagctgggcctgaaaacctatcgattctccatcgcctggagccgcatctatccgcagggtgacggcgagctgaatccggcgggcattcagttttatcagcagctgattgatgaaatttgccgccacggcattgagccgctg

SEQ ID NO: 3331 - DNA, 367 bp, Zea mays
  misc_feature (21)..(22): n is a, c, g, or t
  misc_feature (41)..(41): n is a, c, g, or t
  misc_feature (80)..(80): n is a, c, g, or t
  misc_feature (123)..(124): n is a, c, g, or t
  misc_feature (158)..(158): n is a, c, g, or t
  misc_feature (183)..(183): n is a, c, g, or t
  Peptide Sequence Number=SeqID_9589
  Probeset Number=SeqID_17734
cccggggcgtcggcatggcgnncaacatctgcttcaggttnggcgccttcctcggcgacaggggctacggcggcatggtntacggctccaacatcgtgctctggaagtggtgcgagggcggcnnccagcggtggaagatcgtcccctggtaaatgtgntgttctgtggctgctctggtctccnacaagaaagaaagcagagcccccccggttgttttattggtctggttaaaataacatcgtttctctagttaaaaacaagataaaaattacatcagttaagacacagaaccgagagaagagccaacgcggttcatctcctccgatataaatctgcttgagacgcatcatcctcctctgggccccgc

SEQ ID NO: 3332 - DNA, 443 bp, Zea mays
  Peptide Sequence Number=SeqID_9590
  Probeset Number=SeqID_17735
cgtgcgcaacgtgcgccgtgacgctctggccgaccttaagaaactgaccaaggacaaggaaatcagcgaagacgaagagcgtcgtgccgctgacgagatccagaagctcaccgacaagtacgttgccgaaaccaagccagcggcgccgtcctcggtgccgcgtcatgtcgcgatcatcatggatggcaacaaccgctgggcgaaaaagcgcctgttgcccggcgttgccgggcacaaggcgggtgtcgacgccgttcgcgcggtcatcgaagtctgtgccgagtcaggggtcgaggtactgaccctgttcgccttctccagcgagaactggcagcgccccgccgaagaggtcggtgcgttgatggagctgttcttctcggccctgcgccgcgaggccaagcgcctgaacgagaacaacatcagcgtgcgtatcatcggtgaaa

SEQ ID NO: 3333 - DNA, 265 bp, Zea mays
  Peptide Sequence Number=SeqID_9591
  Probeset Number=SeqID_17736
ttttaaacccaagacccattagaaattttcccatcaaatgggtattctattttttttaagatatgcatatatttatcatgatcgaaacactaagatcctgttgtagttttctttttgcatataaatgttcaatctcactaaaaaaaaatgtttagtgagaagaaatcaaaattcttttgaaatctaacggttagaagagcaacataaggatccccacaaaagagttgcatagattagtgacatcatactgacatgcatcattttt

SEQ ID NO: 3334 - DNA, 251 bp, Zea mays
  Probeset Number=SeqID_17737
tggtctctatggagataaagctcgtccaggtgtacagtgagaatacagtcctcttgaggccccagctcaggtttaatgagggagaggacttccttgagagtggaccttgacatccgccggttcagcaacagtgctaggtaggggctggactcgttcaaggcacgcctcaagagcggcatcctcgattgggggtcaacgatacaggacaaattccattcagatccttcaacaaaaaagaagcaggagctatc

SEQ ID NO: 3335 - DNA, 363 bp, Zea mays
  Peptide Sequence Number=SeqID_9592
  Probeset Number=SeqID_17738
cccgaagccaatatggtggtctgtgattctgatttttgtactgggattcaccgcaggcggttttattcttggaggtgtccacaacgctattctcatcatcgttgttgtaattctttgtggtgcggtgcgtgcatcattcacttggaatagttgttttgcaaggaaagccattgttggtttcatttcccgttacccagatgcagagtttagatctgccaagaatggacaatttgcgaaggtttctggggtatattcaattaagcaaatacccatgggaaaagcacagtcttgcaaacacacacatgcacacgtaaccatccatgctttgatcattcattttttcattacagccgacctgcaggc

SEQ ID NO: 3336 - DNA, 425 bp, Zea mays
  Peptide Sequence Number=SeqID_9593
  Probeset Number=SeqID_17739
tgcaggtgttcgatctgcgtgagagcatgtgcaacggcggcggaccggcctgcctgcgtctgcgcgtggtgttaaccgaggcggagcgtcaggccgtcaatccggccgtgctgatgaacgatcgcctgtttacgcgtctgaatgactgggtggatcgtcactatcgcgaccgcctgacgcaggccgacctggccgatccgcagctgctgagcgaagggcgaagcgcgctggacgagctgacacagctgctagacttaggcagtgtctacgcgtttcagcgcaggccgcccgcgcagcggcagggcagtaacgcccacctgcactggcagtggcatgatgagggcatactatccctgacaccgcatacgcccacgcagcaggcgctggttctctccgccgggattcacggcaacgagaccgccccg

SEQ ID NO: 3337 - DNA, 330 bp, Zea mays
  Peptide Sequence Number=SeqID_9594
  Probeset Number=SeqID_17740
gagcttggggcgaaggagaccatgttgaagggcgcccgacggacccggaacgcgcgagggacctgccaccagcgggttgttttttcagctgcaccggaccgcacacccccgcgacgggacgttgaccaagaaccggaactggaggtggcctacccgggcctgaccctgcctggaagcccgcgccagcgacgcccacgcgcgagggcgacaccaccgaggccactgccggtgccgcactactgccaagccacgacagccgcgggggcggccaacgctgcgagcccggagcgcaagaacctgggggcggaccaggacccggcggtggactag

SEQ ID NO: 3338 - DNA, 361 bp, Zea mays
  Peptide Sequence Number=SeqID_9595
  Probeset Number=SeqID_17741
ccacggcggcgaggggccacaccgggcggcgggcgaaagacggccgcaaaaccccacgcacgagaacgagcgaaaagcaaccgagaaaagcacacatgctagcatgcaagcgtgacaaaccgagaggcgcgaggggggctcaaaggaaggacaggggctccaggggcacaccgtacagccggtgggcgggctccacttggaagaggacgagcaagggcagcaacgccggaccgccagcgggggaaagaaagaaccacaacaaacagcggggccgaaaggaagcgacgtgcgccgcgaagacagcgtccagggagacaacgaccaaaaacgcgaagactagggtgaagctggcgcaacgagc

SEQ ID NO: 3339 - DNA, 254 bp, Zea mays
  Probeset Number=SeqID_17742
cttgcatcgtcgagccaacaccattgttgcaggcggcatcagcatgtggagacaattcctcgaacacaaggtggccatccagaatcgcgtgacccttgttgatgtgctgttggagttcgatcatatcaggaggcgatttgcacagcctgaagatcttcagcagctgatacacctcgccactgccgggcatgaggggcttgccgaagaacatctcggcgaggggcagtacgacttcgacctcacatccaagtgcg

SEQ ID NO: 3340 - DNA, 414 bp, Zea mays
  Peptide Sequence Number=SeqID_9596
  Probeset Number=SeqID_17743
atggcggcggcctcgctgaacatctccggcctcgggctcaccagcacggtctccgcaaccgtcggcaacctcacgtacctcgagtccctcatcctcgagaagaaccagctctcacggggccaatccaatcctccatcgggaaatttcagcctgccatccttgtcgtccgccatgcaggcccctaccgccatggacttgtctcacaaccagctagacggcccgcttccctctgacgtctctggcctcaccaaccttggtcaggtagcgctatccgggaacaaattgatagtgacgaaaaaccaactgcctcgctccccgcccgctgcctcgctcgccggacgtttcgttcgtgaacctacgcgccaccttcgtaaagccgccgcgcgcaggcgcgcctcggtcgtgcacgcttag

SEQ ID NO: 3341 - DNA, 301 bp, Zea mays
  Peptide Sequence Number=SeqID_9597
  Probeset Number=SeqID_17744
ctgcaggaggctggtggggtgttgtttggcttcccgacaaggtacggcgccatggctacgcaaatgaaggccttcttcgactccaccggctcactctgggaggcgcagaagctcgctgggaagcccgttaggttcttcgtcagcaccggaacgcagggcggggggcaggagaccatggcgtggcgattgtccacactgactccacatccacagcttctctttctttgcctttcgtatcggatggatggatggatgtacaagtgtagatccgtcaagccggcgcggccattggcgtcagggg

SEQ ID NO: 3342 - DNA, 501 bp, Zea mays
  Peptide Sequence Number=SeqID_9598
  Probeset Number=SeqID_17745
tgcatgcctgcagctcagctatcctatactgccgcaaccggtcgaactgcatggcaatctgacactgccgacttttgccgatggcctgccggtggcgggtgagctcagcggtgcgcttaacctgacgcagtggccgcagccgctggcgctgacgcttaactggcagcagcagcagggcgaactggtggtgcgccagcaacaggaaccacagccgttgttgcagctgccgtggcaggtcgatgcgcagcaaatccgcatcactgccggtcactggcgctggccgttcgggtcgcagccgctgtcgggcggcgtggcgctgacgctggatgactggcagcaggggctggaacagacgcagatccgcggccgctttaatttactgaccgccggacgcggcgggaaaggcaacctggtactgagcgttgggccgggcaagctgagcctgactgacagcgcactgccgttccagttaaccggcgaaagcaagtttgccgacctgca

SEQ ID NO: 3343 - DNA, 473 bp, Zea mays
  Peptide Sequence Number=SeqID_9599
  Probeset Number=SeqID_17746
attcgagcctcgtcccctgctcagtctcgccgcagcggtccagcactcctgtgcttccctaccgcgatgcgatgcagccttttctcaagtggattcaaggctgccgacccgtccaatcttgggccccccggttcgggcgcagctgcgactttggcggcaccgccgccctcaccaccgcagacccaagcacttcgacgtgccagtatccatcaacgagcaccggcgcttcggtcctgaacacgtcgactccgctgacgccaacgaacgggtctccgcccggccccgggtacgggagctctccgccggccggatacgccaactctcctccgctgtacgggaacatgtcgccgccggactacggcgacaacatcagcgccgcagcgagggcgctgcccggccgcaagacgacggcgacggcggccgtcgcgtcgctggcgacgacgtgcctactgaccgcggcactgtcactgacg

SEQ ID NO: 3344 - DNA, 354 bp, Zea mays
  Peptide Sequence Number=SeqID_9600
  Probeset Number=SeqID_17747
gagaatgagatgaaaggagcagagcaaatgggcttcagtggccacacccccatgatgcagcaatacctgcgcctgaaggccgatcatcctgacatcctgctgttttatcgcatgggcgatttctatgagctgttctacgacgatgccagacgcgcatcgcagctgctggagatctcgctgaccaaacgcggcgcgtccgccggggaaccgatcccgatggccggcgtgccctatcatgccgttgagggctatctggcgaagctggtgcagctgggcgaatcggtggcgatctgtgaacagattggcgatccggcactcagcaaagggccggttgagcgtaaagtggtgcgcatc

SEQ ID NO: 3345 - DNA, 206 bp, Zea mays
  Peptide Sequence Number=SeqID_9601
  Probeset Number=SeqID_17748
gcagcaccgccgttggatatttgttgctggagtacactactcgctatcacagtgcaacggtgctatgtgaagatctcgacggtgacggcgggttgcgcctcgacgactgcggcgacatggcgaatgagagcatggtcgcgggcagctccaccctgacggtgcagaagatgacagtttgtacggacctctatgtagagagattgtag

SEQ ID NO: 3346 - DNA, 533 bp, Zea mays
  Probeset Number=SeqID_17749
tgttgccgcccgcgcggcacgccgcggtgctcggccatccgatgccgacctcgcaaatcatgttatgcatgggcgaatggctggcgcagcggcgtgatgagggattagtgacggatatcgtctggcagagtattgatgacaacctcaaccatctgtcggcgtatctgggtggctgcgaccggctggccagcacaccgattcccttcgcctacagcctgattctgcaccgcacggtgtatctgttctgcaccctgctaccgttcgcgctggtggccgatttgcacctgatgacgccgctggtgtcggtgtttatttcgtatacctttttgtcgctggagtcgctggcggaggagctggaagatccgttcggcaccgcgcccaatcatctgccgctggacgcgctgtgcgtgaatatcgaacgcaatctgaaagcgatgaacaacgatttcccgctgccggcagcgagccagccggaccgcggcgcgatttatcatacgtattcacccgccgcactgctgctgattgcgcaataa

SEQ ID NO: 3347 - DNA, 219 bp, Zea mays
  Peptide Sequence Number=SeqID_9602
  Probeset Number=SeqID_17750
gactctcagagatccccctggagattcgcaaacagttgctgatcagcctattgaatgggtgaaggttacgttgtctgcagttccaggagttaacatggaagatgtagatgataatgaaccaacacgaaagaaggaccatcgccgtgttcctagtacaattgccattgaggaagtaaaggctgcagcattaaaaggagaagctccactgatgctttcgct

SEQ ID NO: 3348 - DNA, 314 bp, Zea mays
  Peptide Sequence Number=SeqID_9603
  Probeset Number=SeqID_17751
ctgcttggattatttggaatttggactttacaaaacagtcattatgacttggctaatgttgcaccaacacttgcaaagttctatcatcaagcagtgaatcctatgaactagcttgcactcgccacatgagctcacccatttatcttcaatttgagaggttatttcagttcaaccggaaagtcaacgaattgacatacactattgcttctaagaagatatcgtttcaactggggttgtaaaaaactgacataaggaggggtactgaaatcaaacttatatggggtaagtaaatctatatctgcttcatgaatcag

SEQ ID NO: 3349 - DNA, 444 bp, Zea mays
  Peptide Sequence Number=SeqID_9604
  Probeset Number=SeqID_17752
tcaagccgccaactttagcaatgttacccttgagatagccttcacattcccggacactgggcctttgccgctgatggagaagaggttgctatgacagccatgtttgtgtccgctgattggttgaatgaacattaccacgaagagcgtttgcaggtgctggatgcccgcatgctgccgccaggtcaggaagcggtgcgcgatatcacggcggagtatctggccgggcatctgccggatgcgccttttttcaacatcgaagcgctgtccgatcacaccagcccgtatccgcatatgatgccgcgcgcagagacctttgccgtggcgatgcgcgagctgggcatcagccaggataagcatctggtggtgtacgacgaaaataatcttttctccgcgccgcgtgcctggtggatgctgcgcgcctttggctgtgaacaggtgacgatt

SEQ ID NO: 3350 - DNA, 278 bp, Zea mays
  Peptide Sequence Number=SeqID_9605
  Probeset Number=SeqID_17753
cccctggccccgtgtcccgtcccgtgcaagtaaaaagcttgctgcttgcgccgtacgcacgtcctgagcctgcgtgtgtttgtttcttcatccagggctgcgacgggtccatcctgctggacaacagctccagcatcgtgtcggagaagttcgccacgcccaacaacaactcggcgcgcgggtaccctgttgtcgacgccgtcaaggcggcgctggaggaggtctgtccaggcgaaatatcctgtgctgacatactggccatcgccgccaagatctcg

SEQ ID NO: 3351 - DNA, 643 bp, Zea mays
  Peptide Sequence Number=SeqID_9606
  Probeset Number=SeqID_17754
gcgtcgcggccgaccgcatcgtcgatgcgtcgcgcaaggcgcagctcgcgcaggtgatccagcagatcctgcccgagcacgacgaaccgctgccgaacgcggcgaagctgcatcatttccttgccgacgaactcgcgctcacgccggacacgagcgcgctcgtcgggcaggccggcacgctcgtcacgcggctgtcgggcggcctcgccgcatgggcgcgccagctcgagttcacgccgttccggctgcgcgtgaccggcaccgccggttcgggcaagacgcaactcgcggtgcaggcgatgcgcgatgcggtcgccgcaggcaagcgcgtgctgtacgtgtgtttcaaccggccgctcgccgactacatcgcacgcatcgcgccgcccggcgcgaagatcgcgaactaccatcagctgtgcgactgggtggcccgcgacggcggctatacgcccgacttcgacgcgcccggcgcgttcgagcggctcgaggcgcgcttcgcgcaaacgccggtgacggagcgctggcgtttcgatgtgctgatcgtcgacgaaggccaggatttccacgcgccatgggcggccgcgctggagcgcctgctcgcaccggacggcgcatggtggtggctcgaagatccgctgca

SEQ ID NO: 3352 - DNA, 234 bp, Zea mays
  Peptide Sequence Number=SeqID_9607
  Probeset Number=SeqID_17755
atgccttcgaagatgagctacattgagattaggcggtctactctgaaggagaaagatccgcagtccatgaggaggcttgagtacttcagtagcaaagtgaatgtgcgtcttcctggggaagaaacaacaccgaagccagggaaagatgaagtcattgtgtacaagagcttcttcaaggcgggactttggctccctatgtataagacgattgcaaaggtgctgcagcgttatgaa

SEQ ID NO: 3353 - DNA, 451 bp, Zea mays
  Peptide Sequence Number=SeqID_9608
  Probeset Number=SeqID_17756
tggattgacccttttaaatataacaaaagtttttctgcttggaagttttaaaaaaagatgtcctttataatatatttatttctgcttgtaaaggaatatgttaagggtatcggtaatgattctgtaatactgagttggctgcattctttcggtaagcagttctacagatcagtatccagatcagactacaccacaatgcgtcttggctttatcaagactcactgcccttcaaacccaaaattcgatttccatggatacatggtaagggttttggaggctgattttaggagagtggtaggcatcagctggtacctgtggatcttcgtggtgatattcctgttgctgaatgttaacggtaaaaaaaaaacttagctatatcctctgctaagtgctaacacaaggggtcattaacaacttaccactcgtttgcattgcattaatctatctgcag

SEQ ID NO: 3354 - DNA, 517 bp, Zea mays
  Peptide Sequence Number=SeqID_9609
  Probeset Number=SeqID_17757
ctgcgacatactttgataaagttgagatgaaagctcttgaacaaaggctcctgcagaagcaaagactgcaacaagaaatgatgaaatacatatcacttcggcaactaagccaggttgaagatgcccctgatctgcaaaaaagaatcatcggatgtttccggaacatatctcgcttatttagtgattctgcaaagtgtgaggagaacttgaacatgcttcatcagctaaaagatgctgatatctggaaaatattcactagcctgcttaattgttcaactacatttgagaaagcttggtctcttcgggcagatttgcttaagatatttggtgaaaaacatgtgctttataattttgttggcgcattagcaatgggatgttcatatttacttgtaaacaaggagtatgcaaaagagatcctttctgaagcttctgaacagaagacttctgggaatacaaaactcatctcatcatgcatgaatcttctaacggtaagatgttgtcttcttccaaccctgca

SEQ ID NO: 3355 - DNA, 344 bp, Zea mays
  Peptide Sequence Number=SeqID_9610
  Probeset Number=SeqID_17758
atggcgcacacgctgtggcagatgtacgcggacgatccggatccgctcgcggtcggcgcgcagtggaatgcggggatggcgcgtgcgatcggcgcggcgatggcggcgcgcgatgcgctgccggccggacggtttctcgacgtgaggttcgaggacacggtatcgaatccgctcggcgtcgcgcaagcggtgtaccgcttcgcggggatgccgctggatgcgcggcagcgcgcggcgatcacggagtggctcgcgcgcaacggccgcgacaggcgcgccgcgcacgactattcgatcgcgcgcttcggcttcaccgaagcgcaactggcgcacgacttcgccgc

SEQ ID NO: 3356 - DNA, 370 bp, Zea mays
  Peptide Sequence Number=SeqID_9611
  Probeset Number=SeqID_17759
gtacaacgtggctattaagtgtgcgaccattactccagatgaaactcgggttaaggagttcaatctgaaacacatgtggaagagcccaaatggcacaattaggaacattataaatggcactgtgttcagagagcctattatatgcaaaaacgttccaagacttgttccaggatggactaagcccatctgcattggaaggcatgccttcggtgatcaataccgagctaccgatgcagttctgaaggggcctgggaagctgaagctagtttttggtatggacatatggttgcctacatcagatcattaaactggatttcttaacagttttttctttcgcagattcacattatgtcctatatgattgcattat

SEQ ID NO: 3357 - DNA, 338 bp, Zea mays
  Peptide Sequence Number=SeqID_9612
  Probeset Number=SeqID_17760
tttttgtattaacccatcccctgaattcatgccatgtagctgaaactttgtgtaccataactcgagttgcatcatctactctagctattaagctttcaagtccaagttttgttgcaaaaattttgggttatgcattggaagattcacaatcaaagtctagccttgtcaactcactttcagtgtgtatttctttgttggatcccaaaaaatcagctatttcatctccactttttcattcattccgaagtcaaaacatgtatgagccaccaattcctgtaaatccagatactattggtgcaatgctacctaaacttggtaatcatttaattatttaatct

SEQ ID NO: 3358 - DNA, 201 bp, Zea mays
  Peptide Sequence Number=SeqID_9613
  Probeset Number=SeqID_17761
ctgcagacagggcatccaagatgtccaaggccgtctcgatacactctcaattcagcatctatgttatcgacttaggatcggttcatggcacctttgttgcgaatgagagattaacaaaagacaacccagttgaacttgaagttggtcagtcacttcgctttgctgcatctaccagaacctatatcctgcgaaagaacgcag

SEQ ID NO: 3359 - DNA, 422 bp, Zea mays
  Peptide Sequence Number=SeqID_9614
  Probeset Number=SeqID_17762
atgaagtactcaccagaatcccttgaggcatttgtccagactgtcgccagcggctcgttttccgcaacggcgcgtgcgctggcaaaaagtcagtccaccatcagtagctcggtggcctatctcgaagatgacttaggctttgctctgtttgatcgcagcggtcgccagccggtgctgaccgatcagggccagcgcgcgctggcgctaggtgcagcaaattcttgctgccagccagctggctggatgaactggcggtcgtgctgtcgcagggcgatgagccgcgtcatcagcctggcctatttctgacttctggcaggctgatctccatgaaaatctgttgacgcgctgtgaggcacgctatccgtatatcgagtttgaatgcatgattgcggaatgatgagctatgtgctgcattttctgca

SEQ ID NO: 3360 - DNA, 618 bp, Zea mays
  Peptide Sequence Number=SeqID_9615
  Probeset Number=SeqID_17763
tgcaggcgctgattaatgaagtgcagtccagcccgacgccgattgtgctgttcgtcgacgaaatccacacgctggtcggtgccggcggccagcagggcaccggcgatgccgccaacctgctgaaacccgcgctggcgcgcggccagctgcgcaccatcggtgccaccacctgggccgaatacaaaaagtacattgagaaagatccggcactgacacgtcgtttccagaccgtgcaggtgcaggagccggatgaagccaaagcgattctgatgctgcgcagcaccgtcagcgcgctggagaagcaccatcaggtactgctgctggatgaggcggtcagcgcggcggtgaagctgtcgcatcgttatattccggcgcgccagctgccggacaaagcggtggcgatactggacaccgcctgcgcacgcgtggcggtgagccagggcgcacagcctgcggcactggaagattgcctgcatcgtctggccgcgctggagattgaagcggagatcattgagcgcgaaagcaaagtcgggctgggcgatgcggcgcgttcgcaggcggttgccgcccagcgcgcgacgctggaaaccgagcgcgatgcgctgcaggcatgcaagc

SEQ ID NO: 3361 - DNA, 445 bp, Zea mays
  Peptide Sequence Number=SeqID_9616
  Probeset Number=SeqID_17764
actacaggaatccgaagcattcccgtcggctaggcatgtgtctgttatgtgtgtaaactcaatgcatgtccgcccctccggcctcgcctagctccaaagctccctcctgctcacgggcacgcggcctcgccctgggggccatgccctgggccgccgtctcgcctcgtgtccacctcgtccagcgtcacaagtggcgctgccgccggtgatggctacttcgatctcccgtccgccgtcgactcgtccagcagtacctacgctctgaagccgatcccctcgccggtggtggcggcgtcggctgacccgtccccggactcggcgcgggagcccaagcagatgcgaactggcccgcgcctcaccgctagctcgccgcagttggttccgactatgataggtggccacgcgcgtgtgcctttctgtgtttgtgcaggggtaccgagctcga

SEQ ID NO: 3362 - DNA, 215 bp, Zea mays
  Peptide Sequence Number=SeqID_9617
  Probeset Number=SeqID_17765
ctgcaggcatccgcatgcgtgagcggacgatgcttaaagactgcagaactgtgaatgagcaggagaggctgaccaaagtttgctatggcacatattgcgcattatacagagcaatggatacgatgacaactgagattatggccttaaagaaggtcgagatggcgattgaacccgaaggttacccactgaccttgctcagagaaataaatatactc

SEQ ID NO: 3363 - DNA, 233 bp, Zea mays
  Peptide Sequence Number=SeqID_9618
  Probeset Number=SeqID_17766
ttgggtgcaatctgtcacctttcaagtcatttcaggtatgttgcaattgtatggccagatatcccttcttttgctgtatacaaagcaaatgattggtcagttgttgattcaggcacagggaagctttttgcctgggacacttgtcgagacagatatgctctggtagagagtgcattggccccaagaatgccacttgttgttaaaggtggttcttctaaaaaggcaaaagaagc

SEQ ID NO: 3364 - DNA, 266 bp, Zea mays
  Peptide Sequence Number=SeqID_9619
  Probeset Number=SeqID_17767
atggcggcgtccgcgaggcccggggagagggcgacaagcttcgccgtcgcgtgcagcctcctcagccgctttgtccgccagaacggcgtcgcggctgccgagctaggcctcaggatcaaagccgaggtcgagcagcaaaggtctccggcgacagctagcttgctccccggatcggagggtctggaggtcgtaaggaggaaggagcccatggagctgtttctgcagagcgtcgggttcagcaacaaggatccaaatgccccccctag

SEQ ID NO: 3365 - DNA, 573 bp, Zea mays
  misc_feature (553)..(553): n is a, c, g, or t
  Peptide Sequence Number=SeqID_9620
  Probeset Number=SeqID_17768
gaccatattcacacggttgatttgcagaaccgtccgttccgcctgaccggcgacagcggcgaatacacggcggatgcgctgatcatcgcgaccggtgcttcagcgcgctaccttggcctgccgtcagaagaggcattcaaaggcaaaggggtttcggcctgcgccacctgtgatggtttcttctatcgtaaccaaaaagtcgcggttattggcggcggtaacaccgccgttgaagaggcgctctatctggcgaacatcgcttccgaagtgcacctgattcaccgtcgtgacagcttccgcgctgagaaaatcctgattgaccgcctgatggagaaagtgcgtaacggcaacatcgtgctgcatactgaccgcgcgctggacgaggtggtaggcgatcagatgggcgtcaccgggttgaaactctcgtcaaccaaaggtgaagccccggtctcgctggaagtggcgggcctgtttgtcgccatcggtcatagtccaaacacggcgattttcgatggccagctggatctggaaaacggctatatcaaagtgcagnccggcctgcaggcatgcaag

SEQ ID NO: 3366 - DNA, 338 bp, Zea mays
  Peptide Sequence Number=SeqID_9621
  Probeset Number=SeqID_17769
ccgggctgcaggaattcggcacgagaaaggctctgtgtctttcttggcagtccccacgccctcgccaccgcgctgcaggggcgacgcagggccgagcgctcctcgatccagagccaaggtaggagatggctctcacgagaattggcctcgccggcctcgcggtcatgggacagagccttgccctcaacatcgcgcagaaagggtgccccatctcggtctacagcagcacgacctccaaggttgatgagaccggcagcgtgccaggtgaaggaaacctccggttggttcacgacccctcttccgagccatcagacccggcgctatgccttggctggcgc

SEQ ID NO: 3367 - DNA, 576 bp, Zea mays
  Peptide Sequence Number=SeqID_9622
  Probeset Number=SeqID_17770
tgcatgcctgcagcaagccggcacgcgtggcagcgaagtgattgccgtcggggccgccggtcacggcaacgggttgtatgcgctggatcgtcagcagcgcccactgtttggcatccagtcgattgatcatcgcgccagcgccacggtgcaggcgctggaatccagtggtgcggcggagcagatttacgcgctgtcattacaaaaaccgtggcccgccgccacgccggtgctgatcagctggatgcggcagcatcagccggaacgctgggcgcagatcggccatctgctgtgtgccaaagatgtcatcgcccattttctgtgcggcaacgtcagcgcggactattcggatgccgccggtgccgggctgattgattatcgccagcgcagctacagtcgtgaattgctggcgctgtacggcatcgaagaggcgctcgccctgctgccaccgctgcgtgaatcctgcgaggttaccggcgtggtctcggcccgcgcggcacagctcaccggtttaccggccggcatcccggtggtggccggcatgtttgacgtggttgccagcgcggtcggctcgggcgt

SEQ ID NO: 3368 - DNA, 853 bp, Zea mays
  Peptide Sequence Number=SeqID_9623
  Probeset Number=SeqID_17771
tcttgcatgcctgcagtggccgccgagggatgcgctgtgcagcgagctcggcgctggggacgctgggcgcagggtaaagcgatccactcccgccacctcagattccggtatggtgaagctcctcgccgacatcctccaccacaccgcgccgtccacctggacgttcgccctcgccgcgccgctgctccgccaacgcctcacctccgcgcacgtctcttccctcctcatcctcccggcctctctccgccggcccgatctttcccgtcggtttctcctcctgttgccttcccacctcgtctccccggtctccttctctctgcttgccctctccttcctctcctcgtccccttcgtcctcggcatcctccccgcacgctgactccctgcttctctccctcgcttcatccaccccgtccgcgtcctcctcattttcgtatctctcacacgctaacacgctcgccatcttccgacctggcgccgccaccgccgccgccacgcttcttgcctcctcgtacctccggatccgccgctcccgcgacgctgccaccgtcctgcgcctatctctctcgtccggcattgcgatgaagcaatacaccgcttcacagatactttttgctctcattaagattcggcaatttgctcttgcccgcgacctgttcgatgaaatgcttcaatataaatttcccttggacgagtatgtttacacggccggaattcgggcctactgtgagataaggaatttggatggtgcggggagattgttggcgaggatggaaagtgagggtgttaagggcagtgctgtgccatacaatgtgttgatgtatggtctctgcaggtcgactactagaaaatcg

SEQ ID NO: 3369 - DNA, 276 bp, Zea mays
  Peptide Sequence Number=SeqID_9624
  Probeset Number=SeqID_17772
ctggctcccttgctgcctcagctatcttccatggccagagggggtctccagcagcataccgcgaagaacttggctgggaaggaaccggatagtttgagcgtccgtggtagtgtcgcaaagcttaatgccaaatctgggaacatgcaagtgaaggcttaagcacaaaccctccccaaggttaatggcaccaaggttaacctcaagaatgcaagctcagacacagaggaggcgataccctacactgcccccaagacatctcacaaccaagggtaccga

SEQ ID NO: 3370 - DNA, 491 bp, Zea mays
  Peptide Sequence Number=SeqID_9625
  Probeset Number=SeqID_17773
taaataccgaaaaaatccggcaaagtggcgttaaaattttaaaggaaccccaatgtaaccccaaaaagcccctgggataattagcgttaaaaggggggtacccatttttaaatccccggtaaaaagtcttttaaaaggcgaattttaagggcccattctgttttaaaccttttgggaaaaggggtctttgcttgaaaccccattatttggaaaactgccggattttcccatgtgctaaatgtgtaaaaagttgggtaacgcaatggatttccgtgtaaagatacttgtaaatcaaaggccttttaaattcaatttaggaaactttattacatagaatatgacgccccatttattttttatcaaattttttattttttatttttttttttctttttttttttttttttttttttttttttttttttttttttttttttttttttttttttttttttaccacgcgtccgcggacgcgtgtgcggacgcgtgga

SEQ ID NO: 3371 - DNA, 383 bp, Zea mays
  Probeset Number=SeqID_17774
cagcaccccggccaggaggaggacgctccggccgccgatgcgtccaccggtatggacggccttatttatctatatacaacggcacgcgggatcctctgaccgtgtccgacgagatgcaccccacaggcgacgcggtggatgacgccctacccgtcgcgcccgacatcgccaagggcgaggtgatggaggacgacgtcctacccgtcgctaccgacatcataaaccacgccgacttactatgccccgaggctggcagtagatggcgacctactcaccgacgagctccgcaatcgcatcgtcaagcaggtacgctctctgtggacctcccctctgcaacttctcttcccatacgagctggttctgctcaatatgttgactcctaa

SEQ ID NO: 3372 - DNA, 518 bp, Zea mays
  Peptide Sequence Number=SeqID_9626
  Probeset Number=SeqID_17775
atggcgatcgaggccagcgccacttctgccgccaatcttgactggttcctgcgtgaatttgatgatggccgcgccggccagggcgcggcgcgcagcagcgacagcgtggcacaggtcaggcctgacgcgcagctgccgctgtatcacccttacctctattcagggcggaaagccgaacccgccaaagctggcttttacggcctcggcggctggcatacgcgcgctgacatgctgtttgcgctgttcgaaggcgtgacctttgcccaccgggcgcacattgaccggctgcgcgcggcaggcattacggtgaaccaggccacgctctccggcggcgcgacgcgcagcagtgtctggccacaaatgtttgccgatgtgctggggatgccgattcgcgtcgcaacctgccacgaaaccggggcgctgggcgcggccctgtgtgcgggcgtgggcgtgggtcagtggccgaatctggctgccgccgtgcagcaggcggtcacccttgcgccggaggcgctgca

SEQ ID NO: 3373 - DNA, 361 bp, Zea mays
  Peptide Sequence Number=SeqID_9627
  Probeset Number=SeqID_17776
tgcagcttgagatggcagaagagtgtcttctacatgctatggaccttaatggtttggtgcttttggattctttccttggggaaggtgaaggccttaaccaattggcatttggtgcccaagaaccagggaagaaccatggtgccttcccttggtttttccaggtaagaaaacttgaaaaagggtcttcaattggttattaaaaaggaaagaattcggaaacaagcattaatggcaagttctaatcttcccagcaaagtccttaagattgaagcattgtgaaaaaaggatctccaaaaggtcttctgtcataagtctcttaagctcccgttctactcacttttataatattttttctgcaggc

SEQ ID NO: 3374 - DNA, 492 bp, Zea mays
  misc_feature (98)..(98): n is a, c, g, or t
  Peptide Sequence Number=SeqID_9628
  Probeset Number=SeqID_17777
cagttccccccttatacgccgggcccaaagccaccaccggggcccgtgtggacgacgggcacgcggcccccgacaccccgccgcgcctcgacgacttnggcgtcggcgacggccacgcgcccggaagcggcgcgggcagcggaagccacgggcgcaagcggaaccggaccaagaacaccccggagcaaaaggagcggacgcgcgagaacgcggagaaacagggctggcgcaaccagcgcaacgacgacggcgcccacgaccgcaacagcgacgagaacggcggcaagcggcaggggcccaaggagcggaggcacaaccacaaaaaccagcgcgcctccaaccccgcagccgcggccgcaaccgcgggcaacggccacagccccgccgcaggcgccggcaccggaaccgccaccggaaaccgcggcggcaaaaccggcgacggagacgacgacgacgaagacaacaccgacgactccccggcacgcgccggcg

SEQ ID NO: 3375 - DNA, 485 bp, Zea mays
  Peptide Sequence Number=SeqID_9629
  Probeset Number=SeqID_17778
aaccgcaccgcccggcggacaccagaacgttttatttttggccgggaaggcgcgccgacaaccgacccaagcggcgcatgaaaagggaaccagaggcagcacggaacgcgaacaacggagggacacaccgccagcatgcaacaccagagggacccaaccccaccagcggtgcacaagaccaggaccacagacgatagaccacaggcccccggggagccagcaaagcacagacgaggaaggccgcacacaaacggaccagagggcacgacgaggcaacagacgcaggaacaagcagaggcaacgcggcagcagcacggcactacacaggcgaggagaggggccccacccccagatcccgacatgcaagagaacgccggccaggaggaccccgcgcaaaagaaagcggagcggacggacgccggacacgggccagaagcaccagcccgcgaccccgcaaggcagaaacccggatgagccgcccgcac

SEQ ID NO: 3376 - DNA, 224 bp, Zea mays
  misc_feature (118)..(118): n is a, c, g, or t
  Probeset Number=SeqID_17779
acggttgtaaacgtcacttgtgtaaaacatgtttcagtaaacaagtttttccgttttcatccgttgaagcactgccaccacgttgcacagacagcatttgcacgcacacaagtcaagnacaaacagtatttaaatccatatagatactaagttgtacaacaaaaaaatcaatagttttaccatcaatccggacgcgtgggtcgacccgggaattccggaccggt

SEQ ID NO: 3377 - DNA, 500 bp, Zea mays
  Peptide Sequence Number=SeqID_9630
  Probeset Number=SeqID_17780
tgcatgcctgcaggtgtacctgagcgagccggtggactatgccttcagcgcgattcgcttcctgccggtggtggaaaacccaggcaaagtcttctgcgttggtatgaactatgccgacaagcgccaggagtttgccgccacgctcgacgcgccgacgctgttcgtacgctttgccgattcgctggcagcacacgagcagcccctgctgaaaccggcgaccacggctgaatttgattacgaaggcgagctggcggtgatcatcggcaaggctgcttatcaggtaaaagccgccgatgcgctacagcacgtagcgggctacagctgctttatggatgccacggtgcgcgacatgcagttcacctggtttaccgcaggcaaaaactggcagcaaaccggcggctttggcccgtggatgaccaccgccgacgacatcccggacccgcagcagctggcgatcaaaacctggctgaatcagcgcgaagtgcagaacgataccacgg

SEQ ID NO: 3378 - DNA, 334 bp, Zea mays
  Peptide Sequence Number=SeqID_9631
  Probeset Number=SeqID_17781
tgcaggaataccagccgccgcagggccccgactgggcgcgcgcggccggcgccctgtggctggccgcgcccggcttcacgccgtcgcccgaccaggtggtcgtcacgagcggcgcgcagcacgggctttatgcggtgctgaacagcctgatcggcaccgacggcgtgatcgtcgccgaccggctcacgtattacgggctgaaggcgctcgcgccggtgttccagttcgagatcgtcagcgcggcggccgacgacgacggcctgctgcccgacgagatcgaacggatctgccagcgcatgcccgtcaaggcgatcttcgtcgtgccgaacctgca

SEQ ID NO: 3379 - DNA, 269 bp, Zea mays
  Peptide Sequence Number=SeqID_9632
  Probeset Number=SeqID_17782
ctgcagctcgccggcgggggctggtgctgttgcaggggccgcgatgaacataatgcacgccgtgcgccgcgtgtaagctgctccggcgacggtgcgcgcaggagtgccccttctcgccctacttctcgccgctggagccgcacaagttcgccgccgtccacagggtcttcggtgccagcaacgtctccaagatgctcctgttcatcgggcatcacaaaactctggatttttgccatacatatacacagagatcaatctgcaggcatgca

SEQ ID NO: 3380 - DNA, 334 bp, Zea mays
  Peptide Sequence Number=SeqID_9633
  Probeset Number=SeqID_17783
agcaggcaggtgcaggtctccgggtggggcgcgtttctatttctatttctaccagacaatcacatggtcgggtctcgggtcatcacgcacatgtggggatttgagcgagtcaacaactggcgtggcctcgtggctcttccgccgcccaggcactccaattcctccgcgttgctcgcgtcacgtgatgaactgatgatgggccgaaggcggcggcttcctctcccgccgtcgacgaggttcggcttgtgtgccctcgccgaccgctcccccgtcaccgtctgtgctgagtgtgcagtgatgcagagcagaacgatactgctcccacgaaacagca

SEQ ID NO: 3381 - DNA, 568 bp, Zea mays
  Probeset Number=SeqID_17784
gcagggcatcagcgtggtgtggagtgagtttcctgccggtccgcaactgttgtatgcgctgcaaaataatgagattgattttggtaccaccggtgaagtgccacctatcttcgctcaggccagcggtaacgccgtgacttatatcgcctgggagccaccggcaccgggcagcgtcgggattgtggtgccacgcgacagtactatccacaacctggcagatttgcgaggtaagcgtatctcggtcaataaaggatcgaatgttcactggctgctgttgcagctgcttgaggaagccggcatcggtctggatgaaattaaagtggtgtacacgccgccgaaatatccgctcacagccagcgattatctggccgttgatgcctggatgatgtgggatccgctgctgagtgccgcagaaagcaacgccgatttgcgcgtgctggagaagggcgaaggccgggtgcgcaaccaccagttttaaatggcgcgccatgattatgtgcagcagcatgacgatatcgtgcagcagctggtagggagcctgcaggtcgcatatagaggatcgaaaggt

SEQ ID NO: 3382 - DNA, 244 bp, Zea mays
  Peptide Sequence Number=SeqID_9634
  Probeset Number=SeqID_17785
aatgcaatgaagctcagctctcctgctttctctaaaaaagatagcaatgtaccaatagtagataaatatgatattatgttttatttttctaccttatttcagaaaacagagcatggtagagtatgttttggtagatcaggaattcataggtggggactttttgctcggagggacattcaagaaggagaaatggtactttccttctcatatgttgtaataatcggtggcctactaaccctccagt

SEQ ID NO: 3383 - DNA, 385 bp, Zea mays
  Peptide Sequence Number=SeqID_9635
  Probeset Number=SeqID_17786
cccgcagatcttccgtcagacctgggaaccgagcgttgccctggatctgaacaccaagcagaaagccctggaaggcgacttccacgaggtggtgctgaccctgtcggttaccgtcaagaacggtgacgaagtggccttcatcgctgaagtgcagcaggccggtatcttcctgatcaagaacctggatgcggcttcgatgagccacaccctgggtgcgttctgcccgaatatcctgttcccgtacgcccgcgagaccctggacagcctggtgacccgcggttcgttcccggccctgatgctgtcgccggtcaacttcgacgccctgtacgcgcaggaaatgcagcgcatgcaggaagctggcgaagcgccgactgtgcagtaatag

SEQ ID NO: 3384 - DNA, 204 bp, Zea mays
  Peptide Sequence Number=SeqID_9636
  Probeset Number=SeqID_17787
cgacggcgagcgcatcgcggccaatcatgtagtcgtcgcggccggcaccggttcgcggcaattcttcggccagctcggcgtgcgcgtgccgctcgaaggcatcgccggctaccaggcgctggtgaccgatccgggcgtcgagttccgccactccgtgatctatgcggacggcggcttctgcttcagcccgatgacgcgcgggct

SEQ ID NO: 3385 - DNA, 285 bp, Zea mays
  Peptide Sequence Number=SeqID_9637
  Probeset Number=SeqID_17788
ccccgagcccggcgcgggccgacccggaccccacgcccagcccggcagcgacgcgggccagccggccggggcgcccggccgaggcccacccggccaagagacgcgcgccccccccggcggcggcagggggccccccccccgccgggacgcggacccgccgcggcgcgccccgggggggggggggggcggccccaaccccccccgccatacaccccacgcacccccaaccgccgcacacgccccggccctaccgagtgtcacccgcggccaagaacgcccggcgaa

SEQ ID NO: 3386 - DNA, 540 bp, Zea mays
  Peptide Sequence Number=SeqID_9638
  Probeset Number=SeqID_17789
ggggaaaagactgtttagtcctcgatatattatccttaagtcaatagtaactgttaagggcatggttgtaattctacacaggctgcgttctgtgcttataaatagatgaacagtgacatcgtactgttcacgctgattggtattcactcgcacgtcacatctggattctcgccttctggaataacactacgtaagtgtttgttagacgacgaccacttggggaccatccttttgtgttggcacttgttcagtcggttcttcttcaggttgatccatcaacattaccttgtggagtagcccacccattacatcatcttacagtcgagttgactcgttttctgcatcacgtgataaactagcgtaccaataaaataaactcaacttgaagaccgcgatatcagagaataattctagttcgcgcgcatctacgcaaaattgatggggaaccgttatgggctatgtttctccagcactaactaggtatatcctgttagttcggacaatcatgctcctcctttctgattggatctaataccgaaa

SEQ ID NO: 3387 - DNA, 338 bp, Zea mays
  Probeset Number=SeqID_17790
gcaaggttcaaaaataagtccaagggtttttccttcaagatggtggccgccaccaagacaaaaaaggctgcggggtggcccaaacaacgggttaaggggaagcccctgccttctacgttgttatatcacgtcatcagcacgccagccgtccgcaacctcgaaggcctacaaataacctaggacaccgagggccaccacattgtcaacctcatcgtggccgaagactggcgggccctaataacactatacatgcaaggccactaccgtccaacagatcgcaatgagtcaaacgactgaagcacaggagcagggacttcgcaatagtcgaaggtcagggg

SEQ ID NO: 3388 - DNA, 744 bp, Zea mays
  Peptide Sequence Number=SeqID_9639
  Probeset Number=SeqID_17791
cccctgttcggcgaggtgctgtcggtgcaggacggcgacgaagcgcaagctcttcgtcatcaccacgggtgctggccaccagcagcgagcagcaggaagaagaagaggagggacgcctccgccgctggtggcgccagcgccactgacgccgctgccaatgggcatcatcatcagagcaagaaaaccaggacggcggcggcgcgccgagacgacgacggaggcggcggcgacggcggcaggaagaagctccggctcaccgccgcgcaggccaccttgctcgaggacagcttccgcgcccacagcatcctctctcacgtatgtcgcacgcacgcacgcatccatcctgcgcccatgcatgcatacgtatttctccagtcttgcatacgtgctgatggatccaatccaatctaccagggggagaagcaggagctggcgcggcaggcggggctgagcgcgcggcaggtggaggtgtggttccagaaccggagggcccggaccaagctcaagcagacggaggtcgactgcgacctgctccgccgctggtgcgcccgcctctccgacgacaacgaccgactccgccgagacctcgccgacctccgccgggcggcgtcgtcgtcgtccgcgggcctcggcgccgtcgtcttctgcgcctcatgcggcgccgacaggcagctcgccctcgccgccgccggcaacgtgctgccgtcagtcgcctcgcctagccactcacctcacctgacctga

SEQ ID NO: 3389 - DNA, 268 bp, Zea mays
  Peptide Sequence Number=SeqID_9640
  Probeset Number=SeqID_17792
gcgctaacgggcaacggcagcaggctctgcaagctccagggcttgatctcacctgtgtcgcggatgaatcggaccttgggtgggaccgtggctaccgcgcaatgcacacaacggtcattgcggcatgcgagcacgtagccgtagctcatgatgacgccccccggcccagtatggagctagtcgtcgacggaggcccggcaaggatcggttcttttgaggagggggctgctgtgctgccggactggtggctggaggctggaggctggag

SEQ ID NO: 3390 - DNA, 523 bp, Zea mays
  Probeset Number=SeqID_17793
tgcagctcggcagcgcggagtcactggaattaggtcgcctggccaatgcacagccgccggagctgctgcgttacgacgcgcgcggtgagcggctcgacgaggtgcgctttcatcctgcctggcatctgctgatgcagggcgtgtgcgccagccggttacataacctgagctggcagcctgacgtgcagggcagcgccatggtggcacgcgcggcgcgtttcattctgcatgcgcaggtggaagccggttcactctgcccggtaaccatgactcacgccgcgatcccgctgctgcaaacccatctgcccgctccctacgccgactggcacgatcgactgctgagcgatcggtatgatgcgcatcatctgcccggcagccagaagcgcggcctgctaattggcatgggcatgacggagaagcagggcggcaccgatgtgctgagtaacaccacgcgtgccgaaccgcctggcacgcgtgcgccgggcgaaccctggcgcatcaccggccacaaatggttcttctc

SEQ ID NO: 3391 - DNA, 313 bp, Zea mays
  misc_feature (94)..(94): n is a, c, g, or t
  misc_feature (254)..(254): n is a, c, g, or t
  misc_feature (268)..(268): n is a, c, g, or t
  misc_feature (272)..(272): n is a, c, g, or t
  Peptide Sequence Number=SeqID_9641
  Probeset Number=SeqID_17794
tgatcttttcatgcttcagtctactcagatgtgtcaggtttgctactgaggttgctggtgttcaagaccttggtatgttaggccctgcagtggnggagttttggaacatatgttgagaaacttatgacaagtgaaccatctggaaatgttattgatatctgccctgttgtggctcttacatccaagccatttgcatttaaagctaggaactgggaactgaaaggcaccgagaccattgatgttactgatgcagnggggtccaacatangagntgacagcagaggacctgaagttatgcgcattggtgcacgcc

SEQ ID NO: 3392 - DNA, 297 bp, Zea mays
  Peptide Sequence Number=SeqID_9642
  Probeset Number=SeqID_17795
atgcctgcagcgccgccgcgccgccgcgccggtgtgcggcgtcaggcgtgtgccctccgcccgtctaccctcctcgcggtgcccattctgttcttcgccgtctgcccgtcttcctcggcggctcacctccatggaagcctaagaaccggatgggcacgagcacgaaggtcattcgcgtctgccaataccacgaagttccggatcagtggtcaagcgcacgagcacgaggaagctgctatgctggcttatggtaactttgataacgagctggctcacgagttaatcgagtcagactga

SEQ ID NO: 3393 - DNA, 427 bp, Zea mays
  Probeset Number=SeqID_17796
ggtacggcccctgcccggcggaaaagaagcgcacgatcggcgcgttcctccgctccttgtcgctttccccagcaatcctttcgccgtctgtgtgggcgtggtggcgcacggtgcgtctgtacgcgaaccacacctcgacaaacgtgtcggcgtaggtgtcgctgggcgagaaaaagtggaacgcgagcatgtcccgcggcgcgcgtctgtcgcgcatgcacatccagccagtggtcctcgaccccgtgatggcgcgcacccggcccctgcccgtgaacgccagcggaggcgtgtacttggtgctcacgtccccgaacgtcgccgtggacgaattctgcgggcaggtgtgcggcttccactacttcaccttcgcgtcggtggtcgggtccacgctgccgaacgcgtgggtgggcaactcggcgcgcag

SEQ ID NO: 3394 - DNA, 337 bp, Zea mays
  Peptide Sequence Number=SeqID_9643
  Probeset Number=SeqID_17797
tttgagcctgtctcattgcagatgtattcctcacttcagaaaattacagctctacctgatgatacaaaagtatactgtgggcatgaatataccttgagtaattcaaagtttgccttgagtgtagaaccaagaaataaagcattgcaggaatatgctgcaaatgcaactaagttacgtaatagtaatatacccacggtaacattacctcagtctttcgaagcctcttgctccaacttcatttctacatgtaaaagccactgagttaacacaaagaatttgaaagaaaaagaataagaggtttgcattgcatttaaggaggaaaagaataacacagtta

SEQ ID NO: 3395 - DNA, 382 bp, Zea mays
  Peptide Sequence Number=SeqID_9644
  Probeset Number=SeqID_17798
atgctgttggggctgggtttacttagcgcgattggtgcagcggcaggcatcatttatcacaacaataaaaaagatcacggtaagtcaggtgagggtgaaggcgggaatctgcctgatccggtattcacgcgaggcgcaaccattgatgctgtgacggataacgtgggcgcaattcagggaccgctggccagcggcgactataccgatgacgcgacgccaactctgagcggcaccggcaccaatcctggtaatactgttgagatctgggataacggcacaaaaattggtgaagccattgtcgatcaggacggtaactggacatttacgccaggcacggcgctggctgaaggcgaccatagctttacggtgattgaacgcgacg

SEQ ID NO: 3396 - DNA, 232 bp, Zea mays
  Peptide Sequence Number=SeqID_9645
  Probeset Number=SeqID_17799
tgcaggtgcagcagatccagtcggcgtcgtccggtctgtatggccgcaacctcggcacttacagtgcgattcagaactggctgctctccggcgccgatacgcgtcagctgcgccagttcggcctgaacgcctatcagatggaaggcaccgacagctacggcaacgtacagtttaccggttactacacgccggtgggggaagcgcgttatacccgtcagggcgaattccaata

SEQ ID NO: 3397 - DNA, 523 bp, Zea mays
  Peptide Sequence Number=SeqID_9646
  Probeset Number=SeqID_17800
tgcaggatcaggggcgcgtggcctatgtggagctgatcgcgataagcggggcgctacgggattacgggagctgacgtcattaccgcactgtacaccaagttttgggtcagcgggcttgggtttccaccatttttacccaggcgaatcagtatcgcgtagtgctggaagtggcgccgcagtatcagcagtcgccggcgtcttttgatgacgtgtatctgccgaccaccaccaccggcatggtgaaactcaccgccatcgccagcgtgcatgcgcggaccggggcgctgatgcacatgcgcctgaatcagttcccggcggtgatggtgtcgttcaatcttaaccccggtttcgctggaggaggggcagcgggcgattgcgcaggtcacgcagcagcttaaactgcccgccagcataacgctgcgctatcagggtgaaaccgcggcgtttcagagtgccaccggcaacacgctgtggctgattctggcggcgctgatcaccatgtacgtggtgctgggcattctgt

SEQ ID NO: 3398 - DNA, 262 bp, Zea mays
  Peptide Sequence Number=SeqID_9647
  Probeset Number=SeqID_17801
ctgaagctgaagtcaaccatgataactcagttttcacaaacccagatcttggatcttttaagttcaggaaaaaatttgaggctcgggcctttagctttcttcctctaccaatcaatactagcaagccagtgcatgtaaatgcttattttgaactctcttcaaatcgaagggatatatgggtcggaactgacatggtaaaataggcagagtacggtcagaatggaagttatcgctgcttgaagaagtcgttgctcctgcaaat

SEQ ID NO: 3399 - DNA, 310 bp, Zea mays
  Peptide Sequence Number=SeqID_9648
  Probeset Number=SeqID_17802
atgaatccgtctcgtctgtttgtcctgcgcccggtggcgacgattctgctgatggtcggcgtgctgatcgccggtctgttcgcttatcgctttctctccacctcggcgctgccgcaggtggattatccgaccatccaggttaccaccctttatcctggcgccagcccggacgtgatgacctcgtccgtgacctcgccgctggagcgtcagctcggtcagatggccggtcttagccagatgacgtctgccagctcgggcgggtcatcgattatcaccctgaagttcagcctcgatctgtcgcttgacgtcg

SEQ ID NO: 3400 - DNA, 468 bp, Zea mays
  Peptide Sequence Number=SeqID_9649
  Probeset Number=SeqID_17803
aaccccgggtttacccagcgtccctctaggtccagaagacaccgcaaccctcggccgtggcacgccgcaccagggcactccccttgtgatggtcgagaaagaaggacccaaatgacccatcgatcgagtcaagcaccaccaccacaaccaccacttctataagcatgggcgatcaaagcgtcgcgagtatggactcagatgggctgacgcctagcgctgtcttctcacagatcatgaaccccaaggggcggtgaggtaaagctcatcccattcgttaccttgcaggcataatttattcattcagcatgtttttcatgagttcgccccgcccatgttctctcaagttatgaaccagaagtaagagaattgtttcatactactagatattctgccttgccttgtacttcttctccagtattgtaatgactatacatctgtccgcttgtattgtactgctgctattgaccc

SEQ ID NO: 3401 - DNA, 782 bp, Zea mays
  Peptide Sequence Number=SeqID_9650
  Probeset Number=SeqID_17804
tgcaggtcagcgacgccaaacggctgagcgcgcaggcgcagctcgaccagcagcagtccaccattgccgaggcccgcgccacgctggccgccagtcaggcatcggcgcagtatgccgggcagagcgcggcgcgctacaaccagctgtacaagagcggtaccatagccgctgacgatcagcagaaagccagctcaacccagcgttccgcggccgctacggtgcgccagagcgcagcggcgctggcggcggccgaacagcaggtgaaggtgcttgaggccgcgctgcgtcaggcggaggctgatgtcgcggcggcgcaggccagcgtcgaccaggccgggttgaatctctcttatacgcgtattattgcgccggtggatggcatggtgggtcagcgttcggtgcgcgtgggagcctgggtcagcgcgggtacgcgtctgctggccgtggtgccgctacagcagacttacatcaccgccaattatctggagacgcagctggcggatgtgcgcccgggccagagagtggtggtgaagattgatgcattgcccggcaagaccttcaccggtcacgttgacagtatcgcgcccgctaccggcgccacgttttccgcgattgcccccgataacgccaccggcaactacactaaagtggttcagcgtttgccggtgaaaattgtgctggatccgcatcaaagcgatctggcgcaattacgtgtcggcatgtcggcgattccgcagattgagacccgatgaaaatgtgagcaacttctcagaagtgaccta

SEQ ID NO: 3402 - DNA, 481 bp, Zea mays
  Peptide Sequence Number=SeqID_9651
  Probeset Number=SeqID_17805
cctcttcgcccccatcgccgccctcggtgcggtactgctcaccgacccgtccgccgtggctcccgcattcaccggggtgttcatggagaaaatggtcggcttcatcaagctttacttcccggtgttcctgctgggcgccgtgttcggcaagctgatcgaactgtccggcttctcgcgttcgatcgtcgccgccgccatccgcgtgctcggcacccgccaggcgatgctggtgatcgtgctggtctgcgccctgctcacctacggcggcgtgtcgttgttcgtggtggtgttcgcggtgtatccgttcgccgccgagatgttccgccagagcaatatccccaagcgacgatcccggcaaccattgccctgggcgcgttctcgttcaccatggatgccctgcccggcaccccgcagatccagaacatcatccccagcaccttcttcaacaccaccgcctgggccgcgccctggctgggcctga

SEQ ID NO: 3403 - DNA, 261 bp, Zea mays
  Peptide Sequence Number=SeqID_9652
  Probeset Number=SeqID_17806
atgggcgacattcacctggtcggcccatccaccaaccccgcgcgtggccaaattcctcccacgcacgcttcacccaggctggccgcgcagtctggtctgggcccacctgtcggtcgctgggcacactgcgccgacagcccgggccctatatgtgcgcctgagctagtgatgcgtgggcccggtgccactgttgatcttcaagccgtcgcgggtgcgcagatggcgtactggcccgtcgagattctcgctggcgtgggctga

SEQ ID NO: 3404 - DNA, 468 bp, Zea mays
  misc_feature (438)..(438): n is a, c, g, or t
  Probeset Number=SeqID_17807
ctatcgcagcacccgatccccggtttcaacgtcgatgccggtatcgctaccgacttcgcggagaactggaccttcggcgtgaccgggcagaacctggtctcgcgcgatatcgacaccaaagaggttaacggctatcgcgatacgtatcagattcgcccactggtaaccaccggactggcgtggaatcgcggaccctttactctgaccggcgatgtcgatctgaccgaaaccaaacgttttaaatcgcaggagagcagtcagtacgctggcgtgggtggtgaatatcgcgtgctggactggctggcgctgcgtgccggctatcgcgcggatatgaagtcgaatgacaccgatgtgtttacggccggtctcggcgtgtcgccgttcaacaacgcggtgcatctggacctggccggttcggtcggcaaagacaatacctgnggcgccatggtgcagctcgggtttaacttc

SEQ ID NO: 3405 - DNA, 486 bp, Zea mays
  Peptide Sequence Number=SeqID_9653
  Probeset Number=SeqID_17808
aatctcagcaaaagcattattgtgcgcaatgaactgccgtgggctgatgagatggtggaaaagatggtgctgctgattaaagaggagctgcaccacttttatcaggtgtgggaaatcatgcaggcgcgcgatttgccctatcgcaagatcaccgccagccgctacgccaaagggctgctgcgtgaagtgactacccatgaaccggatacgctggtggataaactgatttgcggggcgtatatcgaagcgcgttcctgcgagcgcttcgccagcctggcgccgtatctggatgcgcagctggagaagttttatatctcgctgctgcgctcagaggcgcgccactatcaggattacctgacgctggcggcacagatttcaccgaaggatatcgcgccgcgcgtgcgggcgattggggcagcggaagcgcgcttgatcagcgaaccggacgctgagctgcgctttcacagcggcgtgccggcgttttga

SEQ ID NO: 3406 - DNA, 238 bp, Zea mays
  Peptide Sequence Number=SeqID_9654
  Probeset Number=SeqID_17809
ccaacgggcggttgggggggcaaatttacgaacggcaccagggggtgtggcttggcaagttcacgggccaggccgaggccgggggggcctaagaagtggccgggcaacggttccggggcccggaagcagttaccaacttccggccgctggcggaattggaaccggaagccgccgtccaggtccggttccttggggtccggttcaaggccgaggttggtgacaaggttcgccaggaccc

SEQ ID NO: 3407 - DNA, 412 bp, Zea mays
  Peptide Sequence Number=SeqID_9655
  Probeset Number=SeqID_17810
atgcgcgggcaaggcccgagccaggacatcccccaggccatcaacgtggtaccggctcaggtcatccgtgaccaggccccgcgcaacctcgatgacgccctggccaatgtcagcggcatcacccagggcaacaatttcggtggcacctccgacacggtgatgaagcgcggcttcggcgacaaccgcgacggctcgatcatgcgcgatggcatgcccatcgtgcagggccgcagcctcaacgccagcaccgagcgggtcgaagtgctcaaaggcccggcctcgctgctgtacggcatccaggaccccggcggggtgatcaacgtggtcagcaagcgcccgcaactcgagcagtacaacgccctgaccgtgcgtgggtccacctatggtcgcggcaagaatggcagcggtggcg

SEQ ID NO: 3408 - DNA, 572 bp, Zea mays
  Peptide Sequence Number=SeqID_9656
  Probeset Number=SeqID_17811
ttgcatgcctgcagctgttcaacgttgaacagtgtgagggcctgcctgaattcgtcagcggtgaaggtgtggtttctgttccggcagaatccccgtctgaactcagcgcggtacagctgaatcaggtacagcagatattcagctccacgggagtcgggtgcgatcaccgccggcaggaccgcgcttattaccggccgggcgctgaccgcatagtcatgccgacggtatcgcagttccggacggaggcggactactggtccaccctgctgcatgaactggtgcatgccaccgggcacggcagccgcctgaaccgggaaggcattgcctcatcgtcacggcagtttggtgacccggtttatgcgttcgaagagctgatagcggaaaccggcagcgcctttctctgtgcggagctcggtattaccggcgacgtgcagcacgaaagctatcttgccggctggctgagagcacttcgggaagacaaacgggcaattttccgtgcctgccggttcgcccgtgaagcctcggaatatttacttgcccccctgaaccgtaatacggaacaggcggcataa

SEQ ID NO: 3409 - DNA, 309 bp, Zea mays
  misc_feature (227)..(227): n is a, c, g, or t
  Peptide Sequence Number=SeqID_9657
  Probeset Number=SeqID_17812
aagaagcggccggcagtgcgctgagattcgcccttaagcagtggacccaccgcagagccctttttccccctcctcttttttttttttttttagactttggttggcatactacaacagagttatgtgccccgtattactaaccactatattaaacctttgattaattgcgttgcacaaaatttagaatatatatatttagacacaaaatttcgaatatatatatatgnttctcttctctggggcctagccttgggaggggccatagcccccaccgacccccgtactctgcgttgttaccactgcttacga

SEQ ID NO: 3410 - DNA, 202 bp, Zea mays
  Probeset Number=SeqID_17813
gcgatgcaaccttacgttcttgtactttattacagtaaatatggttcaaccaaacaaatggcacatttgattgctgatggtgtagaagcaactggcgttacggctcgtatcagaacagtccccaatcttgcgactgttgtgactcaagcggaagcaagtatccctagtgaaggcgacatctattgtactttagatgatttaa

SEQ ID NO: 3411 - DNA, 226 bp, Zea mays
  Peptide Sequence Number=SeqID_9658
  Probeset Number=SeqID_17814
gttgcgtgaagagcttgatactattgagcatagtgccgagccgaatcccgcatgggctgttttttcatctggcttgaataaattgattaaacctcgtagtgagcagatggaaaaccagctggatgcagaccagtggtcaattgcagccgatcctgtccgtaagttacgctttctggataaattgcaccagcaggtggaacagctagaagaacggttgttggataat

SEQ ID NO: 3412 - DNA, 396 bp, Zea mays
  Peptide Sequence Number=SeqID_9659
  Probeset Number=SeqID_17815
atcaatggccaggcgtgggtgccgcatgcaggtattgtctacaaggtggacgagcagctgtcgttttatggcagctatagcgagtcgttcaagcccaactccaccatcgcgccgctggtcggcaatgtggtgcttgactcgtcggtggcgccagaagagggcaaatcgtgggaactgggcgccaagctcgacataccgggccgcctcacgggtaccctggcgttgttcgatatcaccaagcgcaacgtgctggtttccaactttgataccagtacgcgcgaaacggtgtacagcaatgccggagaggtcagctcacggggtgtcgagctggacctgacggggcagttgagcgagcgctggagcctgattggcagctatgccttcaccgatgctgaa

SEQ ID NO: 3413 - DNA, 345 bp, Zea mays
  Peptide Sequence Number=SeqID_9660
  Probeset Number=SeqID_17816
atgagtcaggttactgttcgtcacgcaacgcccgaagatgccgccgttctgacgcgtatctatagccagccggaaacccaggcgggcacgctgcatctgccgtatcagtcaccgtcactctggcaggagcggctcgcgaatccccgtccccatgtcaccatgctggtggcctgtattgacgggcaggttgtcggtcagctgacgctggaagtgatggcggtggcacgccgccgtcactgcgccactatcggcatgggcgttgatcaagcattccatcggcgcggcgtgggtaaagcgctgatggcggcgatggtggatctgtgcgacaactggctgcaggtcgac

SEQ ID NO: 3414 - DNA, 381 bp, Zea mays
  Peptide Sequence Number=SeqID_9661
  Probeset Number=SeqID_17817
cttgttgaccgaatgatgccgggagcaggccgactggacacatctggttctcccaagacaaagagctggaagattgcaggagtttgaaactcttgtctcttctgcgggcgtcgatgcgctgcaagtgattaccggcagccgtaaagcgccacatcccaaatattttgtcggtgaaggaaaggcagttgaaattgccgatgcggtgaaagcgagtggagcatcggtcgttttatacgatcatgccttatcccctgctcaggaacgtaatcttgagcggctgtgcgaatgtcgcgtaatcgatcgcaccggcttaatactcgatatttttgcccagcgcgcccgcacccatgaagggaaattgcaggtcgagctggcacagtt

SEQ ID NO: 3415 - DNA, 581 bp, Zea mays
  Peptide Sequence Number=SeqID_9662
  Probeset Number=SeqID_17818
aatttcttttttttaatacatacatgcaaccctcatgaatatacaggtacaagatcatcatcggcctggggtcggcgctgcggtacctgcacgcggagtgggagcagtgcgtagtgcacggcgacatcaagccgagcaacatcatgctggactcctcgctggacggcaagctgggcgacttcggcctggcgaggctggtcgaccacggcgtcaagccggccacgaccaaggtggtgctgggcacggcgggctacatcgacccggagctcgtgaacacgcgccgcccgagcgccgtgtcggacgtctacagcttcggtgttgtcctcctggagctcgtcacgggccggcgccccgtggaggagcccgacgacagcgacgagctgttcgtgctggtcaggtgggtgtggcgcctgtacggcaggaacgccatcgccgaggcggtggacgagaggctgaagctggtaggaagggaaggcgatgagatggagcgcgcgctggtggtgggactctggtgcgctcaacccgaccgcggcgaccgcccgtccatcgcgcacgccatgcacgtcctgcaggcatgcaag

SEQ ID NO: 3416 - DNA, 226 bp, Zea mays
  Peptide Sequence Number=SeqID_9663
  Probeset Number=SeqID_17819
tacccctgctacgaagcaagatctgaaacaaaccctccactctgtggagagtacgacgatccagcaagccaggaaggcgaggcggtgctggtcgccggagcttcaccggctgtttgttgccgccttgcatcaactcggcggccctcaagttgctactccgaagcagatcagggaggtgatgaaggtggacgggcttacaaacgatgaagtgaaaagccatctccag

SEQ ID NO: 3417 - DNA, 401 bp, Zea mays
  Peptide Sequence Number=SeqID_9664
  Probeset Number=SeqID_17820
tgcagcgcatcgacggcgcgcagggcaagttcccggcgcgcggcgcgctgtcgtgcgcgaacctcgcgcacggtttcgcgggtctcgaaggcagcgacaagttccagatcaaggcgatccgcgaaccgaacatcggcatcgtgtcctcgtacaacgagatgctgtccgcgcacgcgccgtacaagaatttccccgacatcatcaaggccgccgcgcgcgagaacggcggcgtcgcgcagttcgcgggcggcgtgccggcgatgtgcgacggcgtcacgcagggcaacccggggatggaactgtcgctgttctcgcgcgaggcgatcgcgatgggcacggcgatcgcgctcacgcacaacatgttcgacgcggcgctctgcctcggcatctgcgacaagatc

SEQ ID NO: 3418 - DNA, 484 bp, Zea mays
  Peptide Sequence Number=SeqID_9665
  Probeset Number=SeqID_17821
atgcctgctgaccatcttctccgatgcctgctccgaggacaaggagacgaggatcagcaggcgctgtccccgtcggtctcccgctccagcgagagctcgtcgatcgggtcggggtacggggacgcgtcgtacccgcaggacccctacggtctacggcatcctggagcttgggcggccagggacaccgggccctacaagcggttccacgtggtcgacgccgcgtccttggaccccaatgcgctggccggcgacggcgacacgaggcctctcgttcggagactgaaattcggctgcctggcgatcgggtggcggtttgaccttgaacgcgcggacgctgatcggggagatgcccaattatgtgctgatctgctgggtcttgctgctggctgctgcggaggctgtcgtgggttgacctggcgtggggctctcccatcagcacaagctggcgttctggatcaacgtctacaatggctgcatgatgaag

SEQ ID NO: 3419 - DNA, 390 bp, Zea mays
  Probeset Number=SeqID_17822
atgtccgacttactcacggtggcaaagctggcaggcgtttcacgcgccacggccgcgcgcgccttttccgatccccatctgctgcggcgcgacacgctggagagagtgctggcggcgtcggagcagctcggctttcgtcctaaccacatcgcgcgccagctgcgcacgcagcactccaccaccttcggcgtgctgctgccctcgctgcttaacccgatcttctcctgccagttacaggcgatggaacgccaggcgcgcgacgccggctatggcctgctggtggccaccagcgattaccagcccgagcgcgaagccgccatcgttgaacatatgctgcgccagcgcgtggcgggcctggtcctgacggtggccgacgcggataacagcgcg

SEQ ID NO: 3420 - DNA, 278 bp, Zea mays
  Peptide Sequence Number=SeqID_9666
  Probeset Number=SeqID_17823
ctgcagataagctcagagttgatctcatgaatatttctgagtactcttagttgaaaaatactttcccaagacaaggagtactttactgaacttgcgattgatgttgtcttgaggcttaagggtagcacccacttggaatatattgaaattctgaagatacatggagaatctcttaaggattcatttttggacgaagggtacgtatttatagaaaaaataccggtatctgccacattgctgattaagagagcaatgatcgccattcctatgaatacaaa

SEQ ID NO: 3421 - DNA, 1170 bp, Zea mays
  misc_feature (1)..(18): n is a, c, g, or t
  misc_feature (1081)..(1170): n is a, c, g, or t
  Peptide Sequence Number=SeqID_9667
  Probeset Number=SeqID_17824
nnnnnnnnnnnnnnnnnncagcacagccacatcccacatcccgagaggagaagcgagcgcgcgatccagttggtggccgcccccgcccgcacaccatggcgacgccgtggtggtggccgtcgctgctgccggcgtggctgagctccagcgcgctatggttcctcgtcgccaacgcggtcgtcgccgcggtggccgtcctgtccaggcgcccgccgctgccgctgccgtcgccccgccgccgccgccgcagcagcggcgccgccgccgcgctcacgcggagggcctcgtctgcgctgctgcagcgcctccactccttctccatcttcgccgtcccctccgcctgcttcaacaccaccacgccgtttccgcaccccgacgccgtccaagaaacagaaacagaggcggcggccaggacaccggcgacgaccgacccgtcgccgcgcgcgctcccgccgtctcctctctcgtcgctgggccgcgcgccggcggcagacgccgacgaggaggatggcgagcccagcgggatgagcatggacgaggcctacgcgctggcgctggaggcgcgccgccggccggaccgggagagggaggaggtggccaggaggtccgaggtggacgccaagcccgaggagttcatccgcggcttcgaggaccaccaacgccagcagcgcctcaactccatcttcaactacacccagatgctcaagcagcgcgccgccgtcgcccgccgccagcgccagccggatgccccgccagatcagctttgagtcacgtgttcgggtcgttcggcctgagattgggcagcggtttcagggagaccaaaatcagttttgagttgctgtacatagcctgctttcaacagattgtttgtatatagtctccagatatgatttacagataaagtacgacataaagataattcttgatcgtttataactcattggtcagcgtttttcagggagaccaaatcagttttgagttctgtacataggctgctgctttcaacagattgtttgtatagtttaaacacattgtttgcatgttttttttcttcttcttatttcgcatttgcacccatgcnnnnnnnnnnnnnnnnnnnnnnnnnnnnnnnnnnnnnnnnnnnnnnnnnnnnnnnnnnnnnnnnnnnnnnnnnnnnnnnnnnnnnnnnnn

SEQ ID NO: 3422 - DNA, 1020 bp, Zea mays
  misc_feature (29)..(29): n is a, c, g, or t
  misc_feature (50)..(50): n is a, c, g, or t
  Probeset Number=SeqID_17825
ggtcacgccttgcgagtacccggtccggnatatcccggggttccgcggangcatcttcatggagccgccactgcccgttctggtacgcctacggacggccggctcaagtggctggagcgcttcggctacaccaacaccatcgggtatcccttcacctacatcccgctcctcgcctactgcaccatccccgccgtctggctgctcaccggcgagctcatcattcccacgctgaacaaccgtaccagcatctggttcatcgcgctcttcctgtccatcatcgccacgagcgtactggacctgcgggggagcggtgtgagcatctgaggactggtggcacaacgagcagctctgggtcatcggatgcgtgttcgcgcatctcttctacgggttccagagcttgctcaaggtgctggccatgcgtggacaccagcttcaccgtcacctctcaagcggacggctacgaggccgacgccttaggggacctctacctgttcaagtggaccaccctgctggtgcccccctccacgctcatcatcatcaacatggcgggcatcgtggccggcgtgatccgacgccgtcaacaacggctacggctcctggggcccgctcttcggcgagctcttcttctccttctgggtcatcgcccacctctacccgttcctcaaggggttcatgaggaggcagacccgcacgccctccatagtcgtgctgtggtccatcctcctagcatccatcttgtgtcttgtctgggtcaggattgacccgtttataccgaaggccaagggccccatcctctatccatgagcagtcaagagctgagctcgcctacctacgttcttgttgcatgtacggacgccactgtgcgtttggacatacaggcacttttgggccaggctgcatcatgtggaccttttgcttccttttggtctgatttttgtgagttagtgactgagtcagacagagtgccgggtgttgttcctgcaaggaaattcgctcacattaatgttcctttttctcttc

SEQ ID NO: 3423 - DNA, 1079 bp, Zea mays
  misc_feature (1)..(33): n is a, c, g, or t
  misc_feature (682)..(1079): n is a, c, g, or t
  Peptide Sequence Number=SeqID_9668
  Probeset Number=SeqID_17826
nnnnnnnnnnnnnnnnnnnnnnnnnnnnnnnnnttaagcaagaaatcgatccatactatacattacatggtacatacatacacagaaaagaaagaaagaaaaaacagagaggaacaccccatctggttcacgcacgctaaaccaccaacacagacagtagattgctgctacgctcttcttccgccagcaatctacgaggcaaggcgtctgatccgctgcagccgtacgtccctaggagctcacccaccccgcgcaatcgagaactgactcggtcgccggcagcatgcaaatcataggccgagatcaagcacgcccgcatcgccatgcttgccatgctcgccttctacttcgaggccgggcagggcaagacgccgctcgggcgcgctcggcctatgatttgcatgctgccggcgaccgagtcagttctcgattgcgcggggtgggtgagctcctagggacgttcggctgcggcggatcagacgccttgcctcgttgattggaggctaaagaagagcgtagcagcaatctactgtctgtgttggtggtttcttctgggtaacgtgcgtgaaccagatggggtgttcctctctgtttttttttttcttttctgtgtatgtattgtaccatgtaatgtatagtatggatcgatttcattgcattaattaaaaaaaaaaaaaaaaannnnnnnnnnnnnnnnnnnnnnnnnnnnnnnnnnnnnnnnnnnnnnnnnnnnnnnnnnnnnnnnnnnnnnnnnnnnnnnnnnnnnnnnnnnnnnnnnnnnnnnnnnnnnnnnnnnnnnnnnnnnnnnnnnnnnnnnnnnnnnnnnnnnnnnnnnnnnnnnnnnnnnnnnnnnnnnnnnnnnnnnnnnnnnnnnnnnnnnnnnnnnnnnnnnnnnnnnnnnnnnnnnnnnnnnnnnnnnnnnnnnnnnnnnnnnnnnnnnnnnnnnnnnnnnnnnnnnnnnnnnnnnnnnnnnnnnnnnnnnnnnnnnnnnnnnnnnnnnnnnnnnnnnnnnnnnnnnnnnnnnnnnnnnnnnnnnnnnnnnnnnnnnnnnnnnnnnnnnnnnnnnnnnnnnnnnnnnn

SEQ ID NO: 3424 - DNA, 1097 bp, Zea mays
  Probeset Number=SeqID_17827
gatatatatcgcttagtttctttgattcttctttagatcgagcttcttttgtaccacaaggtctaggatggcttgcagctgctaatcgagctgcggctgcatatctggctgtatgggcggtaagaagtaccctgacctggatgatacgagcaccggcgcgcagctccaccggctttctcggtgtggccccggataataacgccgcgcccgagttcgtccaggacgcggcggagtacggtgagggcgccctcggatgcagctgcggtagtgcatgtaatggcgacccctgcgactgctgatctcatcaatcgacgaccttggatatgattattatctatctagcttgtggcggcggccgtacaataagtaagcgatgccgagctggctgccatacataaggattgtgtggcgggtgtgtgagagagagagaaacatagcccttcagtttgctatctctctctgcatgtttggagccaggctttgtgatcatgtacgcgcgcctacatgcatgttgattgatccaattgcatcggctgtgaccatatattcattggaccgcgatgatatgatttgagactatctctatatgctattagcgcgcttatttgcatgtctgttgtagaggacagctttgagtatcttgatgcccccgtcgagaggattgctggagcttgatgtgcccatgcccgtacgctgccacccttgagaggatggctgttccccaggtggatgactttgtccgggcagccaagggtgcttgtttcagggcaccagttccgatggcagcacccccctagtccagcagaaccccgcatgttgcatttctttgtctaattttaatgcccgggccccaaaaaaacgtgtcgcataatggtgtgacgggtaccccctgccgctgcaactcaactatagcatgagctgggtttttgtagagcccccgaaaggtgttcagtaccccagttccagttccgcttattttcccccccccacccggaaggctgcgggtgactctgggtctgttttatggtccccgaatgattgcacccccccctggagatgagaattttccttgtggcgagttgttgtgagtaccttgt

SEQ ID NO: 3425 - DNA, 506 bp, Zea mays
  misc_feature (284)..(284): n is a, c, g, or t
  misc_feature (287)..(287): n is a, c, g, or t
  misc_feature (295)..(295): n is a, c, g, or t
  misc_feature (298)..(298): n is a, c, g, or t
  Peptide Sequence Number=SeqID_9669
  Probeset Number=SeqID_17828
ccgggctgcaggaatgcggcacgagcgagagcgggtttgtaccgcgcgaaccactgctcgatcgccatggccgccgcgctcaggtgcccggcctccgtgagggtctcgggccccgccgcctcggggctcgccaaggtgcgccaagcgtcctgtgtcgtcgcggtgagcggggcccggcagagccgcggcggcggcgtggccgtgccgggcgtcgctgttctcgcccaagcccgcggcggccaaggacgcgcggccgaccccaaggtgcaggagcccctgtacgnttngtacgagnatnctaacgtagtcggtgaccccgcgagtagccccgcctacctgcgcctcagcgccaagcagacggagaacgcgctgggcgacctcgtccccttcaccaacaaggtgtacaacggcagcctggacaagcggctgggcgtcaccgcgggcatctgcgtgctcatccagcacgtccccgaccgcaacggcgaccgctacgaggccatctacag

SEQ ID NO: 3426 - DNA, 1709 bp, Zea mays
  misc_feature (1)..(176): n is a, c, g, or t
  Peptide Sequence Number=SeqID_9670
  Probeset Number=SeqID_17829
nnnnnnnnnnnnnnnnnnnnnnnnnnnnnnnnnnnnnnnnnnnnnnnnnnnnnnnnnnnnnnnnnnnnnnnnnnnnnnnnnnnnnnnnnnnnnnnnnnnnnnnnnnnnnnnnnnnnnnnnnnnnnnnnnnnnnnnnnnnnnnnnnnnnnnnnnnnnnnnnnnnnnnnnnnnnnnnnaaaatgatgcattgcttagacatgctgttgctcctatgaaatctaagttccttaagtattggagggatatacctatgctctatgcatttgcttttatacttgatcctagagccaaactaaggggttttagcaatatcttaagaattttatctggtctatctggtactgactactcactttattttacttgtgtgaaaagtgaattgtttaccatgtttaataaatatgatgttaagtttggtgcagttaggcaacaagtgcctcctcctcctcctatcacaggtaaaaggaaacaaaactggggattgatttatggatctgattctaattctgagttttcatatcctggttctagtactcctaaccttgcagctggaacatcagcatctgctttgcttcaacaagcacactctagtgttggtcttagttcacttgacacagaactgtcctcatatctggacagtgacactttgcagaagtttgatgaggacttcaatatcctaaactggtggcatgaacataagttgtcctatcctattctctctatcttagctagagatattatttctgttcctgtctcaacaatttcctcagaatctgcttttagcctttgtggcaggataattgaggaacgacgacgtcgcctagcaccagaaatggtagagatgctactttgcatgaaagattgggaactaggagaacattttatatttggcaggtatcttctataatttcaattgttgtgcatgtctgaactgaaaaaacatagacatcttccgttttttgtattattgaacatttaagggatcaccacatggacagctctgcggtagcaacggaaataatgaatactacattggaactggagtggatggctgtgtttgagttcgatttttctgcatacatatttttgttgctacttttagctactactaattgagtgataaaattgatgcagcttgcaggttttcagatggaagttgttaaaacactcatgcactgtttgtattatagtttagacggttcatttatattcgttaggaataattatgttatttgctagctcactatttatagctctacaggtgctcaaatgctcatggtcttctcattaggagtgatagagcagaagttgtatcaattccagttggaataattcctgcatggtctgctagaggccaacactctacacaggacgaagaccttgaagaagcatttgaaggactttatcttgatgacccttagggcctagggccctacactttgtaatctcctactattcttcctattcctactctattctggtgatgtaaactgtactcttagacatgaactcctaaacttaggaatggcctacagcaccgcttgttcctactctattctagtgatctggacatctggtgatgtaaactgtactcttagataagatctctttaaatcagagctgggctgtactcttttttcctttctagggttttctcacgaggagtgagtttttacctagaaaggtttttaatgaggcagccattgcac

SEQ ID NO: 3427 - DNA, 927 bp, Zea mays
  misc_feature (1)..(171): n is a, c, g, or t
  misc_feature (893)..(927): n is a, c, g, or t
  Peptide Sequence Number=SeqID_9671
  Probeset Number=SeqID_17830
nnnnnnnnnnnnnnnnnnnnnnnnnnnnnnnnnnnnnnnnnnnnnnnnnnnnnnnnnnnnnnnnnnnnnnnnnnnnnnnnnnnnnnnnnnnnnnnnnnnnnnnnnnnnnnnnnnnnnnnnnnnnnnnnnnnnnnnnnnnnnnnnnnnnnnnnnnnnnnnnnnnnnnnnnnngatacaactcagtgatggagagctggggcctgctattcaactggggccaagatggagggcagggcattgggttccagataagggatgtccgtgtccgtgtgctcggtgagatggcatgggtgaacatgaaggcgaatgttgatgttgaccctttggtgttccatgtgacgaacgtgtacgagctctgtaatgggaggtggtatatggtccatcaccacagctcgctcatggctcaccctgctccgcacaatatgtttggttgaagctggagaaggaaagcaaagaaaacctttgggaagaaaatttgatgtggtatgaatgttttcttgaccggagatagattgtcggatgtatttgagttgaggagagatgagattccccccacccccacccccaccctttttctccgttgtggttctgtttgttaatattgctcctctggagcttcgttccgcagttttgtacaaatatgttttaggtgaatggaaggttatgggccgcagctgacttcgcggaccagggtactataaatactcctaatgtatggaaggcatactatgcggatacaaaagccattattaaccttaatgatgagttctacaatattatcagggaagggtccttaccagcaatgagccgtttttggcttaatgcggactatgtcaagtgtattcatgcggactgggtgagttctgcactggatacaacgtcagtgatggagnnnnnnnnnnnnnnnnnnnnnnnnnnnnnnnnnnn

SEQ ID NO: 3428 - DNA, 649 bp, Zea mays
  Peptide Sequence Number=SeqID_9672
  Probeset Number=SeqID_17831
atggaagacattcatagcagtaagccagagcgtggccttgacttgccatctcttaaagatctagaagacgaagggttccggagacctgctctcctgatcgcagatgcacctctgcggctggtgctgctaccgctgatgttcgatcagggcctcaacgcgaggcatctgactgagaagaagataagcgttgaggtgccgcgggacgaggaagatggctcgttcgcgcccaaagacattgcagctgctttgaagagggtcctagtggatgaagaatgcgaggtgttcggggataaggccaaagagctcgcccagttgtttggaaatgacgagatgaatgatcagtgcgtgcgagattttctcaagtgtatgtcggaatacagcaggcagcgacaggttgcattatagggctggtaacgtcaaattttagatagggccataggggctttttcaaaggtttactacgacagacaacatcaccgagataataaaaaatatataaaaaatactcgtgtgttgcaacaggaacatataaataatataaataatattatgatagtttatatgtgaatgtgttatattgttatgagaaaaaatttgtaatccatttgttattctaagatatacataaattttattattttaatatagc

SEQ ID NO: 3429 - DNA, 339 bp, Zea mays
  misc_feature (74)..(74): n is a, c, g, or t
  Peptide Sequence Number=SeqID_9673
  Probeset Number=SeqID_17832
aggtatcaatgaagataattaaatttcaaggaatggtaatgcatcaattgtttcatcactcaacctctatcacntaatgcaacatataagtgataaaagttttaaaataacaaggaggtggcaaatgcaccggagcttgcctgggataaacactatgttagggttgttagatgatagtatctctcattctggtgctggcttgatgcatccacaagattaatccaccaataccatgtgatggttcactctgatccatgtccttcagctcgcataatcatgtagcataccttctactgaacatttaacaaacgtcggacgggcttcacctcttgaccattg

SEQ ID NO: 3430 - DNA, 617 bp, Zea mays
  misc_feature (601)..(617): n is a, c, g, or t
  Probeset Number=SeqID_17833
cccacgcgtccgcccacgcgtccgcccacgcgtccgcccacgcgtccgcccacgcgtccgcccacgcgtccgggccggcctcgcctcacactcccgcccgcctccggcgattcatccacccaataaagtatccaaccctaacgatccggatcgccttaccccgcgtcatccacgcgaattgattcgattatcctcggattttccccgtttttttgtgggtttcctatcttcttcgatcggagtgctagggtttgggcgcgctcggtgggggggggactccagggtcatcgttagttggacgggctagggtgctttctcaccgggggaagggaagcgaatccaaacgatggagaagaagaaggtggcgatcccgctggtgtgccacggtcactcgcggtcggtggtggttctcttctacagcccggtgacacccagtggttgcttcctcatcaaggtcagccagggcgcgaatctaatgcttgggaatgagggggctggcaactactttggccgctggtcaagacaccctttggcaagggagattggtggccctgtgcctttggtcgcatcaggaaagcttggccgacaactgcacttggtnnnnnnnnnnnnnnnnn

SEQ ID NO: 3431 - DNA, 894 bp, Zea mays
  misc_feature (894)..(894): n is a, c, g, or t
  Peptide Sequence Number=SeqID_9674
  Probeset Number=SeqID_17834
cccactttctcgtgctccggccagcgccgcctcgcccagccacctccgcggctccgctcctctgcctcggcctcgcgccctctcccagcagcttcctcctgctcgcccctcgccgtctccgggcgaccgggcctgcaggcgccggcgcctcgccgcggcgccgcccggagcggcggggcgtgggccggctcccctcagcggcactttggcacggcacttccgcagggcccaggtcccagcgacagccgacaggctcacaggcaacaccccttcaggcctcaggagctgtctcaagcctacagccgttccgcctcgctcttgtatctgacggtctgaccctaccctatctctgaggaggtcgaatctggcctgcccttctctctctttctcctacgatcctttctctcagtccaacgaaaccctcggaggcacggttcggttcgacgacatgctgtctggcgtgaagctgggtccgcgagaccagatccagtctgattttttttgtaggggtgaccagggctccgattccgactcctccgacggcaagaggccgtggaagcacagtaaaagagggcgggacaagaaagagaagaagagacgaagcagccggcggcagcggaggcggagcaagaggtactcgtcggaagattctttggggtcagacaccgacgattcaatcggagaggaagaggaggatgatgtcagtcggagcaagcgtcgcgggaaggacaggaggcggcgacgcaacttctctgacgacgatgattccgaatccggcgaatctgaccggggaagagcctctcgcagggggaagcagagacgtgatgacgaggatgaggaggaagagactgaaggtgatgggcttagggcaagtgaggtggtcaggagggagan

SEQ ID NO: 3432 - DNA, 1129 bp, Zea mays
  misc_feature (1)..(520): n is a, c, g, or t
  misc_feature (1125)..(1129): n is a, c, g, or t
  Probeset Number=SeqID_17835
nnnnnnnnnnnnnnnnnnnnnnnnnnnnnnnnnnnnnnnnnnnnnnnnnnnnnnnnnnnnnnnnnnnnnnnnnnnnnnnnnnnnnnnnnnnnnnnnnnnnnnnnnnnnnnnnnnnnnnnnnnnnnnnnnnnnnnnnnnnnnnnnnnnnnnnnnnnnnnnnnnnnnnnnnnnnnnnnnnnnnnnnnnnnnnnnnnnnnnnnnnnnnnnnnnnnnnnnnnnnnnnnnnnnnnnnnnnnnnnnnnnnnnnnnnnnnnnnnnnnnnnnnnnnnnnnnnnnnnnnnnnnnnnnnnnnnnnnnnnnnnnnnnnnnnnnnnnnnnnnnnnnnnnnnnnnnnnnnnnnnnnnnnnnnnnnnnnnnnnnnnnnnnnnnnnnnnnnnnnnnnnnnnnnnnnnnnnnnnnnnnnnnnnnnnnnnnnnnnnnnnnnnnnnnnnnnnnnnnnnnnnnnnnnnnnnnnnnnnnnnnnnnnnnnnnnnnnnnnnnnnnnnnnnnnnnnnnnnnnnnnnnnnnnnnnnnnnnnnnngtgccgcgcccctactctgctctctgttcggccatggccgccgtgccaaggcctccttccccgcgcgcagcttttcctctgctcctcccggctcctagcgctctcgtcctgtctccctcgcgcgcgcccggggtcctgctctcttgtttgccgcgcgcagccggcgtttctccctgacgcgctcgcccagccactgcggcaagctacctgctcgagttggccaattgtaacatatgctggtaccctcggctcgggttaaaagcatatacggaatcgaaagcaggacaaaaacgaaggattgaaccagtgtaaaaggtgcgcgcgtgaaagcttcggctcagtaacggaaagaggaaccgccttaaggaggaaaaggctatctagtcctcgacagtttgttcttaagtcaatagtgaatatgaggggcatgaatgtaattttacacaggctgcgtcctgtgcctataaatagatgaccagtacccccgtactgttcacattgacttgtattcacttgtgcgtcacgcttgtacttttgccttctatcaagccgaaggtacatttataattcagtattgtttctgtccctctatgataatataacgnnnnn

SEQ ID NO: 3433 - DNA, 1011 bp, Zea mays
  Peptide Sequence Number=SeqID_9675
  Probeset Number=SeqID_17836
ggaaaaaaaaaaaaaaaaaagaattctctatttatcttgtcttgccattcctaaccatttcattagctctgctagcttttaactggtatccttcaattgtttttgttggtgatacctacacctattttgctggaatggctttggctgtgataggaattttgggacatttcagcgagacgttgttgctcttctttttacctcaagttcttaatttcctgtgttcggtcccacagctctttcactttgttccttgcccaagacataggttgccgaggtttgatcctggagcgggtctgttgactggtaccaaagatgggaatctggttaacatattccttaggttatttggaaagtgctcagagagggccctttgcataaggctccttattttccaggctctatgttgcgtattctgcttctggctaaggtacatgctcaccggatggtacaagtgataacctgcaatcggctctccatcctgacacccagctcgttgggaaaaaaaatcagctgcatctgatggctgttgttttcctcgacatacttgtagactaaccagagtaggtttttggattcatttcctatgtatacttgtgctaactacagtttccaagtctttgtaaccatatatatgcaatgcctttggcttcaaggaagtcttcggtatacttgtgtaccaagagcctgtttcttgtctgaccgaagctggtactctggagaacatattccttaggttatttgcgaagtgctcggagaaggccctttgcataaggtttcttatttttcaggctctatgacgcgcatcctgcttttggctaagatacatgctcaccggatggtacaaatgatcacctgctaaaggctctccatcttgtcccccagctcttgggaaaacccgcctgccactgacggctattggtccctcgacatactttatcaggaacatgcgatctccagaggagcaactggaaggctgacagagcagaaaggtgagccgaaggagtaatctga

SEQ ID NO: 3434 - DNA, 575 bp, Zea mays
  Peptide Sequence Number=SeqID_9676
  Probeset Number=SeqID_17837
acaacccggtggacagcctgtcgtacgacgtagaggcgccgccgccctctgtcgtcggtttcgccgcggggcaagcgccaccgccggcgtggccagctccggcgccggcaccggcaacccacgcgcccgtgacgcgggaaggcggcgcggcgtcggtgctggagctgcacaaggtgacgctgccggagcggcggacgacggcaaaggcgctgcggcagcgcctggccgaggtgttcttcccggacgacccgctgcaccagttcaagaaccagtcgtcggcgcggcgcctcgtgctggcgctgcactacttcttgcccatgttgcagtgggggtccgcctacagcccgcgcctactgcgctcagacctcggtgacgggctgaccattgccagcctggccataccaaaggcacgtgcgcgcgtgtgccccgagcccgtctctcctactctggttcctatcgccttcattcaattcctggctacttttggcacggttttttatggcacggcccagaatataggcaggcaggcaggccggccatcggccagctgtcgttgttcggcgcgcaataactga

SEQ ID NO: 3435 - DNA, 774 bp, Zea mays
  misc_feature (1)..(12): n is a, c, g, or t
  misc_feature (708)..(774): n is a, c, g, or t
  Peptide Sequence Number=SeqID_9677
  Probeset Number=SeqID_17838
nnnnnnnnnnnncagcaatccgacctgagaccaagaccgcgcgccacgcggctcgccgccggtggcgaacgccgacgccgaccaagcgccgctgctctctgtggaacacctccgtccaggatcctgcagccgcgagctcgagctgcgggagttccgcgaccgctacgtgatccgttcgctcgacggcgccgccgctttcgccgtccttcgctccggcggctccatccgccctctctccccagaggaagccgtagctgagagcgactgcaaggtttccagaatataccgcgtggtcggcaccataagattgctcgctggtgagtcacctaatttcacgaattgcgaactacttcgtatcctttttttttttgcctgcattagtgttctgctctgatgtaagataattaaatgtctcttttgcgacgcattaagtgccatgtgatcctacttactaaccatgaccatgtttagagtatttacactggctagacgagtaatcagtataataactaataaggtaaggttacaaagtaaaactgtaaaaaacttgaaatggtaagtttgatcattcacacattttcctcgaacaagcaacagaacttgcaatggtgtctatcaactcggccttgcaattattctgataattatggtcaaatgttggtaaggccttttagtttctgtcaaacttcacaacttggtttcgtcccnnnnnnnnnnnnnnnnnnnnnnnnnnnnnnnnnnnnnnnnnnnnnnnnnnnnnnnnnnnnnnnnnnn

SEQ ID NO: 3436 - DNA, 1206 bp, Zea mays
  misc_feature (1)..(293): n is a, c, g, or t
  misc_feature (894)..(1206): n is a, c, g, or t
  Peptide Sequence Number=SeqID_9678
  Probeset Number=SeqID_17839
nnnnnnnnnnnnnnnnnnnnnnnnnnnnnnnnnnnnnnnnnnnnnnnnnnnnnnnnnnnnnnnnnnnnnnnnnnnnnnnnnnnnnnnnnnnnnnnnnnnnnnnnnnnnnnnnnnnnnnnnnnnnnnnnnnnnnnnnnnnnnnnnnnnnnnnnnnnnnnnnnnnnnnnnnnnnnnnnnnnnnnnnnnnnnnnnnnnnnnnnnnnnnnnnnnnnnnnnnnnnnnnnnnnnnnnnnnnnnnnnnnnnnnnnnnnnnnnnnnnnnnnnnnnnnnnnnnnnnnnnnnnnnnnnnnnnnaaagcgtctttcactttcttaatcagtgattttacctgtgcgatgcactgatatagaaataaagtagtttttcttcttgcgaaaatttccagaacatagaatatctacaatgagccttttctatttgttctcttcacattcaggtcacaaatgatatattcacaaaagaagatggagaattcttaattaaacatggagcgctccctgaagaacgtatacgtgcagtggaaactggaggctgccctcatgcggttattcgtcagacatcagcatgcatcttggtggtttggaaaaatttcaccaatccagccttaaagagtgccctttgtgccttttccatgcagataacttggcagctaacttcaccagagaattagccggctccataattttccttatcgatgtctttggggggggcaagataccaaaaaaaggtggccctgggataaccccggccgatctgttggtaataaacaagacagacctagcccctgctgttggagctgatctgtctgtaatggagcgaaacgccctttgcatgcgcgaaggagggccctttgtgtttgcccaggtgaaacatggagtgggcgtggaggggatnnnnnnnnnnnnnnnnnnnnnnnnnnnnnnnnnnnnnnnnnnnnnnnnnnnnnnnnnnnnnnnnnnnnnnnnnnnnnnnnnnnnnnnnnnnnnnnnnnnnnnnnnnnnnnnnnnnnnnnnnnnnnnnnnnnnnnnnnnnnnnnnnnnnnnnnnnnnnnnnnnnnnnnnnnnnnnnnnnnnnnnnnnnnnnnnnnnnnnnnnnnnnnnnnnnnnnnnnnnnnnnnnnnnnnnnnnnnnnnnnnnnnnnnnnnnnnnnnnnnnnnnnnnnnnnnnnnnnnnnnnnnnnnnnnnnnnnnnnnnnnnnnnnnnnnnn

SEQ ID NO: 3437 - DNA, 571 bp, Zea mays
  Peptide Sequence Number=SeqID_9679
  Probeset Number=SeqID_17840
tcgttctaatcacaaccttgcattcttttctggcgcggccccaagtatttggtcggtgcccttttggccgcccgtttcccccggggccgaggagccgccaatagcaaggagagggtttccttctccctccacggttccaccgagctccccgatcccttcgtcccaaatcccacacacccggttcccccccggccgcccacgcgtcccgccatggattgtggatctgtggatctccaagggtcagggagggccagcaccgggccgagcacgagcttcaagtcccttctgcgaattcgggaaggagatcctcatcgaaaaagagtctaacgttcaaccggtgaatagccctgtgacggtttgcggtgacatccatgggcagtaccatgacctgatgaaactcttcgcgactgtgggccacgttccatatactaactatattttcatgggtgattttgtggaccgtggcttcaacagtctggaggttttcaccatcctgttagcttttaaaccctttttaaaaaataatcgaaagaggtattaaaatttttctatccttttttgggatcctcat

SEQ ID NO: 3438 - DNA, 786 bp, Zea mays
  misc_feature (43)..(43): n is a, c, g, or t
  misc_feature (114)..(114): n is a, c, g, or t
  misc_feature (142)..(142): n is a, c, g, or t
  misc_feature (146)..(147): n is a, c, g, or t
  misc_feature (149)..(149): n is a, c, g, or t
  Peptide Sequence Number=SeqID_9680
  Probeset Number=SeqID_17841
acctgaaagagcaaagtcattgacaatatcaacttcccggggnactttctggagctggtgcctgaagtaagggagctggttaatgatttttatgcaagtcgctatggatcttgncttgggtcatcttgagaagcttaaaaancccnnancctctctgatatccatgtgcatcagcatgtagagactctgtataggagattcgccacaaagcgatcattcagtacgctcttccttttatatctgttgacctcacacgcgatggcaggcgcctttaagacttcggtgtccatgtgcagaaggagctggtcgcttctgattactgaggcccaaatccaggaggggataggctcccccaccaatatcctttgcgcaaggcgtgctcaacagatcaaatgaacctttgccagcgtgtccttcagatccggcatatgccttttgagatagtatgtcatagtcgcatgcttaatgtagtgacatgacctacctctaggcatgccttacattccagaagccaatgcggtgccaaggatagatgtaaagtttgcgggcgtctgctgctaggcaaggctgtcctgctgcatgcctcgccacttttttttttggaggaattgttcttgtgacataaaaggggccgtagtctgtcttaaatgccctccccctctgtctttttattggttgatgaaagttattgtcgaaagtaatgtacggttgagcatcgtggatgtgatcaaaaaaaaaaaaaaaaaggcggccccgccgattagtaaccccttagccccggaattt

SEQ ID NO: 3439 - DNA, 284 bp, Zea mays
  Peptide Sequence Number=SeqID_9681
  Probeset Number=SeqID_17842
catcctcttgtccagaaggacatgcacgtgggcagcagaggtttggccgggagaatgtgcatgaattttctcagcagagacatgaggatagtggtggtcatgctttgttgctgaaattttatattggccttcgagggacaaagcttggatgtggtgaaggtggttgtggagcttgcactgtcatggtctcttgctatgaccgaattacaaagaaatcactgcattttgcaatcaatgcatgcttggctccactttattccgtggaaggaatgcatataccacag

SEQ ID NO: 3440 - DNA, 1166 bp, Zea mays
  misc_feature (888)..(888): n is a, c, g, or t
  misc_feature (1110)..(1110): n is a, c, g, or t
  Peptide Sequence Number=SeqID_9682
  Probeset Number=SeqID_17843
attgggacctccacccggccgcggggggttcaaaaaaacaaattagatagagctcgccgagcaagcaagcaagccaactcggccgtccgaacgaaagcgaaccgcggccaaactcactcgctagacgctcccgttctcctccgcctgcccccaccggctccccttgtacacgagcgccggagacgccatggcggcggcgcagccgaagccggccaagaggctgggcggcatggcggaggcgctcgccatcgccgccgacctcggattccccgcctctaccacgcaggaagatcggactagctccgacaagagcgatgatttggtgaaggttttgagggaactgactgtcgtgcagaggaacattgccaacttgcaagtggagctacagggaagaaaggatgataaaaacattgctcatttgactcatgtgagtgagatggaaaagaagtgcgagtctttggccagaatgactgcaattttgaaagatgtaattcagaacaaggatcgtattattgctcggctgcaacagccttattcccttgactgcataccagttgaagctgaataccagaaacaattctcggagctacttctgaaagcagcaagtgactatggggcattgacagcatcagtcggcgatttccagtggagccaaaactttagggaatcaccagctgtctgggggggaaaaggcggcgaccgattcccggctggcacttgcttccggcacccggttcttcgagggccatgtccgcgaggagggaatccttttctcctctccagaaactccgcgttggccgttcctctcggccaataacccccagtgcctccagcgccgattcaaaggtcgggccccccccccagtggagaggcggctcgaaccccaanagctggaagcaaatggaggccaccaccctggagagcagtggaattgaccccatgaaccagaggaggtggtcttggccctccatcaagcggcccccgtaggtcgcaggtcccccattggatttaggttcccatgttacatacataggattcccccttgtgtagttggcaacgattctctgtgtttttaagccgatcacctgcacccatttggcacgctcgacntgtgagaaagggtcaataggcccccccccccgaaaaaaaaaaaaaaaaaagcggcc

SEQ ID NO: 3441 - DNA, 2451 bp, Zea mays
  misc_feature (1)..(6): n is a, c, g, or t
  misc_feature (2429)..(2451): n is a, c, g, or t
  Peptide Sequence Number=SeqID_9683
  Probeset Number=SeqID_17844
nnnnnngtacaggacacctgtgtgcagcagggacacagccaccgccctcattctctatcttcttcctgggagtgcacgcatccctcccatggtggttcatccctccccatttttccccagccgacctttcccatagacgccgcagcacctgtttcctgcacgctggtcgcccctgcccctagccatggtcccgtcaggccgcccgtctcctacctccccacgccatatcttcctcacgacaccttccctccatctctctcttcccagccatggacgcccctcgctgtgagctcgctccagccctctccctcgccgagtccctctatgctctcgtctcgcccaggtctgcaccagcagctcgcccagcaccgcgcgccgtcgtcccctgcttggcgtccggcctcagtagctcgccctccccgcccagcagcaagcagctcctttcccctcgccatgaacgtcgtcgatcccctgctgcagttcctccacgtggtctggtcgtcgaccgcgcgcgtcacctgctcgtggttatgggaaaccagcgagcctctcctcacgacgtagtttcctcgcgtcatcgttccgcccgtggaggtacgataattgattacgtaatgtggaggacaaaggatgaattaatctcaaggtgacgctgatgaataaacctgaagaatggatgatctgatgaagtactaggatgggagatgctcatcaagtggtcgtcatttaacaacactaacgtagtgttatcccaggcaagccccggtgcatttgccaccttccttgtgtttacaaaatttttatcacttatatgttgcattaggttataggagttgattgattaaacccttgatgcattaccatccttgaaaggttgattaccacaccttgtcacctgttttataaaagctagagatgcttagtcatgctgatagactaagaaaaatgttttttatctatgactcatgtttttacaaaaaagaaaataggcttgggataatgaaggcatcaagacgttgataaattcattatccaagtatggccccctctatcaggcgccaaagtttttgaaatagtttaaaatgggaccaaacgctgagcaggaaaggtcgcccgtctgtgtcgattaacagaccgtaccgattgttggcctgatgatctaggaccttttatctggccacatacctcgtcatgggtaagcctgaaccctgctaatccatacatgaaaagaaaatcgcgcacctgggagtggagagatggcgagaggggcacgtaccctcctggcaaaggaccgcctaaaaggggtggtgtgctctcgggtggcgcggacctgttcatgtggtggaggatccatgggaatggtagacatgtgcaaaagagttaaggcaagcatatgtgcccgtgattgatagatccccagctaggtattaatcgattcggattaccgttacttcacgggtatgaagactagatcttcgacctgcagcatagttaacaaagtataacaatgttttgattaaaagcaacctagtgtaagtcaagtgaatgatctagattaggcaaatgctagattcaggctagaagattcaggtaataaactaacttttgaaataaaacttggcttaaggacccacttctagtaagcttttctgcaaaatgagtccttgaactttgatgagctttaccttgaatccctttaagtcagcatatccttgagagtcttttctttagtcgggtaagtcttgctgagtaattgcatactcagggttttattccctattgtttttcaggttatagttttgttctttcatggatggtgctaagtgccggtgggctcgaccttctatataagtatatcccgtctttatcttctggatgaggattatcactcaagctagcatgtatttcaaacttatgaaaattttacatcattcaaaatgtaatccttctaattcacttttgtaaccactccgatcatgtacaatgtaaacttgttgtaaactgataaaattttgtaataaaaaaattccgctgtaaattatggtgtgtgttttgtgtttacttaatcttgtgatccgggttataagtggtttatccggggtcgttgggacactcggacatatcctgttaatttatctggtgcacatgcatagccgtttgaggtctttgggacaagggcaggtgcatgtgggcccaataacttgggaggttctgccacaaaaaattagctttagggaataatccactgttagaagagagttgtagttcaaaacaccccctctgccctaaaacttaatatttttgtacagagtgaacccttaacattgtaagcctcaatttttagactaagagttatacaccagtgagaaactactgtaagttttacaaaatttttggaaatttataaagctatgttgtagttcaaaccnnnnnnnnnnnnnnnnnnnnnnn

SEQ ID NO: 3442 - DNA, 521 bp, Zea mays
  misc_feature (47)..(47): n is a, c, g, or t
  Probeset Number=SeqID_17845
ccccccccccccccccccccaaaaaaaaaaaaaaagagaaggggggncgcaaaaaaaaaaaaggggggggggggggccgcccccccccaccaaaagggagggggggggggggccccaccccctccctttgggggggggggggccgccccccctcggggggggaaaagagggggcccccccccctccaccgggggggctccttttttgaaggaaggcttttccctcacggccgggctcttgcgggatctccacccatatggtcctggcgcgcgccgccgcccctcctcggcgtcaaccgccaccctgtagcggttccgccgtacctcgacccgctcgctcggacgcagcgacatgggtggctaagcaccgctctttctctacccctcggtctcgctcgctgaaacagcggcggcgggaaggaggcaaaaccctagccgggcgtcgaggcttggggagccaaggggagggggcggcggccgcgtgcggccacgcgtccgcccacgcgtccgcccacgcgtccg

SEQ ID NO: 3443 - DNA, 634 bp, Zea mays
  misc_feature (601)..(634): n is a, c, g, or t
  Peptide Sequence Number=SeqID_9684
  Probeset Number=SeqID_17846
gcgtcccccaccaagggtgagtttgacgcccccatgaccaaggcccaggaaaccggcaaactggtggtcatcgacttccctcccccctggtgcggtccatgccgcgccattgcccccctgtttgttgaacccccccaaaagttccctcaggttgttttccttaaggtggacgtggcccaaatgaaggaagtccccccggccttcgaggtcgaggggatgccgcccttcccctttgtcaaaaacggcaaaacggttccgccccttgtgggtgccagaaaggaagagctcctggcccagatcgaaaagcatgttgcgcctgcgcctgggtttgggtttgcctaaaggagatcagatcagttgtccccgtcaataagggccagcacgtatggctgtaaatgttgtcgttatcagttctggctttgtcgtttgtgggcgattgtgaactagtagtatgtttgtttctatccgagccggaggcgatacttaaccatggatacttgttgtgagttcgtttctgttcgcgtgtgactcttgaattgaatcagccagctcaccactgcaccaggccgtggtgagtggtgacagtgatttcctgttagcnnnnnnnnnnnnnnnnnnnnnnnnnnnnnnnnnn

SEQ ID NO: 3444 - DNA, 626 bp, Zea mays
  misc_feature (601)..(626): n is a, c, g, or t
  Peptide Sequence Number=SeqID_9685
  Probeset Number=SeqID_17847
cccggctcggggttgtgcaaaggccactggccgcgaaagcagggccatcttctaggggcacagcattggcatggcctgggcttcggcacggggacggcacagatggagtcatggacgggtccagcgtggatgcgcgcgctaccaccttgcgtgctggtggcacggatggaggccaaatatatgtgttgaatgacacgatcagaaagaaggggcgaccggggctgcagccccggcagccccctcctagatccgcccctgatgctcatgacatggtgcttatcttcaatgccctgatggaaggaatggccttgttcttgaaatgcatctggttgaaacctggagttccaactgaaaatatactctatcttggaggaccaaacatcgcctcggaaatttataacaaagaatatgcaaacgctcgaatctgtggatccaacaagtggaggaagcctcttgctaagtttttgaggcagccacatttcattgtctgggacaacagtgatcttgtcacccatgaggtgatgggtggcctgaagaatgtctatgcaatcggtgctggtaatactaacttctgcacaaataggatagtttcttctacttnnnnnnnnnnnnnnnnnnnnnnnnnn

SEQ ID NO: 3445 - DNA, 1165 bp, Zea mays
  misc_feature (1)..(191): n is a, c, g, or t
  misc_feature (1165)..(1165): n is a, c, g, or t
  Peptide Sequence Number=SeqID_9686
  Probeset Number=SeqID_17848
nnnnnnnnnnnnnnnnnnnnnnnnnnnnnnnnnnnnnnnnnnnnnnnnnnnnnnnnnnnnnnnnnnnnnnnnnnnnnnnnnnnnnnnnnnnnnnnnnnnnnnnnnnnnnnnnnnnnnnnnnnnnnnnnnnnnnnnnnnnnnnnnnnnnnnnnnnnnnnnnnnnnnnnnnnnnnnnnnnnnnnnnnnnnnnncgcgcccactgtagacatcggcaacaacaggttctacggtgacatccctcgctggatcgggaccttcgttccggcgctgaagatccttaggctcagctcgaacaacttcagcggccaaatccctccagagctatcgcagctctcgtagctccagctgctggacctagcccacaacggactgacggggctgatcccgagagagctgggagacctggcttccatgaagcaccccaagatcaactccaacacaggatcgctggacgggtccatctaccaggatcggatcgacatcatctggaaggggcaggagctcacgttccagaggatactcgagctgatgacgggcatcgatctggaaggggcaggagctcacgttctagaggatactcgagctgatgaggattccggctctcatcaagtgactcctccccctcacgatgactttgcggatagatgtctcaatactagtgggggagctacgaataacaatccggtgttctgatcgagagcgatggagctaatgtttgaacttgtgtgtttgaacttgtgaactaaaaatgtgaactatggatgtgaacttatatgaatttgtgaacttatgtatttggacttatgtatttgaacttatgtatttggacttgtgtgaatttgtgatatgaatatatatccatgtgtttgaaatcaaaaaaaaaaaaaaaaaaaaaaaaaaaaaaaaaaaaaaaaaaaaaaaaaaaaaaaaaaaaaaaaagaaaaaaaaataaaaaaaaccaaaaatacaaaaaaaaaacaataataaaataatacacccttaaataaaatcaacctaacttcaattttaaagcaccgaactttttagaaaaacccttagctgtaaaaaacttaaagttactgaacttaattcccttttacacaattggggttttaccagaatggggccataccgaaaagccttcccaaaatcgcccttaccaaan

SEQ ID NO: 3446 - DNA, 1608 bp, Zea mays
  Peptide Sequence Number=SeqID_9687
  Probeset Number=SeqID_17849
cggacgcgtgggcggacgcgtgggtctggcttctatgggctaccgggttaggcagcgatcgcaaatgagccagatgaatcctggtgtatgcgagaagatgtcagaggccaagatccgcgaagagttccctgatgaagttaccaagcacgaagcagacccttaccaccatcggtatccgcgcgcagagtcgtatcacgaccttgccgtacgcatggaacccatcattctagaacttgagcgtgaagagaatgaccttctcatcatcgctcatgagtctgtccttcgtgtactttacgggtacctgatggcatgtaatgcggccgacatacccaagctcgagtttcctcgcgatgagatcattgagatcataccctcatcctacaacaacgtggcaaaacgcatcaagattcctgatttacctgaatcgatggttcccggaagccccgaagatatcaagatccccgttcccccaagtggcgctgtaagtccactatctggcatgggtactcctcaagccggttccggcactgcgacacctcaacatggcatccaacctctgaatctgaagtcgcatattaatccctcttcctgagcaggtgcggtatcgatgccggtacggtgctacattcgacaatgagcgagcaagccaacaaacggactttgacccgatttgaggtttgaggaaccagtatctcaacatcgtgggatgtcaaaggcagcaaatgggcttgtggacaagaggtcaggtttttggcatggatacatcaatagggcacttgtctgggcgttggggtgcggcgtgttgataaccatctttatcctacactatagcttcttggcctgtcattcgatatccatatgaacacgaacctgcaaacctgaaaaaaaaaaaaaaaaaaaaaaaaaaaaaaaaaaaaaaaaaaaaaaaaaaaaaaaaaaaaaaaaaaaaaaaaaaaaaaaaaaaaaaaaaaaaaaaaaaaaaaaaaaaaaggggggggccgtttaaaagaaccaaagttaactaacgggggatggaaaggaaaaagttttttaaaggggcaacaaaaataaaataaaggggcggggtttaaaaaaggggggaagggaaaaaaccggggggtaacaaaaataaatggcttggaaaaaaatccccttttggcaaggggggaaaaaaaaaaaaaggcccgaacgaatggcctttcaaaaaatttgcccaccctaaagggcaaagggaaccccccctgaaggggcaaataaagcgggggggggggggggtttcccccaaggggaaccgtaaaatttgcaaggcccaaagcgccggctcttttggttttttccctttcttttcgggcaaggttcgcgggtttccccggaaaagtttaaatagggggcctcccttaagggccccaataaaggggttaaggggccctgacccaaaaaaaattgattagggggagggtacaggaaggggcacatccccctgaaaaaaaggttttcccctttgacgggggagcccaggttttaaataggggggaccctttttgttccaaaacatggggaaaaaaacccccaccccttttggggggggaatttttttggtaattaaaa

SEQ ID NO: 3447 - DNA, 948 bp, Zea mays
  Peptide Sequence Number=SeqID_9688
  Probeset Number=SeqID_17850
ccggggcagcaccacccggccctcgcgacaccgccgtcaagatgaagctcaacatctcgtaccccaacaacggcacccagaagctgattgagattgaagatgagcgcaagctccgcgtcttcgtcgaccgccgtatgggccaggaggtccctggtgacagcgtcggcgacgagttcaagggctacatcttcaggatcaccggcggaaacgacaagcagggcttcccgatgaagcagggtgtcatgcaccccacccgtgtgcgcctcctcctcggtgagggccactcctgctaccgcccccgtcgcgacggcgagcgcaagaggaagagtgtccgcggttgcattgtcgctctggacctctccgtcctcgcccttagcatcgtcaagaagggcgatgctgagatccccggtgtcaccgacgttgttcaccccaagcgcctcggtcccaagcgtgccaccaagctccgccgcttcttcggtctcagcaaggaagatgatgttcgcaagttcgtcatccgccgcgaggtccagcccaagaaggagggcgccaagccatacaccaaggcccccaagatccagcgcctggtcactcctcagcgtctccagcacaagcgtcaccgtgtcgcactcaagcgccgccgcgcagaggcctccaaggatgccgccaacgagtacgcccagatcctccacaagcgcatcaacgaggccaagtctgcccacgatgaggccaagaagaggagggcttcttccatgaagcactaggtgctggttatgagtgcatgagtactgggatgatatcggcgtcggctcaaaaacgaggtatggggttctcatataaatgaaagcttcggatttctaggcatgggcattacatacccagactgcatactttagcagtcggtttccaattaaacaatcgtatcatcctcaaaaaaaaaaaaaaaaaagc

SEQ ID NO: 3448 - DNA, 700 bp, Zea mays
  misc_feature (601)..(700): n is a, c, g, or t
  Peptide Sequence Number=SeqID_9689
  Probeset Number=SeqID_17851
cggccggggcgccagggctccctactcctccctgcaaatcctgcagacaccaccgctcgtttttctctccgggacaggagaaaaggggagagagaggtgaggcgcggtgtccgcccgatctgctctgccccgacgcagctgttacgacctcctcagtctcagtcaggagcaagatgggtgccggcggcaggatgaccgagaaggagcgggagaagcaggagcagctcgcccgagctaccggtggcgccgagatgcagcggtcgccggtggagaagcctccgttcactctgggtcagatcaagaaggccatcccgccacactgcttcgagcgctcggtgctcaagtccttctcggacgtggtccactacctggtgatcgccgtggagctcctctacttcgcgctggccatcataccggtgctcccaagcccgcttcgctactgccgctggccgctgtactggatcgcgcaggggtagcgtgtgcaccgacgtgtgggtcatcgcgcacgagtgcggccaccacaccgtcttggactactcgctgctgtactacgtgaacctgctgtggctgcatctcggcgttcatggtgccctacttatcnnnnnnnnnnnnnnnnnnnnnnnnnnnnnnnnnnnnnnnnnnnnnnnnnnnnnnnnnnnnnnnnnnnnnnnnnnnnnnnnnnnnnnnnnnnnnnnnnnnn

SEQ ID NO: 3449 - DNA, 917 bp, Zea mays
  Peptide Sequence Number=SeqID_9690
  Probeset Number=SeqID_17852
cattgggtacctcgaggccggccgggactccgagcggcgccgggaataccaccccacacacagattgcaccggaagaccaaaaacagtcttctgaacaaccgcaatcatgggtatctcacgagactctcgccacaagcgttccgcatccggtgcgaagcgcgcatactaccgcaagaagagggctttcgagaagggtcgccagcctgccaatacccgtattggcactaagcgtatccatcttgtccgcacccgtggcggcaaccgcaagttccgtgctctccgtctcgagtctggcaacttctcctggggctctgagggcatcgccaagaagacccgtgtcatcggtgtcgtctaccacccctccaacaacgagctcgtccgtaccaacaccctgacccgctccgctatcgtccagatcgatgccgctcccttcaggcaatggtacgaggcccactacggctcctcgctcggccgcaggaggcaggccaaggccggtgagaaggaggaggacaagaagaagtccaactcggtcaccaagaagcaggccgagcgcctcaagaccagtggaaagattgagaatgctgttgagaagcagttcgaggccggtcgtctgtacgccgctgtctcttcccgtcccggccagagcggtcgctgcgacggttacgtcctcgagggtgaggagcttgctttctaccagcgtctcctcaggaagtaaaggtgatatttggggcttcttcggtgcatcggtcaggtcaaaatgggtgtttagtcatgtatctggtctgcatagtcgcgggacactgaatgcactcggcatgataacgccacttctctagataccacgagactatgaatcatggttttcaatgttcatgtgaagcgagtttttactctgcaaaaaaaaaaaaaaaaaagc

SEQ ID NO: 3450 - DNA, 749 bp, Zea mays
  Peptide Sequence Number=SeqID_9702
  Probeset Number=SeqID_17853
ctactggcatgttccctctacctatggtgcagagagagagacaattatgaaatcgaatgaaaacttgggagggtgaaaactgtcctgaggcatacaaaacaggatgcaaaggtgaccatgaagctcaattaacgccagcagaggatgatattgactgcaagcatccttatgcccacaagggggaaggatgaattcactaaagcagaactggctatcaatgaggaccctgacacaaagaaaagcatgtgcacttatggatagattgcgggctctacgtaccatgatcattgcgtgaatgacgcattggaacaccgcttgagcaaagatgccaagagacgaaggacttctatcagcaggaccttgaggtgtcacatgggcgcaaacacattggagtgagaactttatggtttcatccgaaaacataccttatagagtggtcaaatggggaactttatgttgggacatatacaacttaccgataggaggaatgcttccctgtgtgcccaaagcattgataaacccagcaggtaatgatctagcacaagagggactactcctgtggctagaagaacaccttaggcgtttacagagtggcatgatcaagacccgtatgctgatggcatccagatatatcagcttatatccagaagcacctccatcatgcagttcagctgttacaaatggcattaagaacatcctgggaggcctggggaaaaattatgttcacttactcaattcgcatgtcagtt

SEQ ID NO: 3451 - DNA, 339 bp, Zea mays
  Peptide Sequence Number=SeqID_9703
  Probeset Number=SeqID_17854
cagaaactgatggagcgaaatgcagaattgcagaagacgcaggaacacatgatggagatgcagcataaccaggtcccggtattggtcagcaatccatatgcacaaaagaagcgatgcctgccgagaacattgacaggtccctggtcactgagttggtgttgatcggactcgacacgatatttaacattatgggacttgtacattcttcaggatttggagaacccagatttctgttgtatattaccgatcaacagagtcctatgtaccagtgcataactttcttctcctgacactatgcctcctcgattcattctctgcaagtctggcagatgtattgca

SEQ ID NO: 3452 - DNA, 842 bp, Zea mays
  misc_feature (842)..(842): n is a, c, g, or t
  Peptide Sequence Number=SeqID_9704
  Probeset Number=SeqID_17855
cataccataggattatgtgattatggctaggtcgtcttttgttgcgattctttttgaacatgtcttttgtgaatttggttcttgtttttccttcgcataccctctttagaatataaacatatttgtatttgttccacaacctgggcttatgtgattttgacttggtcatctattgatgtggttcttccttaacagggctttctgttgtgaatatgtttctgtgttttgcatacccctcaactataaacatatatgagtaggtacacactaaaatgaagacaacatgcatgcagcaacctattcactgaagtttcatctgtactactcggattcggctcgaggtgtcttctttcaggaatatgtgaagggcatatcgtcgacagggatgcaatctaattgtggttttgaagggcaaatcaatgcatgttggactcacaacatgactactaaggagctagatacaatacgatctgccggctttctagtttcagttattcatggaaggttagttttgttaacagtggataatcttgttcagagaatggtgcacatgcatttcatgtggcttacattacaaaattcaggtacgatatcattgcgcaattgtgccatgcaaaacgtctagcagaaagccttcttcctgttgcaagaatggtagaacttcatggtgcacatctagtgagccatgaaagaccagacgaggtaaagggaggacctttaataaaacagcaacatgtgccactgaaacattaagggcattgatgtgattggttgttctgcttatttgcttaaataaactgaaacttctcaaaattgctaagcaatgaaggtaacatcccaan

SEQ ID NO: 3453 - DNA, 232 bp, Zea mays
  Peptide Sequence Number=SeqID_9705
  Probeset Number=SeqID_17856
ccgaattcggctcgaggcttgattgatatggctcatagctacttcatatgtgactacttgttgggctcgtatttaggatgatatgaatctgaattttatctcgtgccttatcattacggaatatcatcgtggtccaatttaattgaatgtcaaatcaatgtactgaggctgaaaaacattggcttctgtaaaaaagctggcttcgatagggcggtcgtcgactagtgagctc

SEQ ID NO: 3454 - DNA, 742 bp, Zea mays
  Probeset Number=SeqID_17857
cgactctacccccccttccaacttttccttgatacacatagaaatcttcgaggatcgcccgacaagaaaatactatccaagatgtcggacgtagaagacaacacccccgaggtcgccgatgttgttgaggtttccggcgatgcccccaagggccagatgtccattctcgacgctctcaagggtgtcctgaagctctctcttatgcacgacggtctcgctcgtggtctccgtgaggcttccaaggccctcgatcgccgacaggcacacatgtgtgtcttgaacgagaactgcgaggaggaggcctacaagaagcttgttgtcgctctctgcaacgagcacaacatccccttgatccagatccccgatggaaagcagctcggcgagtgggccggtctctgcgttcttgaccgtgagggtaacgcccgcaaggtcgtcaactgctcttgcgtcgtcgtcaaggactggggtgaggagtctcaggagcgatctatccttctcaactatttccagactgagcagtaagggcttttaaacggtgtaggatgtgaagggagaggattagaggtgcggacttgactttatttcgagaccgctcgacatgacttttcgcttgtactctagccacttcggttggcatctaaaacggtttaggcctcatatctcatggccatgtcgcatttgagaggaataaaaaaaaatttgggcatcaaaaaaaccaaaaaaaaaaaaaaaacccgcggcc

SEQ ID NO: 3455 - DNA, 659 bp, Zea mays
  misc_feature (601)..(659): n is a, c, g, or t
  Peptide Sequence Number=SeqID_9706
  Probeset Number=SeqID_17858
ccggccgggagatcgcccgccggtggcttggctacttgcttgcttgctgagttgctgactaatggcggccattccgagcggagcgatagcccaagccggagctgagcgtccggcggcctgaacaggagaggcgagagagagcagggtgcaggtaccagaagaatgggtccgccgccggagaagcggcggacgctggtgctggtgaacctggcgtccatcatggagcgcgccgacgaggcgctgctgccggcggtgtacccggagagtggggcgccgcgctgcacgccacgcccatcgcggatcggggccctcacgtatgtaccggtccatcgtgcaggtcgcctgcctcccggcgtcgcgctagatggtgatactgcacagccgctcccccgtcctcgagctgatggcctgcctcgtggacttgtccctcacctgtccctgcagatggagctcatgcttcccgcgaccatagatgacttcttcatcgaacatgctgcggcactgtcgcgtggtacgacgatgcatattgactttgtcattctcgtgtgcggcaacttgactgcagggttgaagtcctacaatcacactgccgcaaaagctnnnnnnnnnnnnnnnnnnnnnnnnnnnnnnnnnnnnnnnnnnnnnnnnnnnnnnnnnnn

SEQ ID NO: 3456 - DNA, 327 bp, Zea mays
  Peptide Sequence Number=SeqID_9707
  Probeset Number=SeqID_17859
gaagttaaaccaccctgtcacaataatcggttgaattatctcactggggggtctttctgacaaatgggtcttgcgggacaaatcttgaaactgggggggcgggggataacaaatgggcggggaaaacacctccatccttttgggcaaacccacatttaccagactttttttccagtaaccaacacaggtaatggagaagcctttggtaattcagggccccttggaatttggatcagccccctggtgtggtcgcgcatggctctactctacatcagagccgaagtcgattttgtctaggcctcaggggcttttttgtcccggccccgg

SEQ ID NO: 3457 - DNA, 626 bp, Zea mays
  Probeset Number=SeqID_17860
acacagacggtcgggatcagagagggcgcgtcaagagcagccggtctcctggcggcgcgggctccgtctcgctcctcggtctgtcctccttgtgtcgccgggtgactgggagcgagagaatccctccatccatcctttcctacgttggtcgccgggcgacggagagcgaataatcctcccttcctgcttacctccggggggtgccggggacggggagcgaatcctccattcctgcttccctccggggggcggcggggaccgggatcgaagatgtgctatggggccatggtttgggatccgtggctgatcgtgtcgcaaatcgtgtgcctgcagtgcctctactacctggcgctgggcgtcgccatggcgctcctcgtcggcacccgcgtcccgcggactcacccttctctacttcttcgacttcgccacgctcaccccgcgcacccccacgggttggtgcgccatcgcatcattccttcttgcagctgtcgcagggtacgccgcagctccctaacctcactctcatccacttggttcgtctgaaactggaacggtatcttctggtagtagtcaaaacgcgaaatatgcctgtcgcgcgcgtgtgttgccttatcgcttccggttgc

SEQ ID NO: 3458 - DNA, 1174 bp, Zea mays
  misc_feature (1)..(1): n is a, c, g, or t
  misc_feature (670)..(1174): n is a, c, g, or t
  Peptide Sequence Number=SeqID_9708
  Probeset Number=SeqID_17861
ngcgcagcttcgccaaatgcatgctcccgttgtctgctgctccaacaagcttcaccgacgtctccaaatctaacgcccaacccatcgtttgccgcgtcaagcagcgccctcgccttgccatcacgtccccgccatcgacgtccgtgcagcaggagcctgcgctcggagttccgcccacgccgtgctccgacaagcctcaagcctccgacatgccaagcgtccatcgcaccctcgccgtcgtgccgttcggcatgcacctatcgcgatttgtttccgcacttcgaggaatcgaagatcaagagttggcgaccaagtgatctggttcttcgagttctacgagattgaagacccttagcatctgttttggtgatggcttaatatattcaaaccgcttgccgctatgtataactcgcgttcgtaccgcggccatgttctttttgtcattacctcgctttgcacacactcatccagattcctctctcctcctctacctccggattatccttgatttgcgccgtggcacgtattcttcacccccatttctcatccttcccccttttcacacactcctacacactgcatcgaggttatgcctataatatacgtcgcatatcgtcatacttatacatgcgcgcgctggctcaccgctcgccaccgccaaaaaacctcnnnnnnnnnnnnnnnnnnnnnnnnnnnnnnnnnnnnnnnnnnnnnnnnnnnnnnnnnnnnnnnnnnnnnnnnnnnnnnnnnnnnnnnnnnnnnnnnnnnnnnnnnnnnnnnnnnnnnnnnnnnnnnnnnnnnnnnnnnnnnnnnnnnnnnnnnnnnnnnnnnnnnnnnnnnnnnnnnnnnnnnnnnnnnnnnnnnnnnnnnnnnnnnnnnnnnnnnnnnnnnnnnnnnnnnnnnnnnnnnnnnnnnnnnnnnnnnnnnnnnnnnnnnnnnnnnnnnnnnnnnnnnnnnnnnnnnnnnnnnnnnnnnnnnnnnnnnnnnnnnnnnnnnnnnnnnnnnnnnnnnnnnnnnnnnnnnnnnnnnnnnnnnnnnnnnnnnnnnnnnnnnnnnnnnnnnnnnnnnnnnnnnnnnnnnnnnnnnnnnnnnnnnnnnnnnnnnnnnnnnnnnnnnnnnnnnnnnnnnnnnnnnnnnnnnnnnnnnnnnnnnnnnnnnnnnnnnnnnnnnnnnn

SEQ ID NO: 3459 - DNA, 1873 bp, Zea mays
  Probeset Number=SeqID_17862
ccgggccattcgctgtgcagaggacattcaaacccaattcctcttatcacttcgccgttctgtcacgccacaccccaccacagcacaatgaagtactccactgtttgcgccgccttctttgccgctgtcgttgctgcttccgatgtcaagcagctgaagacagacgacttcaagggcttcattgaggagcacgacctcgtcctcgcagaattcttcgccccatggtgcggtcactgcaaggcgctcgcccccgagtacgagacggccgccacaactctcaaggagaaggacattgccctggtcaaggtcgactgcacagaggagcaggatctctgccaggagtatggtgttgagggctaccccactctcaaggtcttccgcggcctcgagaacgtgtcgccatacggtggtcagcgcaaggccgacagcttgatctcatacatgaccaagcaggccctccccgctgtctccgaggtcacaaaggacaccctcgaggagttcaagactgccgacaaggttgtcctcgttggctactttgccgccgacgacaaggcctccaacgagacctttaccgccgtcgccaatggcctccgcgacaactacctgttcggtgccaccaacgacgctgctctcgccaaggctgagggcgtcaagcagcctggtctcgtcctctacaagtcgtttgacgacggcaaggacgtcttcaccgaggccttcgacgccgacgccatccgcacattcgccaaggtcgccgctacccctcttattggcgaggttggccctgagacctactccgactacatggcctctggccttcccctcgcatacatctttgccgagactcccgaggagcgtgagcaatacgccaaggagctgaagcccctcgccctcaagcacaagggcgccatcaacttcgccaccattgacgcctaggcgtttggccagcacgctggtaacctcaacctcaagatcggcacatggcccgcttttgccatccagcgcaccgagaagaacgacaagttccccttcgaccaggaggagaagatcaccgagaagagcattggcaagtttgtcgatgatttcctcgctggcaagatcgagcccagcatcaagtctgagcccattcccgagtccaacgatggccccgtcaaggttattgttgcccacaactacaaggacctcgtcatcgacaacgacaaggatgtccttgttgagttctacgctccttggtgcggtcactgcaaggctcttgctcccaagtacgaggagctcggccagctctacgcctctgatgagctctccaagctcgtaactatcgccaaggttgacgccaccgccaacgacgttcccgatgagatccaaggtttcccaaccatcaagctcttcgccgctggcaagaaggactcccccgttgactactctggttcccgtactgttgaggacttggtccaattcatcaaagagaacggctcacacaaggctgaggccactgttcccgaggccgctgctgaagatgctactgagtccgccaaggaggctgccgccgacgccgccgacgccgtcaaggacactgctgagaaggctaccgatgctgccaaagaggctgctgctgatgccaaggaggctgtcaaggacactgcggagaaggccaaggacaaggccgcgagcgccaaggacgagttgtagatgcctttgatgcatccgattttttgattgtcaacggcgccttttgcatataccagtacccctttcagcatcttgctatggctcatatgctgaggtatgagtattaaaactgttataattatatggacgggttgggtagcgattagctaatggagttccgggttcgtaaaaaaaaaaaaaaaaaagc

SEQ ID NO: 3460 - DNA, 536 bp, Zea mays
  Peptide Sequence Number=SeqID_9709
  Probeset Number=SeqID_17863
tacgtaagctcggaattcggctcgaggaaactcatcccaagtggcccgagaatatggctgcacaggggtgatctggatgcagtgtgctcattcatttcaacacaatatgtgctggacaatgttgggcttcctatagaagcagcttggcgtgcatggcacgtcgacaatgagggtgctggctacgccattgggtataaagggctggtcttcgcgacggccagaggagctgggcacatggagccatactaccagcctcgcagggcattggcattattctcgtcattcctcgaaggggagctgcctccacgctgatcgatgaagctagcagggtgcgcgaatgccattaactcattttgcacagcctatggaatcataggcggtacatgaggcctagagtttttactatacttggagctggccgcgatattttatataaatatataaaacagaccacgcagggagctgacgatgatattaataaaaaatgagattgagaaaaaaaaaaaaaaaaaaaaaaaaaaaaaaaaaaaaaaaag

SEQ ID NO: 3461 - DNA, 649 bp, Zea mays
  misc_feature (601)..(649): n is a, c, g, or t
  Peptide Sequence Number=SeqID_9710
  Probeset Number=SeqID_17864
ctcgagccgctttcctctacgaaaaaaccatttttcagtataaaatttcgtttttctcctctcagtctccgacgccgccgcactcatccccccagacgaccaccctcctcctcctcccccacccacctcgccggaaccctagcgccgaccgcctgccgtgcccatcgacggcgatcgcattgctgcgccccgatggcgacccgcgcctccaagaattgcctctgcgcgggcagctcttcgttcgatgaccccgatgtggtcgaggtgtctccggcaaccgccgcggctgcggggtgggcctccggccaccacaagaggaagcggagccagcttgtaccgcaggaagggatcgctatcgatcatgatgatcctgatggtgtatacggagaccctataccgcaaaaccggggatgactagccttatggctgatggccccatggagggaggaacgccttgctgagagtgagggggaccaggacacccttggggcacgcagagaccgtcaaggcgtccaccacccatggccagaatgaccagggttagcgctgagctaagttctacgaggacggcgcccactttgtcaaggggcgtgctgatctnnnnnnnnnnnnnnnnnnnnnnnnnnnnnnnnnnnnnnnnnnnnnnnnn

SEQ ID NO: 3462 - DNA, 840 bp, Zea mays
  misc_feature (601)..(840): n is a, c, g, or t
  Peptide Sequence Number=SeqID_9711
  Probeset Number=SeqID_17865
tggaaaaaaaggccagatgaaagaagcccaagggttgttctctaaaataaaaggttcaggcgtgaaaccagatattgtaacataccatattttcatcaagagctatgttgcccagcataatgtttgcgcaagaagccattaacctgtgcgaagtcaaggtcagcattcattgtacacgttccatctcgtgtacattgtacttattactcccccctgtccccgaagaatctcgtgtactttggattgaccttaacatgagcaagatgaagtacgctatttgaccggacaagacaccaggccttcaattacgaactttcaattcaatactgcaaggctactctagacatggaaggatggtagaggcgaaatcattccttagcaaccttcctaagatttatcctggaatatcgaaacaagaaaaacaacgactgtcggaactgctggcgaaacacacttcgtaagatggttgatattataagaaccaaaccctttttgtgagcatgataggtaggtaatactaagactgaatttttagttgtccttagcagcatgcacattagagtggacttgtacagattacatatgttctggttatgaaaannnnnnnnnnnnnnnnnnnnnnnnnnnnnnnnnnnnnnnnnnnnnnnnnnnnnnnnnnnnnnnnnnnnnnnnnnnnnnnnnnnnnnnnnnnnnnnnnnnnnnnnnnnnnnnnnnnnnnnnnnnnnnnnnnnnnnnnnnnnnnnnnnnnnnnnnnnnnnnnnnnnnnnnnnnnnnnnnnnnnnnnnnnnnnnnnnnnnnnnnnnnnnnnnnnnnnnnnnnnnnnnnnnnnnnnnnnnnnnn

SEQ ID NO: 3463 - DNA, 568 bp, Zea mays
  misc_feature (553)..(553): n is a, c, g, or t
  Peptide Sequence Number=SeqID_9712
  Probeset Number=SeqID_17866
tcctctcttaccttccacaccccttctcgaccgtacgtagcctgtcgtatactcaggcagccagccagctcgccggccgatgatgggaggaagaacagtggccccgccgctcgtcgtcgcgctggtgaccatcttcgccatcgcggcggcgacccctccagccactgcggcggcggcggcggccgagggggacgaggtgaagtgtggcggttgctctccgtgcggcggcgccgactgcccggtgctgtacccgtcgccgcccccgccgccgtactactactacagccctcccccacccgcgacctaccccggggagtcctcgtcgtactacacgccgccgccgccgggcgcgtacatccagatcgggagcgcgccgccgggcaagggcccgctgtacccgcaggacccagggttcatcccggccggcgcgccgggccgcgccgcgccgctcgcggtcgtcgctgcgctcgcggcggcgttggcgtgcgcatgggccctcttgtgatctctatgggcttgacattaacaagccctagcgagctagatattcggnggcaataaataacgc

SEQ ID NO: 3464 - DNA, 534 bp, Zea mays
  Peptide Sequence Number=SeqID_9713
  Probeset Number=SeqID_17867
ttctagttctggcatcgtacccgcgcgcgtgcccaataagtgctgcagttcgctggcattgatgatgcctaacacactctcccgtggctacactaagacccttgactaatctagctaaggcaacctaccactggctcgagaagacctacagctttctcacttcctgaatactggacccagaccaagccctccatggccccgttccagcagtacaccgacctgctggcaaagcccaccaagggccttgtgctccaggccccaactgtgacattggatgcttaggacggaccgagtggagagctctactcgtcgggtgcttgcataaatgcggcatctatattatagctaacaactgccagagaccattctgggttctgatgcgccctggatgctggtctgcactggcaagtttcgaattatgctatggcactttttatcgatgaatgctacataatgatctcatgatagtgctccgttccaaacagaatggttcgtggaagccgctgtgagctgcgcgctcaccgacgtcaacta

SEQ ID NO: 3465 - DNA, 228 bp, Zea mays
  Peptide Sequence Number=SeqID_9714
  Probeset Number=SeqID_17868
atgttaatgtagcagaacaagttgagacgtctttccaggtttcaacaaaaactgagtcaaataagaatgctggaaatgctattttatatgaatgcgtggagacaataatgggcattgaagctacaagtggtttacgtgtgttggcaattaatattttgggtcgttttttgtccaaccgtgataacaacataaggtagatttgctcttgctcttagacagggtaccgag

SEQ ID NO: 3466 - DNA, 485 bp, Zea mays
  misc_feature (216)..(216): n is a, c, g, or t
  Peptide Sequence Number=SeqID_9715
  Probeset Number=SeqID_17869
tttcgaattcttcccccctctccgatactcgacgcgcaccgatgcgggcgatgtcgtcggcggttaatggtatgctgcggccacggctgctcggggcagcgcgcgttcgcggcggaattttttttgttgcccgttcttcgttctaattctttttttctttgaggtgtgcccagagatcgaaaggtgcggtgatttgatttagtttttttaattacncgtgcgcccgtggtaattaattatggacggacttatatatatatacattacgcccaagaggaaggagcactttgtattagagaggaatggggaacggacttatgggtggggggccggggtgtcagcgtctgcctgtctgtactgtacatggcttataggagtcccatgcagagagggagggccctggctttgcggtggcattcttttggtacatggatcaagaataaattccacttcattcttggtgcttggacacgaggtgtacaccc

SEQ ID NO: 3467 - DNA, 715 bp, Zea mays
  Probeset Number=SeqID_17870
ccatgaatcaaattcaatttcctgtttgaatagttatatatggaatttacatatttggaggatagtaaccacttcaacttgctcactacataatacacatgtttcttgtgtgcacatgtgccttgatgagtcatatacatgtgttataaattccaccaatgttttcaccctacgattgatcagttccctcttccttactcatatctctcgccccatcagcgggggtctttgccccttcaccggttgcatgatctttcccaccccccaagttgatcaagtcccaatataagatcgtctggtgtctgtacccattagcttcttttattttttctttttcttgtcaaaatcggcgatcacaaaccacacatgtcagcgcacacaacagacatgcagccgcaggagttcaattcacccaacccccttggaggcatggcgaggcttgcatcccatgagatgcagggtgctctgcaccacggggcgcgtgtaccggaaccccgggcggccccccccgtcggcgacggcaatgtagaccagctggggcggcggaggcgatgcctcttcccgccatgtccccgcaacagatctcgggaggagggagcggacgccgcggcgctcggggaggaagaggcgacggtgcgccgcctcggggaggaggatgagtccggagacggtgcgacggcgctgaggaccaccccggccgccctggaggggaccc

SEQ ID NO: 3468 - DNA, 1067 bp, Zea mays
  misc_feature (1)..(95): n is a, c, g, or t
  misc_feature (1067)..(1067): n is a, c, g, or t
  Peptide Sequence Number=SeqID_9716
  Probeset Number=SeqID_17871
nnnnnnnnnnnnnnnnnnnnnnnnnnnnnnnnnnnnnnnnnnnnnnnnnnnnnnnnnnnnnnnnnnnnnnnnnnnnnnnnnnnnnnnnnnnnnnngagcgagcagcagccagcagaagaagctaaaagcccgaagcgcagcgcgcgagcgaatacaacagcgcaacgcagcgccatggaagacgacgacttcaccttccccaccgttgccgccgcgcggggcccgacggcgccgctcggccgccccgatgacgaagacccggtgccgcacctgctccagcttcccccgcctcccagtcccaccctcgcggggacgacctcccctctgtggccgttcgcgggctccactcccaagacgacgacgacgacggccgcgccgccgtcgtccccgcccgtgacagaggaggacgacgaggacaggatggacctgctgtgggagagcacgctcaccaccatgcccgtcgcgacagcgccggcgccggcgccggagtcagctgggagcgccgtcgtcagcccccacgcggggccgccgccagagcggcgcgcggccgcggccgacgacaagcagcgcgccgcggcgctggccgacgcggagaggatggacaggctgtgggagagcttcaacgaggacctcgtcgtcctgcggcggcacgtcccgagaccgaggcccgccgctccaagtccgccgccgagcaccccggcggcaccaacaccaacaccaaggcgccgcggggcctggctgacgacgacgacgacgacgacgaccactggtacctctgtaactactcggcgtcgtcgggcgccgacgacgagtccgacagccaggagacgtcggcgtcgtcgcccgcggagcggcgcgggtacgggtgcgcgcccaccatgctgcgcgcgtcgtcgcgcgccggcggggcgggccagttctgcggcgccggcgccagccaccgcggccgacggcgcgggcgcggcggcggggcggcggctgggtgggcgctcctgctgaggctcttccgcaggctcttcgccgtcgacaggacggcgccgccgtcccgcagcgtctgcgtgccatgn

SEQ ID NO: 3469 - DNA, 1559 bp, Zea mays
  misc_feature (963)..(963): n is a, c, g, or t
  misc_feature (1559)..(1559): n is a, c, g, or t
  Probeset Number=SeqID_17872
ggtgggactagtccaaatgttgtagttactagttactagagttagcaagcagaggaattggtaatggtgatgcgttctcaacttcttatgtgtgcttgtcgttcgatcgtccatcagtttttagatgtacaaaacatatcaccgcattgacgtccatggctgcgagtacagtacagtggtcggccggttccaagtttacaaacagcaagcagtactagtgagtaggtgacattagcagtacaaacccttaaacctgcaactaagcacgacagagagtaggggcggagctcaggcccgttcatctcggttaggtggaagaaatggccggcatatgtgtttctttcatgctttactgcatcctgcatttttattttgttgcactggcacgacagcctggcactggcaccccgcgtactgatctgatgctgtaatagcaattagcatgcgttcagattagttaggatatggagctgagctcgctgccaacaaggtcaatactagcatccatttttttgcaaactaggacacaatcaggtgaaaaggttgagctgcattctttgtctatttaacttcactagttctgtttgtttcatggtatgctgttatttacaagtaagcccaggagattcttttattgatgttaaacaattactgttggatgctcctgaaacatgcttctatgcatgatacaatttgatattgcatactaaagatgggttagctcatcagttagaagactacaaggaaatatctgaaatagcagatataacttctagtggatgttcactggagatggttgctagtatgtaacaacttctagtttcttctctattgtcatatatagtgcttattttctggagctaaagtaaaagttctttcagcaacatacaatgagaggtctattaggtcacatctccgacgtgtgaaggggctactatctctgtctagtctttagggcatgtnttgcatactaacctaaggtgagacactttgctagaagactctaagtaaaggtatgaatgcttctatcgactaaagtggatgttcactgggcacggttagtagtatgtaacaactgccagtttcttctctattgtcatatatacttatatagtgcttattttctggagctaaagtaaaagttctttcagcaacatacaatgagaggtctattaggtcacatctccgacgtgtgaaggggctactatctctgtctagtctttatgtttccctatcaacgtccttagctctgcttcaggagtccgctcaaggaaaatttgcaggacttatatatgtgttctctgttcactgatgcggctggagcgtcatgtcaactgctcaccctccccctaacaaattaaactagactgatgagtggagcttcatgttgggatgatccatgccccttttaagttttggaacgtcgtactcaaatgtagcttgtgttagttgaacctatcgtactttcttttggaattaaattatatgatatttaaacatgtttgatgtttaatacttgtgttggatgctttatgcttccaaatatatatgcattatan

SEQ ID NO: 3470 - DNA, 494 bp, Zea mays
  misc_feature (43)..(43): n is a, c, g, or t
  misc_feature (65)..(65): n is a, c, g, or t
  misc_feature (77)..(77): n is a, c, g, or t
  misc_feature (79)..(79): n is a, c, g, or t
  misc_feature (81)..(81): n is a, c, g, or t
  misc_feature (83)..(83): n is a, c, g, or t
  misc_feature (92)..(92): n is a, c, g, or t
  misc_feature (105)..(105): n is a, c, g, or t
  misc_feature (107)..(107): n is a, c, g, or t
  misc_feature (113)..(113): n is a, c, g, or t
  misc_feature (124)..(124): n is a, c, g, or t
  misc_feature (127)..(127): n is a, c, g, or t
  misc_feature (129)..(129): n is a, c, g, or t
  misc_feature (137)..(138): n is a, c, g, or t
  misc_feature (146)..(147): n is a, c, g, or t
  misc_feature (158)..(158): n is a, c, g, or t
  misc_feature (176)..(176): n is a, c, g, or t
  misc_feature (197)..(197): n is a, c, g, or t
  misc_feature (219)..(220): n is a, c, g, or t
  misc_feature (237)..(238): n is a, c, g, or t
  misc_feature (241)..(241): n is a, c, g, or t
  misc_feature (245)..(245): n is a, c, g, or t
  misc_feature (270)..(270): n is a, c, g, or t
  misc_feature (282)..(282): n is a, c, g, or t
  misc_feature (308)..(310): n is a, c, g, or t
  misc_feature (321)..(321): n is a, c, g, or t
  misc_feature (356)..(356): n is a, c, g, or t
  misc_feature (366)..(367): n is a, c, g, or t
  misc_feature (427)..(428): n is a, c, g, or t
  misc_feature (430)..(430): n is a, c, g, or t
  misc_feature (435)..(435): n is a, c, g, or t
  misc_feature (449)..(449): n is a, c, g, or t
  misc_feature (451)..(451): n is a, c, g, or t
  misc_feature (469)..(469): n is a, c, g, or t
  misc_feature (476)..(476): n is a, c, g, or t
  misc_feature (484)..(484): n is a, c, g, or t
  Peptide Sequence Number=SeqID_9717
  Probeset Number=SeqID_17873
ttcgttcggagcgcacacacacacaaccagatctcccccaaanccacccggcggcacctccgctncaagaagcagancngngngaaaacccngaccggcaagacnancacccncgagggggagncgncngacaccanngacaacgnnaaggccaaganccaggacaaggagggcanccccccagaccagcagcggcncaggggggggggcggaacagcnngaggacgggcgcacgcnngcngacnacaacagccagagggagagcacccnccaccaggggcnccgccccaggggaggcaggcagaacnnngggaaaacccngaccgggaagacaaacacccgcgagggggagcccncggacagganngacaacgacaaggccaagaaccaggacaaggaggggaagcccccaggaccaggagcgggnnanccgcngcagggaaggaccnangaggacgggcgcacgccnggcgacnacgacaancagaaggaga

SEQ ID NO: 3471 - DNA, 521 bp, Zea mays
  Peptide Sequence Number=SeqID_9718
  Probeset Number=SeqID_17874
gccggccccactcctccttccccttggccgccgccccccctgcccacctcctcatccctccattgttgcagccaccaaaaccctagccgcccccccaatcccctcctccctaggtgctactccgtgccgctcggatcatcgtctcttggtgcgaatctccaatcgttttggtggagggaagaagggaggaaggaataggggagaacccaaggtggtggacttccggatcgatcttagggattttgtccgaacttcggtaaaggcacctgatctttgctttgggaaagaagggatgtagtactacggtcaccacacttttaaataaaggaataactgattaataatgatgttaaacaggaagggtcaagtttagggaattattacattctagattttcatgggagttagactgattaattctgtgggctgacactggtatattttgtctcggcatgaatggtcttttctacccgggcattgtggttatactatgtgcaagatctttcttttatatcctgtgt

SEQ ID NO: 3472 - DNA, 598 bp, Zea mays
  Probeset Number=SeqID_17875
ccggccgggccgggatctctctagtctagcccctctgtcgctctcagacgacgggtgcgccgccgccgccgccctaagccaggtgctgactgctgaggctttctttggtctcttcgccggcgacgacacccgccaggtactcccacccgttcttttcccttcccttcatcctgttcgaagctgagcaccgaaaccctaacctaaagctatttagctatttgacaaccctcctaacttcgaagttttttttgttgttgcaaaaatcacccatattcctttactggatctgcccctgctagtatccacggtgtcattgcaagacgagatggtttccttcgagatgaatgacctcaagaagattgggcttggcctgaccggctttggaatattcttctcatttctgggaattgttttcttctttgacaaggggctcatcgcaatgggcaatattcttttcctgtcaggtttgggtttgccaattggtctgaatccactatgcagttcttcaccaagccaaggaattacaggggtattttgcaaccactgtatttggtagggctattgcccttaaacatgtctaacatcccatctttctcga

SEQ ID NO: 3473 - DNA, 330 bp, Zea mays
  Peptide Sequence Number=SeqID_9719
  Probeset Number=SeqID_17876
cgcccataagcagtggtaacaacgcagagtacgcgggcgcctagcgccgtcttctcgcagatcatgaaccccaaggggcggtgaggtaaagctggccccattcgttaccttgcaggcgtaatttattcatccagaatatattttttcttaaatgttctctcaagttaaggcttaagaaccagaagtgtgaggattgtttcgtattagatattctgccttgccttgtactacttccttctccgaggtattgtaatgactatacaatctgttggcttgcaaaaaaaaaaaaaaaaaaaaaaaaaaaaagtcctctgcgttgttaccactgct

SEQ ID NO: 3474 - DNA, 351 bp, Zea mays
  Probeset Number=SeqID_17877
atctatggacagttgtaggatgagtaagcaacctggatgctctttcattgaagtggacggatgtgtgcacgagttctttgcaggagatgaatcacaccttgagatagatgctatatataacattcttttggggatcaatgaactgttagtagcagagtccttgtatgaaagttgtgatatttttttgtcaattaagtaggtaggttcaaaatgtaataagctgtcattttatgtggagcagaaagaatgtttacatttttgtatttctccagaaggcgggaaatttcatttttctgctagacacatcccttcctgtatatgcttttgctagaacatactgggttgtccact

SEQ ID NO: 3475 - DNA, 1759 bp, Zea mays
  Peptide Sequence Number=SeqID_9720
  Probeset Number=SeqID_17878
ccgggcttctcttctccttcactcacccacctttctctcttcttcttccgtcaatttacacgcggtcgcaagtcctacactagttctccctcgttctccccccacctctccacatccatcacaatgactgtccccaacggctccgcaaagggtaacaccttcctcttcacttccgagtccgtcggtgagggccaccccgacaagatctgcgatcaagtctccgatgccatcctcgatgcctgcctcaaggaggaccctctctccaaggtcgcctgcgagaccgccgccaagaccggtatgatcatggtctttggtgagatcaccacaaaggcacacctcgactaccagaagattatccgcaatgccatcaaggacatcggctacgactcttcggagaagggcttcgactacaagacctgcaacgttctcgttgctattgagcagcagtcgcccgacattgctcagggtctccactacgaggaggctcttgagaagctcggtgccggtgaccagggtatcatgttcggctatgccaccgacgagacccctgagctccttcctctgaccgtcctcctctcccacaagctcaatgctgccatgacctccgcccgcaaggacggctccctgccatggctccgacccgacaccaagacccaggtcaccattgagtacgctcacgatgggcggtgccgtcattcccctccgtgtcgacactgttgtcgtctctgcccagcacagcgaggacatcaccaccgagaagctcccgtgaggagatcaaggagaagatcatcaagaaggccatccccgccaacatgcttgatgacaagaccgtctaccacatccaaccctctggtctcttcatcattggtggtccccagggtgatgctggtcttaccggacgtaagatcattgtcgacacctacggtggttggggagcccacggtggtggtgctttctccggaaaggactactccaaggtcgaccgctctgctgcctaccttgcgcgctggatcgccaagtcgcttgtcaatgccaagctggcccgccgtgcgctcgtccagctgtcatacgctatcggtgtctccgagcctctttccttgttcgttgagacctacggcacctcggagaagtcctcggacgagcttgtggagattatccacaagaacttcgaccttcgccccggtgtcattgtcaaggagttgaacctcattgaccccatctacttccagaccgctaagaacggtcacttcaccaaccagagctttacttgggagaagcccaaggagctcaagttttaatttcgtaatgctcgacgcatagagtgggattgaatcaacttcatcctacaagacttaagatttatgatgacgacgacgacatcacatgagaaagatttgcatatctttgggaggcgggtaaagagccttttcaacaagtgtttcacggcgtccagggcaaattttttcacccatgataccagcccgttagttctttccaaaaagttagatgcacatttccttttcatatagagacagcctagggcaggctgttagatacaaaagcttcaacatttaggggcaccagtgcgttatcaacgcgcacgttggccttttttgcggcacgccgcatgtggaggaaagtccaaggactactagattaggagaatcaaatacaagcccgagcgtctgctctgagcaatacctcagccgcagacgagtcgggcactttaccaagctaggaaaaaaaaaaaaaaaaaagc

SEQ ID NO: 3476 - DNA, 428 bp, Zea mays
  misc_feature (226)..(226): n is a, c, g, or t
  misc_feature (246)..(246): n is a, c, g, or t
  Peptide Sequence Number=SeqID_9721
  Probeset Number=SeqID_17879
tttctgtagcggtagactgtagttctgttcctccccactcactcctgcgcttcctcgccgcgcggttccttctccctgatcctcctttggcttcgcggttcatggcgatgtggagggccgacgctaggcaggtggtcgaccggacgctcgggtcatgggcccggcgcgcgctgtccggcagcgtgatcaaccctggtgctgcttcctcctggggggggggggctcngctgctcttctgtggtgccnctgttcttgcttggtcccccctccttcctatccgagcgcctccggttctttggctccctggctcggtgggctctcagggacctgctggcgcgtggcctcgtccggttggtctcggttctctctcgcctgcggctcttctcctagggctcttcttcctaggggtgggattcctttgtttgccc

SEQ ID NO: 3477 - DNA, 556 bp, Zea mays
  Probeset Number=SeqID_17880
gaccctacaggagccttgtgcatcctgcgcttacctgataggggatgctattacatccctcgtttctcctaccccataaggtgactggttttctacaggggtttatacgactggaaatccttatggggtaggagaggatatcgtgttcagcatgccatgcagatcgaagggtgatggtgattacgaactagctagtgatgtgttgatggacgattttctctgggaacggattaaaaagagcgaagctgaattgcctgctgataagaaatgcgttgcccctcttacaggagaggggaatgcattctgtgatcttccggaagataccatgctcccaggagaagtgtagcttagttccagaagccccagcagcggaatgcatttgccaattcattagctgagacttgaaacatctccctgcgtgatgcagcaacccctttaatatatataaatgggggtatccaaaaattgcgccccccgaatttgactatgatgcaaacctcttacacagggaagtcttttttttcccataaatacggaaagactgcttccattcccc

SEQ ID NO: 3478 - DNA, 822 bp, Zea mays
  misc_feature (1)..(1): n is a, c, g, or t
  misc_feature (246)..(246): n is a, c, g, or t
  misc_feature (249)..(249): n is a, c, g, or t
  misc_feature (611)..(822): n is a, c, g, or t
  Peptide Sequence Number=SeqID_9722
  Probeset Number=SeqID_17881
nttcgcctacggcatattcccccgaggccccgaaccaaaccaaactaaaccagcccagatcagcgaaacacactccgctctcccgagaccggacacatggcggcggcggcggtgacgtccaacggcggcgcagtggccgcaaatgggccggcgccggcggctggctccgtgtacagcgaggtgcagacgaaccggctcctgcacacccttcccctcccctccgtcctccgctccaacttctcggtngtngacggccccgccagctccgccgcgggcaaccccgatgagatcgcggggccgtcgacgggggctggccctcggtactcagttataaaaacgcgtccttctctccgccctgatctgtacagttttgggagtgcatccttggacgctgggtctcctggatcagcctacagtgcagtttccatggtgtgaactctctactgaccggttgatgggagttttctgcgtagccgattggacgtggtagcgaataagaactggttttttttatttttttttgtatgatttacgcagcaactgaccggtcttgtagcccagattctgttccccctggttggctggttgcaatctcttgagagaatgaaaannnnnnnnnnnnnnnnnnnnnnnnnnnnnnnnnnnnnnnnnnnnnnnnnnnnnnnnnnnnnnnnnnnnnnnnnnnnnnnnnnnnnnnnnnnnnnnnnnnnnnnnnnnnnnnnnnnnnnnnnnnnnnnnnnnnnnnnnnnnnnnnnnnnnnnnnnnnnnnnnnnnnnnnnnnnnnnnnnnnnnnnnnnnnnnnnnnnnnnnnnnnnnnnnnnn

SEQ ID NO: 3479 - DNA, 216 bp, Zea mays
  Peptide Sequence Number=SeqID_9723
  Probeset Number=SeqID_17882
ctgccacttttacaagttatccgccccacaaaaactataaactacgcctatgctcgtgacaatgaaacactatttgatattattagtgtgaaggtatggatgaacctctcaattgacaagtgatgcaggataaataatttgtccacaagcatgattgcattatcccatgtgcttatgaaatttacagcaggccagcagacaccaggcagtaaggtg

SEQ ID NO: 3480 - DNA, 731 bp, Zea mays
  misc_feature (601)..(731): n is a, c, g, or t
  Peptide Sequence Number=SeqID_9724
  Probeset Number=SeqID_17883
atggttttttttctcgtaaaaaaaaaaaaaaaaaaaaaaaaaaaaaaaaaaaaaaaaaaaaaactcgagactagttcgcgccggggcatgggtgagcttgcaaataataattagcgaccgacagtgggctcttcggtcacaggaatagtacctgactctgctcgctacctgatatcaggacgaattcaggatcacatgatgattactagtgcgccagcattttttgcaatctctatttttgaggtcaaatgatatctacctccacataaatccacattggcagagaccacattttgctactatcattattgattttaaatgtcggaccattggatgccaaaagaagaatcatagcaaacgacaaccgtccatcttctcccccatgctccccggtgccagaccccaattatttggcctccgcctgagaggggagaaagacccgttctactcgctgctgatcacggggctcgcgaatgccgacaagggtctgggcaacggcgtagacaagcgccaccggaacgagctcctcgaccacatccaggtcatcaccaagccggcgatccggagggtgcctcttacgggaggcgcgcaagcctatctnnnnnnnnnnnnnnnnnnnnnnnnnnnnnnnnnnnnnnnnnnnnnnnnnnnnnnnnnnnnnnnnnnnnnnnnnnnnnnnnnnnnnnnnnnnnnnnnnnnnnnnnnnnnnnnnnnnnnnnnnnnnnnnnnnn

SEQ ID NO: 3481 - DNA, 768 bp, Zea mays
  misc_feature (601)..(768): n is a, c, g, or t
  Probeset Number=SeqID_17884
atggcaaactggaccggaagaagcaagcgcctgcttttgcgtcgacgaaggaagaaggaacgagaaatcgccaagccaagccaagccagaagcggcagcctcgcgcagcggtctggtctctcttgtgggtggtgcccctcttcgccggtggccgggaaggggagtggagtgggaccgctcaaggagaggccggcgtccccaagtctcacttccgccgtccactttccccctgtagggatcgagggaggaaggaaaggaggtgcttcacaatgaaggccctcattcttgtcgggggtttcggaacccgccttcggcctttgactctgagcttcccgaaacccctcgtggattttgcaaacaagcccatgattctgcaccagatcgaagctttgaaagaagttggggtcacagaggtggttttggctatcaactatcgcccagaggtaatgattaatttcttgaaggactttgaggataagcttggcatcacaatgacatgctcaccagagacttacaccttcgggaccgctgcacctaaccttctagcaagggacgaacctccgatcctggatccagtgagtccatgttttgacgcatcagnnnnnnnnnnnnnnnnnnnnnnnnnnnnnnnnnnnnnnnnnnnnnnnnnnnnnnnnnnnnnnnnnnnnnnnnnnnnnnnnnnnnnnnnnnnnnnnnnnnnnnnnnnnnnnnnnnnnnnnnnnnnnnnnnnnnnnnnnnnnnnnnnnnnnnnnnnnnnnnnnnnnnnnn

SEQ ID NO: 3482 - DNA, 255 bp, Zea mays
  Peptide Sequence Number=SeqID_9725
  Probeset Number=SeqID_17885
cggctcggtcatattgcgagcccacccgagaggctcggctcggctcggtaattgcttgctattcgagcagatatgcccagcgcaggcaattacaattgaggctgaagaacgtgaagatggcagtcgccgaaccacaagatatgatattgacatgaccaaatgcatttactgtgggttctgtcaagaggcttgcccagtcgatgctattgttgaggggcctaactttgagtttgccactgagacacacgaggttag

SEQ ID NO: 3483 - DNA, 469 bp, Zea mays
  Peptide Sequence Number=SeqID_9726
  Probeset Number=SeqID_17886
gcgcgcggcctcagcggaggggccaggaggcggagggggtgcaggaggcggagctcgtcgccaccacggtcaagatgtcgccaagctgcacggccagggtcgaccccgcggcccatgaggtggacgcggcatgatggggagtcggcgctacggggcatgaggccgactaggtggagcacggtgaaagccgatccacgacacgatgcttgtaggagcactggacagcaggccggtgggttcttttcctcacccagttcgttcgccgtatggaaccatcgaggctattgcaggatttgaggagtgatttatcggatactaatgtgttcttgttgaacctgagtttccttcaagcgatcacctgtacaaccacttttagcaagacgatcgctacgctcacattgagagccactgtcattctgactcgctgctgagtgattctaagactacttaggactgctggcatgtgttg

SEQ ID NO: 3484 - DNA, 604 bp, Zea mays
  Probeset Number=SeqID_17887
aatttggcacgaggccgcgacgtcggccacggcttccgttgggtccgcatggtcaacaacatttacctcaattttgacgccttccccggggacaaggaccacgggggggtgggggacggcaccaacattgtgttttggaagtggtgcgagggcgccacccagcgctggaagatcgtcccctggtaaatgtgctgttctgtggctgccctggtcatccccatgatttggagctttgaaggcatacccccctgtggtcagcaactgctcccgtgttgttaaaataaagttggtggggatcgatcgatcgatttttggtgatgggggtccccccccgggggtttgtgtttagtcccagtcgtttgtgaggaagtcagttatgtttgagtgaaaggggtacttccctcttcggttaactcgggccttgtcatgaggagggttttcaccccccccccgtaaaactttgttctggacccggacccccccttttttcacccaagtgggtttttttttatcccccggatctaaaaaaaaaaaaaaaaaaaaaaaaaaaaaaaaaaaaaaaaaaaaaaaaaaaaaaaaaaaaaaaaaaaaaaaaaaccccccc

SEQ ID NO: 3485 - DNA, 2107 bp, Zea mays
  Peptide Sequence Number=SeqID_9727
  Probeset Number=SeqID_17888
aacctctctcgactttagccgctcccacacggcctccatctttcggcatcgagagatccaataacaaaatcaggagcaagaagagacgcaatcattaggagctactacttatctgcattccgcagatcaaggttcaagaacaaattcagctggtggccggtggagattattttattcatcccccccgagaggctgcatcgaaaaagggagatcaaggatccccggggggcttctagacgcaaagggagggcgagaggcttcttctctgagcagcgaccggctcgccgtccagagaagaagaagacgacgacgaagaagaagcgcttctgggctccgtcgtcgcatgaagaaggaaaccatggaggggcatgtgccattgccattgccattgctcccggacggagaaactgcggtgggctacagcaaggacgccgcctcctcctcctcggcggctctctcgcctctgcaagaggagatttcgagcctgcgatcgaggcagcggcgtgttgacaggagacggcgggaggcgctcgacaggctcgttgacctgaaaggaagcgttagggtcttctgccgggtccggccgctggctcacacgaacagcttgcatgcccaatcatcacctgttaccgtcgagcaggagaggatcacggtcaaggcagccgggatcaagagggagttcggcgctgatagggttttcggccaggagccacgcaagaggatgtgttcgaagaagtgaaaccgatcctcaggtctgcactcgacggccacaacgtctgcatcctcgcgtacgcccagaccggggacggggaagacctacacaatggttggaaggaaccgacggtaataagctcggcgtcgtgcctcgggcgatccaggagctgttctctcgcgcttcggaggacggctcatgcgcctactctttctccatgagcatgcttgaggtctacctggggagtctcagggacttgctggcagcaccgaggcatcctctcttcaggcgaacagagtgcaaagcagcggcgtggtaaataagactgtcagttcagttcacctgcaaaaacttcaccagaccagcagtaaatccattgaaagatccccagcacgggaattaaattttccaaaaaaaaaaaaaaaaaaaaaaaaaaaaaaaaaaaaaaaaaaaaaaaaaaaaaaaaaaaaaaaaaaaaaaaaaaaaaagggcgtgcagttttggaggttggggggtcgcttttgcgggcccgcgctttcgtaggccttcttttggggtccttacttttatttccttggccgtttttttgcttctttgtgcctgggtttaccctggcgttcccgcggtaactctccttgtccccccttctcctttctcttgctgctccccctctttgaggctggggccgatgcgctttcccatcccctgttcacccttttttgcaattgggactgcgcccttgggcctgtggctttaccccctgttgtgagcgccgttttcccgcaggggttccggtttccctttccccttgcccttccccctccgctccttcgcccttacctcccccgcccttttttcctctttcttttccttcggcttttttcctcctctctgtttcccacattcttcgcgcctcgcccttctggggttttctcgggtttctaggcgcttttctggcgttgcccctttttcgccggcactcttccctccgcctttgtgggcccctcggttttcacctgttttttgggtcccggtgttctctccggctcctattggcgtcttctttcctccttgcttaccttctcggcttttccccccctcttctacccctcttgccccccctttgcttctcttcttctgtgggcccttcttttgtggaccccaccgcttggcgcactcttgctttggggtctttttggcggtgtctactttttccggtgttctttgttccgctttctttctccacttgttgcgcttctcttcttcccttcactcctcgcccgtcttttttaccactctttttatcgtgtcttttctttacgctttgctcttctcctgttgtaagttgtccgcggtacccttcgcccttgtcatctttcctcttccttttttcct

SEQ ID NO: 3486 - DNA, 677 bp, Zea mays
  Peptide Sequence Number=SeqID_9728
  Probeset Number=SeqID_17889
acgtcaattccccgatgcctgctgtaggtcccagtcagatccctttgaattcaatagttcagccacccggtttctccctcttactatccgttttaggcctcgtttcagtcggtttggcatattccaggtctggttccgggtggaaaaaatgagtcggtttgaaattcgatcgtctctgcatgaatcattcgtttcgatccgaatccaaaaccatagccgggccgggttggagtttcctctcccactactgcccggtacgaatcccggtcttctaccctccggatcgaatctcggcccccccgcgcatcactggcgagtggcgaccgaggaggcggagcgaagtgacgtcgcagcgcagcctcgacggtgaccctccccgtcgccttctcactggaaaaagaaagggcagcaataccaccattcttgcttcccttgaaaagtgcggcgttcggttactgtggtaaccctgcaagatgattgaaaatgatggatatacactggatttgaatagtcagagaatccactagttcccagctgattcaaatagtttcagtttgtgtttcagtttctgcttcagtattgtcacacattcttacaaggtgtatccaatggtttatataaacaaaatacactaggttgcacactttgtatgtaaatatatgagcagttcatgtttc

SEQ ID NO: 3487 - DNA, 940 bp, Zea mays
  misc_feature (1)..(8): n is a, c, g, or t
  misc_feature (918)..(940): n is a, c, g, or t
  Probeset Number=SeqID_17890
nnnnnnnncctcgagccggcgcctcacgccgtccctccgctcggcgagtctcggctccgacagcagccgccacgtgcgacctcccctactcctgagagatctgcggggctcggcatggggtgaccagatcgggccgctgctcggtgctctccagctgaattctgcccgcagctcgtgtcggaggcagcggagatggcggaggccggcgtggcacgcggctcagggagtgctggcgatgctttgttcagggaactctggcatgcttgtgctgggccattggtcacagtgcctcgccaaggcgagctggtttattacttcccgcagggtcatatggaacagcttgaagcatctacagatcaacaacttgatcagcacttgcctttgtttaatctaccgcacaagatcctctgcaaggtggtcaatgtagaacttagagctgaaactgattctgatgaagtttatgctcaaattatgctgcaaccacaaacagagtgcaattccagagagagaacaactacgaccgccgccgccgccagtgcgacaggcgcgaccagcacgtcctgcccacgcttcaccacacaagcggctcctcttcacaatcgccgtcactggaatagcagttatgatcggctccatactgttccaaagggacgagggtttctaactctagtagccatggactcgctctgtcaagttgctccttgaccgggagagtcaggccacaggaggtggtattaatgtataataactcgttgaatcaattgcaataactggagtttgttagggagtatagcccccggcatgcattcgtcaaaaggcgaagttatgttctgcccctggcggttctgagacttgtgtttgctttgacactgcacttgaatttgttcatctgtaagtcaaagatgagttatactatcnnnnnnnnnnnnnnnnnnnnnnn

SEQ ID NO: 3488 - DNA, 885 bp, Zea mays
  misc_feature (1)..(276): n is a, c, g, or t
  misc_feature (294)..(294): n is a, c, g, or t
  misc_feature (301)..(301): n is a, c, g, or t
  misc_feature (305)..(306): n is a, c, g, or t
  misc_feature (320)..(321): n is a, c, g, or t
  misc_feature (340)..(341): n is a, c, g, or t
  misc_feature (350)..(351): n is a, c, g, or t
  misc_feature (364)..(365): n is a, c, g, or t
  misc_feature (374)..(375): n is a, c, g, or t
  misc_feature (428)..(428): n is a, c, g, or t
  misc_feature (450)..(451): n is a, c, g, or t
  misc_feature (472)..(472): n is a, c, g, or t
  misc_feature (489)..(490): n is a, c, g, or t
  misc_feature (529)..(529): n is a, c, g, or t
  misc_feature (550)..(550): n is a, c, g, or t
  misc_feature (563)..(563): n is a, c, g, or t
  misc_feature (574)..(575): n is a, c, g, or t
  misc_feature (591)..(591): n is a, c, g, or t
  misc_feature (642)..(643): n is a, c, g, or t
  misc_feature (655)..(656): n is a, c, g, or t
  misc_feature (674)..(675): n is a, c, g, or t
  misc_feature (715)..(716): n is a, c, g, or t
  misc_feature (718)..(718): n is a, c, g, or t
  misc_feature (877)..(885): n is a, c, g, or t
  Peptide Sequence Number=SeqID_9729
  Probeset Number=SeqID_17891
nnnnnnnnnnnnnnnnnnnnnnnnnnnnnnnnnnnnnnnnnnnnnnnnnnnnnnnnnnnnnnnnnnnnnnnnnnnnnnnnnnnnnnnnnnnnnnnnnnnnnnnnnnnnnnnnnnnnnnnnnnnnnnnnnnnnnnnnnnnnnnnnnnnnnnnnnnnnnnnnnnnnnnnnnnnnnnnnnnnnnnnnnnnnnnnnnnnnnnnnnnnnnnnnnnnnnnnnnnnnnnnnnnnnnnnnnnnnnnnnnnnnnnnnnnnnnnnnnnnnnnnnnnnnnnnnnnnnagttcggatccctgcggncgtcggncagnncgtcggcaggcccnngttcctgggcccagtgcgnntcgagttcnnctgaggcaccagnntgcagcccnnggcggcgaacgcccttacggtcttcgccacaaagtgccaggcgctgcagcagncagtgcttgcccaccagaccannggcaggtggagcccgctgccnccggtacccaggcgacnnatacggtgtggtcctgcagccccttcctgcagcagcagnccgcagggcgagcctcgcggncgctgatggcggncccaggtagcnngcagcagctgacggcngatgtgccggccctgggcagctgcagcagccaaggtccctttgcccttgcnnaacgcagctgcnncggcggtgtctacttacnntgaggcacctatgttccctgtagtaattatgtaatggagnngntgactacgcccccccccccgctatagctagttcactcgtttagcggaaatgagtaacggagtgtcccccatccccatgggtggcagtgtgagcaatgacctgaatgacccattgaaatggaaaggaataatatatagggaaaaaggttgtttggaaaannnnnnnnn

SEQ ID NO: 3489 - DNA, 1059 bp, Zea mays
  misc_feature (1)..(438): n is a, c, g, or t
  misc_feature (1039)..(1059): n is a, c, g, or t
  Probeset Number=SeqID_17892
nnnnnnnnnnnnnnnnnnnnnnnnnnnnnnnnnnnnnnnnnnnnnnnnnnnnnnnnnnnnnnnnnnnnnnnnnnnnnnnnnnnnnnnnnnnnnnnnnnnnnnnnnnnnnnnnnnnnnnnnnnnnnnnnnnnnnnnnnnnnnnnnnnnnnnnnnnnnnnnnnnnnnnnnnnnnnnnnnnnnnnnnnnnnnnnnnnnnnnnnnnnnnnnnnnnnnnnnnnnnnnnnnnnnnnnnnnnnnnnnnnnnnnnnnnnnnnnnnnnnnnnnnnnnnnnnnnnnnnnnnnnnnnnnnnnnnnnnnnnnnnnnnnnnnnnnnnnnnnnnnnnnnnnnnnnnnnnnnnnnnnnnnnnnnnnnnnnnnnnnnnnnnnnnnnnnnnnnnnnnnnnnnnnnnnnnnnnnnnnnnnnnnnnnnnnnnnnnnnnnnnnnnnnnnnnnnnnnnngactgcgctatcctcattatcgctgccggtactggtgagttcgaggctggtatctccaaggatggccagactcgtgagcacgcccttctcgcctacacccttggtgtcaagcagctcatcgttgccatcaacaagatggacaccaccaagtgggtctgaggaccgttaccaggagatcatcaaggagacctccaacttcatcaagaaggtcggatacaaccccaagcacgttcccttcgtgcccatctccggtttcaacggtgacaacatgattgaggcctcctccaactgcccctgggtacaagggttgggagaaggagaccaagtccaagggcacccggtagaccctcctcgaggcatcgacgccatcgacccctcccagccgtcctaccgacaagcccctccgtcttcccctccaggatgtgtacaagatcggtggtattggcacggttcccgtcggtcgtgtcgagaccggtatcatcaaggccggtatggtcgtcaccttcgcccccgatatccattcatgtattagctgttgcttcctgctttgtactccgccgatctgtccatctctacatgttttcgtcttcacacaacaacnnnnnnnnnnnnnnnnnnnnn

SEQ ID NO: 3490 - DNA, 647 bp, Zea mays
  Peptide Sequence Number=SeqID_9730
  Probeset Number=SeqID_17893
tataacgaaatgcgaatccgctgccttcgcctctcgagtctcgtccacgccgtacggactcctagctcctgtactcgcgcagtcgccatgggccaagtttacgattgtgaattaaacggcgttctgaaggaatggcaggttcgcggccagggcctccttttacagagaggatgtcgatgtcgtcgccgcaaacgaccccttcatgaccacggactacttgatctacatgctcaaggatgacaccgtacgcggccactgtaagcacggtgacattacactcaaagactgcaagacccttctctttcgagataagatgggcaccgcctttggcatcaggaactctgaggaaatcccgtgtggtgacgatggcgctaactacctcctggagaccaccggcgtcttcactgacaaggacgacgctggtgcacagtctcgaaggcgtagccaagaaggttgttatctcatgccccaagcaaagacgcacccatgcttgttgctggtgggaatgaggacaaggacacctcccatgttcacattgtgtcccatgctaactgcaccacaggatgacttgctcgccttgttaactgccattcatgacaacttccgaattgttcatggtttgatgacaactgtacgtggccttactg

SEQ ID NO: 3491 - DNA, 386 bp, Zea mays
  Peptide Sequence Number=SeqID_9731
  Probeset Number=SeqID_17894
ccggcgcgtccgcccacgcctccgccttcgcgtccgatgcggctgacgggaccgtggggggctgcttccatcaagcaacgattgacgttatctattggagcttaccagcactcttgcgacttgtcacctgtggtagaataaccgtagtacttagtggatgtagcaacgcgtagcatatatatatatatatatatccactggtgtctaattgaaccgtagtataactgccctggatttaactagaacattgtgtatacctggaataattggagcttgagtctcgaaccaggagctatccgcacatgaacttttgggactttaagtatcttatcatcttaagcttacctaataatcagcactagtaccttaatgttcgcgttatttca

SEQ ID NO: 3492 - DNA, 742 bp, Zea mays
  Probeset Number=SeqID_17895
tttgagtaacgctgtccttcaacattgggtttgatgacttcggtactggtgtgccctgatggaaagacgatcgaagctgaagctgcccatggtactgttacccgtcattaccgtgttcaccagaaaggaggtgaaactagtacgaacagtattgcctcaatctttgcgtggacaagaggacttgcccacagggcaaagcttgatgacaatgctagactacttggcttcccccaaaagcttgaggctgcctgcgttggaaccgtcgagtttgggaaaatgaccaaggaccttgccctttttgttcccggattttcaaatatcccgaggagccctttcctgaacccggaggagttcatttaccctgttgcttatgagctcagatcaagggtggcagccaactcgaacctttgaaatccttgccgaaattgtggtggttttctgggggacgcttttgaaccgtttttattaagttgccattttttttccctgggcccccccccttatgaaagaaaaaggccttagttaggggaacatttgcagggtgcagcagtatgccaaatcattatcatttccgtttccatttccaattggagatttccgtagatttccccgattaagggaactcatttacctgattatttgaaacgtttgaaaaaaaaggtcgccccttaaaaagatttttggttgtcaaaaaaaaaaagagaaaaaaagaaagaaagaagagaaggggggagaagaagaa

SEQ ID NO: 3493 - DNA, 713 bp, Zea mays
  misc_feature (1)..(15): n is a, c, g, or t
  misc_feature (521)..(521): n is a, c, g, or t
  misc_feature (616)..(713): n is a, c, g, or t
  Peptide Sequence Number=SeqID_9732
  Probeset Number=SeqID_17896
nnnnnnnnnnnnnnngccgggacaccaccgtcacacacacaagaagagagccgagagctagctacctagcgcgcgatggcgatgtccgcttccaagacgatggcggtcgccgccctgctagccctggtcctggccgcgtcgaccgccgaggcaaggaacatcaagacgacgaccacgacgacggcggcggcggagaagaaggacgacgcggtggtgcagccgcagaccttcccgcccttcgaccgcctcggcggcggcgcgtccccggcgtccggtggcctccccggcacctcgtcgggcggcagcagcattccagcgttcagcatgccgggcagcggcagcagcagcctccccggcgggtcgttcccccccccccgcagcggcagcatcggcagcatgcccctcttcagcgatgtctccacaaacttaacagatttcggcggcatgcccggttccccccccgccgcctccgaagccgggggggggggcgggaacgagccctgaaatccgtgcgggggcgngacacattattgatccaacttgtgccctagtactcctttgtctgcattatattggagagttggtattgcgtttcgtttggtgtttgctttgttannnnnnnnnnnnnnnnnnnnnnnnnnnnnnnnnnnnnnnnnnnnnnnnnnnnnnnnnnnnnnnnnnnnnnnnnnnnnnnnnnnnnnnnnnnnnnnnnn

SEQ ID NO: 3494 - DNA, 566 bp, Zea mays
  Probeset Number=SeqID_17897
agcagtggtaacaacgcagagtactttttttttttttttttttttttttttttttatttttttttttttttttttttttttttttttttttttttttttaaaaccacaattcgcaaccattatatatcacaattcacaaccatcataaacaaaaaactttaaattcatcaaggcccggcaaagcccacatatcctttcaaagccccaatcccatctcacatattcaaggctttcgttcaacaaactatagagattcaattcaattcatatgggcccccatacaaaatgggaacaagcccaagtttaaaggcaaagaaacaggcaagggtccccaggccccaaaaccgctacagggattattagaggggggggggctatctgtggcaggggggctgggaggcgaaggaccccacaaaagccattccagggggctccgccccacttgcataaggcggagctggggaaattggaaaaagaaaagggcccaattggggcagcatcgggggcaggggcgggcggcactctggggggggccacccccaagcccggggggggggaaaattctg

SEQ ID NO: 3495 - DNA, 221 bp, Zea mays
  Peptide Sequence Number=SeqID_9733
  Probeset Number=SeqID_17898
tgcagcaccggcacggagcacgcctccctgacggcggccggcgcaccaaaggcgagaaaactgtcagtttggaggaactgcagcgctacttctctggaagcctgaaagatgcggccaagagtctcggtgaacattctgacatgatataacatgcctctctcttcttgtgcagtttgtccgacaacgatgaagcgcatctgcaggcagcacggcatctccag

SEQ ID NO: 3496 - DNA, 493 bp, Zea mays
  misc_feature (465)..(465): n is a, c, g, or t
  misc_feature (469)..(470): n is a, c, g, or t
  Peptide Sequence Number=SeqID_9734
  Probeset Number=SeqID_17899
ccaacataacagggctcagaatacatataaatgggcatttatctgtccagaccattacggtccaacaagggtaatcacactacgacatatatcactagtccacacatataaggcgtagttccttccagttatggaactgcaaggcactactcaatatagccaggaaacagcaagtcatggtgtccaaaacaacaggcagaaaaaaaaacaccatgtaggtgtagaccctaaattagatgcgtaattatattaagcaacagcgcggaggaaaccacacggcagggtcttggaaaatgtttgttcccaaacagctgctgaagcacaagccccagcggatgtttgggcgcccccactgtattcgggagctggcgaaactgtcgcgccacgggccgcagcaggggcagcagagtgatcctgggatgcagcaggaggtgttctttttttttttttttttttttttgaaantttnnccggccggctcgaggtaccaatg

SEQ ID NO: 3497 - DNA, 848 bp, Zea mays
  misc_feature (771)..(771): n is a, c, g, or t
  Probeset Number=SeqID_17900
cctcgaggccggccggaaaatatggaaccacaatggtttaaacatccattggcactgaagtcttgtagaaattagctctgtctgttcccatcaaatccttgttggtgggagcgatgcatttgctaggctgtatgataggagaatgcttccaccattgagctcgtgccaaaccaaaacgaggccgccaccatgtgttaaaatgttctgcccattgcatcttgctaacagtaagacatatttgcaccttacacatgttgcattcagcccaaatgggaaggaggttcttttaagttacagtggtgaacatgtttatctgttcgatgttgacccagataatctgagttcagttagatacacagcagactatgtacgggaacaattatttgtacccccttttcacaaagtaccagcaaaagaacatgcaaaagaaaagaagacttcagtaaatacagctccaagaaatttgtctagggtagatatgtgcaagaaatttatgcaagtcgcaacaagatctctggagacaggcaagaacttaatgctcgggattgaagcatgcagtgaagtccttgaatcaacggaacctgatattgacgatgacacgaggcacgggtttttgtgtactcgagcagcattgtacctaaagaggaagtggaaaaatgatgtgtacatggcgattcgggaatttgtaatagagcgcggaagattgatgccacatcatatcaagcgcacctacatatggctgaggcactattgcagttaggaagactgaanggagcatctgagtatgcagagggcagcaataggcttcttcccccctcatgtcattgagcccagcagtggatgatttc

SEQ ID NO: 3498 - DNA, 1651 bp, Zea mays
  Peptide Sequence Number=SeqID_9735
  Probeset Number=SeqID_17901
taacgacatcactcccacactgcttccacctacgtccataatttccgcaaagtacaaccgagaatgacatgcagtcgtagtatcatggataaccaccttatgtcgtccttcaccatcctactgctttcttcttttgctgcaacggtagcatatcctgctcgcactgaattattgccataccagatgaaaaacccacaaccgaaggatttcccaactgagcaactctaccgcgcctactttgtaatccagcgcttcaagagcaccatcactagcgacccgaagaacgtcaccgccacctggattggtcacgatctctgcggagaaacgacctacgtggggttctactgcggatcgccggcaggaggagataagttgacagtcacaggggtcattttgaatggctatagtctacatgcaccaacgttggaaggtttcgtcgatcagctccctgatctagctcttttccatgctgcttccaacaattttgatggcaacataccccaactaaccggcctagggtacatgtacgagctcagtgtcgccgcaaaagatttgccgccattacagactagcgatatcgatggtatagtgggggggtgaggagcgccgctcacggaaaattttttcactgcataagtgctgattttgacttctcatttaatgtcggaacagataagggtcacaaaattttctgggtttacgcatgccaagggctctccttctcaaccacaacaatttgtccggtccacttccgtcaaacctcggatcctcgaaactgagctaccttgcccctcgccaacaacaaactcaccgggccaatcccgccgtcaatcagtaacctggaagactctctcttcgaggtacttcttctcaacaaccagctctccggctgcctcccccacgagctcggcatgctcaccaaggcggccgtgattgacgccggcatgaaccagctcaccggcccaatcccgtcatctttctcgtgcctaagcagcgtcgagcagctcaacctggccggaaaccgcctctacggacaggtacccgacgcgctctgcaagcttgctgggcccgctggccgcctcgccaacctcacgctgtccggcaactacttcacatcccccgggccggcatgcgcggcgctgatcaaaaacggagtgctggacgtgaaaaacaactgcattccggggctccccaaccaaaggcgccccccggagtgcgcggggttccaaagccaaccaaaaacttgcccggcaacgagcgctcaggtgacatgccccccccccccagcttccaggaacccggcggcgccaggggaaaggaaggtcaaggatttctccagctacgtgacgtacgctactttgcatgattgagcccccctggcatccagtaggagacaaaatcccctgctggctatgtgtttcttgtattcagcatgagtgtaccccagcgtgtgttgttgtgattgtgattgctgtctatttgcattattgtacgtgtgttgctgtcccatttagatcatccccttatttgtacgtccaaatcccttttatggaaagtactgttggtgtttttaaaaaaaaaaaaaaaaaaaaaaaaaaaaaaaaaaaaaaaaaaaaaaaaaaaaaaccaaaaaaaaaaaaaaaaagcggcc

SEQ ID NO: 3499 - DNA, 605 bp, Zea mays
  misc_feature (601)..(605): n is a, c, g, or t
  Peptide Sequence Number=SeqID_9736
  Probeset Number=SeqID_17902
acaaacattctttaccttttcaaaactcaagttttacatgtttcgaaagagtaatatttattacaagtcctgatatactcagagtgcataacttattacaaaagcaggaaggtagaaaccctccaaagcttatacataaacctagctagtccttctccagaactggaaacgccctccagccacaggaactcctagaatacttctcatcacctttgttgcagtgaagaggttctagatccctctacccaaccatcgattagatagctccatcctcttaatgagaagacactggagtagactcctctttagcaaccacttcatcttgaatcttcactctttgtgttgggagctctgagatgattacggaacaagcttcatacgggccagcacgtccttaggacgtccaagccatggcgaggtgggagaactgctggcgcggccactagcacaggggaatggcgtgcgatgaactggagagggctacagagacctgcagactttaggatcaccacccaaagcagtgaaccatggctagactcgaggcaaggaggagagcttcactgaacctgcacctaaggcactgcagatgtaggaaagtgtnnnnn

SEQ ID NO: 3500 - DNA, 749 bp, Zea mays
  Probeset Number=SeqID_17903
aaggagaatactaatcacctcttgttttcctgtgtttctcgacgggtctggtttaaagttttctcccgcctggggtatattgaccccgtgttggggtccccggagcaatcgtttgcagattggtggtgaaaggcttgccaatatctccccaaagaaaaaaaaggaagggcatggcttccatcattatgttgggagcttggatcctatggaagcatcccgatgcctgcgtcttggcaggtttgcagccgaatatgtggagtgtttttttgcatgctcttgaagatgaacaacatctttggtgtctcgctggagtgcaaggactgcagagtttaggcttgggctccctgagcggttaggtggcgtttcctggtctgttcatttctatttgccgtaaaagttttgttcttgtccggagtgcaagcacagcccctcccggctctgtccggagtgagggtaaagtttgtacgggaggccccttttccagtgcttagtataaaaaaggtaatacttgttttcatgaaagccccctaacgaaagttacaggtacaaatttagattgaggagtgatgttgttgactcaataccaaaacagcaatgcattgggttttgagaatcccccattcaaggggttctaatgctccgtttgccccccaatattggaggtcatggaattgaattaggttacaggtttactaatgctccgtttggatgtcgatattggaggtcatggaattgaattaggttgaata

SEQ ID NO: 3501 - DNA, 786 bp, Zea mays
  Peptide Sequence Number=SeqID_9737
  Probeset Number=SeqID_17904
aatgggtacctcgaggccggccggggtctatctcaaaagctcggctcggaatgtctcacaggaagtacgagcacccccgttgcggttcccttggtttcttgccccgcaagcgtgcggcgagacaccgcggaaaggcaaaggctttccccaaggatgaccccaaggcgccggttcacctcaccgccttccttggttacaaggccggtatgactcacgtcgtccgtgacctcgaccgtcccggatccaagatgcacaagaaggaggtcgtcgagtcggccaccgtcatcgagacccctcctatggtcgtcgtcggtgttgtcggttacgtcgagactccccgtggtctccgatccctcaccaccgtttgggccgagcacctttccgacgaggtcaagcgtcgcttctaccgcaactggtaccgctccaagaagaaggccttcaccaagtacgccaagaagcacgccgaatccggacccaagtcctcgatcgcccgcgaactcgagcgcatctcgaagtactgcaccgtcgtccgtgtcctcgcccacactcagatccgcaagaccggcctcgagcaaaagaaggctcacctcatggagatccaagtcaacggaggatccatcgccgacaaggtcgagttcgccaagtcccacttcgagaagaccgtcgacgtcgcgtccgtcttcgagcaagacgagaacattgacgtcattcggtgtcaccaccggtcgcggtttcgagggtgttacccaccgttggggaaacaagaagcttcctcgcaaaacccac

SEQ ID NO: 3502 - DNA, 890 bp, Zea mays
  misc_feature (601)..(890): n is a, c, g, or t
  Peptide Sequence Number=SeqID_9738
  Probeset Number=SeqID_17905
atgggagcagagcagcgtttgaaaaaggatcttagagtgtctagggttgggccaggcgggtctcttaaccccttcttttttctgcccatcggagttatttcccaaggacttgccatggtaagggggagaagggggaagaagcacacttgcccgggcaggtacaacggggagttgtatgctgcgttcgggaaggatgaatcgctcccgaaaaggagtctattgattctctcccaattggttggatcgtaggggcgatgatttacttcacgggcgaggtctctggttcaagtccaggatggcccagctgcgccagggaaaagaatagaagaagcatctgactctttcatgcatactccacttggctcgggggggatatagctcagttggtagagctccgctcttgcaattgggtcgttgcgattacgggttggctgtctaattgtccaggcggtaatgatagtatcttgtacacgaacccgagcttgctgaactcgaggcagggtatccagccgttgcgcagcaggtagtccacctgcttcagcaggtcgtccgtcgacagcggcggcaggtacctcggccgcgaccacgctggataaatggnnnnnnnnnnnnnnnnnnnnnnnnnnnnnnnnnnnnnnnnnnnnnnnnnnnnnnnnnnnnnnnnnnnnnnnnnnnnnnnnnnnnnnnnnnnnnnnnnnnnnnnnnnnnnnnnnnnnnnnnnnnnnnnnnnnnnnnnnnnnnnnnnnnnnnnnnnnnnnnnnnnnnnnnnnnnnnnnnnnnnnnnnnnnnnnnnnnnnnnnnnnnnnnnnnnnnnnnnnnnnnnnnnnnnnnnnnnnnnnnnnnnnnnnnnnnnnnnnnnnnnnnnnnnnnnnnnnnnnnnnnnnnnnnnn

SEQ ID NO: 3503 - DNA, 308 bp, Zea mays
  Peptide Sequence Number=SeqID_9739
  Probeset Number=SeqID_17906
ctgtgcggacgctcgaggccggccggtgcaaaaggagctccttcacgtcactttcttccccatcacgtttttcctctacccaggtcgagctcgccctactgtgcttgcctgtgctcgtcggccatgcctccctgtggctgctccctcgtcgtttcccatagccgctcgcgtcgctcggtcagacatcggcatcctgcgccgttcacagttcactggtcgagtgtaacgccctgaatttagggtagaattttttcttctttaatactcatcaaattcaggcgttactctcttttctcttcccatttcac

SEQ ID NO: 3504 - DNA, 376 bp, Zea mays
  Probeset Number=SeqID_17907
gcatacttgcgatccatatgttgtgcaccgacctcacaattacatgttgtcattaatattcgtttgcagggatccaagtctgggacagttcttagagcaatacttggagctcattaagataaacgaatcgcagattgattggaattcagaggatctgagctaccttggggaggataagttttcaaccaaatttggaaaagaggtggctagtgccactcctctccgtggatcagatgctgtgttgaaagcccacaatatggctgaggatgtaaggatccaatacgacgaccaagaaggttttgagcagatagctagtcaatttggaatattcgaagaatggaaggatggcatcccaagaacggctttctaaggagtg

SEQ ID NO: 3505 - DNA, 396 bp, Zea mays
  Peptide Sequence Number=SeqID_9740
  Probeset Number=SeqID_17908
tattttttggtaggttgcgatcattttttcatcattctggatacctatcttcgtcgtattatatatttcttataatgtctgctatgttcttggttacttgtacagatagggagcattcaaccatcagcgattcggctcaggttcgatgaggcataccattttactctaatctactcttatgggccgtcggatccttagtaggcgaggcggtggtttggttgaccaatatattccccttccgaggagacggcagacaactatgtatttcacttttgaatttctctatgttttatgaatgacaccgacacacatgttacaacttaagtatgaaaatgcaatgagctgtgtgctcctcattaaataaaaacatattaactaaaaaaatgtctaaataaa

SEQ ID NO: 3506 - DNA, 668 bp, Zea mays
  Probeset Number=SeqID_17909
ttttttttttttttttttttttttttttttttttttttttttttttttttttttttttttttttttttggggcaaaaaaaaaccatccaagattttcagccaaataataaacttttggaggaacccccgggggtgggcccatacagtcccagcaaacatatacccttataaaacccacccaaataacaggacaaactgtcccaaacgttaaattgcaacttgaaactagcgcgaaagaaacatgacacattgtttccgaagggaagggaacaatataactagccccagtaccttatacttaaaaaactactgggaaacaggcccggggtccccaaaactttttatttttaaaaaggggaccccaactgacatccaccctgaagggacttttagttggggaagaaaccgcccactgacaccatttttggagctacatgcccaacgaaaaaaaaataatagggcccgggcggagcgcctaaaaacacgggattcgagttggtttaattaaccctttggggcagcgttgaaaacctcgtaaaattcatccccataaaacggccgaaagataaatcatcctccactccctttttgccccaaaaaaggggggcaatcccaaacctaaaagcagcctttgtcatgcttaaaaaaccaccttgctcaaaagaaat

SEQ ID NO: 3507 - DNA, 995 bp, Zea mays
  misc_feature (1)..(383): n is a, c, g, or t
  misc_feature (991)..(995): n is a, c, g, or t
  Peptide Sequence Number=SeqID_9741
  Probeset Number=SeqID_17910
nnnnnnnnnnnnnnnnnnnnnnnnnnnnnnnnnnnnnnnnnnnnnnnnnnnnnnnnnnnnnnnnnnnnnnnnnnnnnnnnnnnnnnnnnnnnnnnnnnnnnnnnnnnnnnnnnnnnnnnnnnnnnnnnnnnnnnnnnnnnnnnnnnnnnnnnnnnnnnnnnnnnnnnnnnnnnnnnnnnnnnnnnnnnnnnnnnnnnnnnnnnnnnnnnnnnnnnnnnnnnnnnnnnnnnnnnnnnnnnnnnnnnnnnnnnnnnnnnnnnnnnnnnnnnnnnnnnnnnnnnnnnnnnnnnnnnnnnnnnnnnnnnnnnnnnnnnnnnnnnnnnnnnnnnnnnnnnnnnnnnnnnnnnnnnnnnnnnnnnnnnnnnnnnnnnnnnnnnnnnnnntggcacgttcaagcttaccttgctgcttacagaccattaccggagcctacctacaactgagcgatttgtttctaggatggttcatacaaatatatatgcatgacggaagcgtctgtttggatattctacagaaccagcggagtcctatatatgatgttgccgcaatgttaacttctatccagtccctgctgtgtgatccaaacccaaactcccctgcaaactcagaagcagcaagactgttcagcgagaacaagcgggagtacaaccgcaaagtccgtgagatcgtggagcagagctggacagccgactagtgtgcataaggatgctcgtcgtgcccgataggggcacaataagaaagcgtgaaaaaaaaacacccccactccttgtgtttctggttcgtcaggcttgtcgaaacattgaagaaccccagtgattggtttgtagtctgtcgtcgtcgttctgccccgatcaagagccccggttgctcatggtggtggctgtcgtaatgtagcggttgttgacctatcttctcatgaattgaaaggatcctgccctatgtacaaaaattatagcgtgggaatggttgtttgatggaccgtgttgctctnnnnn

SEQ ID NO: 3508 - DNA, 1006 bp, Zea mays
  misc_feature (947)..(1006): n is a, c, g, or t
  Peptide Sequence Number=SeqID_9742
  Probeset Number=SeqID_17911
ggaggagctaacttgccaattgccattgcactgcgcgcgcgcgcctcgcatccgccgccagcaggtgccaccgccatctctgctctctctctctctctcaagcaacgcccgccatggcgaccatagccacgatggccctgctgaagcccgccaggatcgtggcgcggtcggcgccgccgtccaccagcggcagcgtctcgctgcgcgtcccggcgcgggccaagaaggccgcggtgtccgcgtccgtgtcgtccgcgctggcgggcgccttcttctcggcgctggcgtcgtcggacgcggcgctggcggcgcagcgcgtggcggacgtggcggcggcggccgactccgggagcgacaggcccgggcagttgctgcacctcctcgcctagcctgccactgccagcaggtgccaccgtcatctctgctctgctctcgcaacgcaagcacacgcccggccgcctgccacagttgccatggcgaccatagccacgatggcgctgctgaagcccgccgccaaggccgcggcgcggtcggcgccgtccaccagcagcggcagcgtctcgctgcgcgtaccggggcaggccgccaagaaggctgcggtgtccgcgtccgcgtcgtccacgctggcgggcgccttcttcgcggcgctggcgtcgtcgcccgacgctgcgctggcggacgtcgtggcggcggcggacgccggcggcgacagccgcggccagctgctgctcgtcgtcgtggcgcccgccatcgggtgggtgctgtacaacatcctgcagccggcgctgaaccagctgaaccgcatgcgcagcagccaggccgtggccgccggcctgggcctcggcgccgccgcctccgccggcatggggatggaagccccgcccgactcctccgccgccgcggggcatgacctcgcgatgaccgcaggtccgagtgcacccgaccannnnnnnnnnnnnnnnnnnnnnnnnnnnnnnnnnnnnnnnnnnnnnnnnnnnnnnnnnnn

SEQ ID NO: 3509 - DNA, 651 bp, Zea mays
  misc_feature (601)..(651): n is a, c, g, or t
  Peptide Sequence Number=SeqID_9743
  Probeset Number=SeqID_17912
tcctttccccgccgccatgcccgctccgtgtgcgcctccgtctccatggcctccccgtccccatcgccacagcccacggcggccggcgtgccgaagcactgcttccggcgcggcgccgacggctacctgtactgcgagggagtgagggtggaagacgcgatggcggctgccgagcgcagccccttctatctctacagcaagcttcagatcctccgcaacttcgccgcttaccgcgacgctctccaggggctccgctccattgtcgggtatgccgtgaaggccaacaacaacctccccgtgctacgcgtcctgcgtgagcttggctgcggcgtcgtcctcgtcagcggcagcgagctccgactcgccctccaggcgggattcgaccggcgtcttccaccttggagtttgtttcttcggctatatctagcttatccggttcagcaacagtcttcggagtcgtccccctcaaattttgttttgtttcttttttttccttttgtttggtcggctttgtgattttactatcaatcttttctgtcgctcagatccatagcctccccctttccgttcgatctttgttcttgttgcctcctctgatccnnnnnnnnnnnnnnnnnnnnnnnnnnnnnnnnnnnnnnnnnnnnnnnnnnn

SEQ ID NO: 3510 - DNA, 577 bp, Zea mays
  Peptide Sequence Number=SeqID_9744
  Probeset Number=SeqID_17913
ggatgggctttccggtcggcaaggcccccaaaaactacaaggtgtttttcccccccatgttcgccctcgagtcggagaacaaggacgcccagctttttaactgggtgcaaagggggcccccaaactctttaaagtggatgcccgttttttttgtcaaactgctgctgggcggttttcagcaccccaccattccccccggtttggggggcatttacatcgttgcgaggttttttttcttcaaaggatacccccccggcgtttcgggcaaccgtttcaaaattgggggggtccactacttggcgttgcttgggctgatcatttgcccagcatcttttggcatcaacctgctcatcagggagatgcttttaactttggggttatatgtgagcccccggctgggttaacccccccagtttctcatggtttgagcctaaaaacttttttatactagtcgtttgggggtttaaaatggaggtatcgtttctttctttgtctgggggttgaataaccaaaaaagtgtgggtttgcgttttaaaactgtgatggaataaaaggagaccaatgggtttaagcgctg

SEQ ID NO: 3511 - DNA, 319 bp, Zea mays
  Peptide Sequence Number=SeqID_9745
  Probeset Number=SeqID_17914
gtagtttcatttagcccttaccaatctctcccagaatgggacctgctgagaccttctttgagtcattgtgacgccggagttcagtaagcgttggacctctgtcgtgtgatgcctcccctggagggagtctgattacttggcatgttggacgtgccgtggacgttcaaggccgattccccccggtatgatgctatttgctcaatggaaaccgtccatgttatcgttaccgggtttgtttaaggaaccagagctcttcttctgtggaactgtgttatcccactagcacctccggtaatgtacctgtgccgttccccatgat

SEQ ID NO: 3512 - DNA, 1219 bp, Zea mays
  Probeset Number=SeqID_17915
ggaccctcgaggccggccgggccgggaagcgaagaggagagttctctccttgcctatttatcccccgactacagacccccgcgcctacgtagttggtgtgatctgtcgacccgacctcgccggacgatccgccatggttgtgttcgcctcccgtttgtgggcatgtccgatgacaatgacgtccctgcctcatgcacctgtgtatgatcactgtgatatgtcggccctgacttcatcggtatatgctaccccattattccgaaaaccacttggtccaattactttgcctgcatatgtgattgacattaatattcaggagggcacgcattctgcattactcctggctgatgtattcgtgctccctccatgtgagcatggagatttgacaatagaaccaaagcatgaggatttgccaatatatccagtgcgtgatgagtcctatacaaacagcgttgataaggaaagtaattgtgctggtgataacgatgatgactggtgtcctcgtattcacctgcaagaatactcgatgactgtatagcatgaaaatctagctgacgacagcgacttgcctactgccagtgaagctactccaccagattcccagcctacagacataaatgctcaccgcatagcaagatcataggacatgcaaggctgatcgtactcgcgaaagatggcgcaaacacacgaccacggatctatttcctcatgatcgatggagtgtcttcactctgctcagttgtggcagctggtaatgttgtgggttttgttgtaatgggtcagaggtgacagcaggaccattggcacattcatcaatttaagttcagtgtcaccggtgagagcataaatggagtcattggagcactcagtcgtttgaagcatgggcttgctgggagtgagcaactaaaataaatgctgctgcctcgagtactcccacaacaaccgttgagcgcttgagttcatgcaccaaattttggtgggctgcttctagtgtcaatttttgttgcttatatgatcctgagaaagttaaatactttttcaatgtgttggttgattttatgttactgtaaattagtggtctagacttctcacggtgctgttctttaaaacatagcaaccgtgaagggtcatggtggaaacacagagggcaggtataacaatatgtatccaaaaacaacaagaaaaacaattaatataaaaaaaaacaagagaagtagat

SEQ ID NO: 3513 - DNA, 408 bp, Zea mays
  Peptide Sequence Number=SeqID_9746
  Probeset Number=SeqID_17916
tattacattacaacagcatatagtgagtcgtattaaaaccagcagcctcccttgaaagccagcacatccaaactaagaaccgacagacctcagccctcaggcaagccgaccgccgacgtaccaccgcgccaacccgagagaaagagggggaggatcatgacgatcgctcatcgccgcgctcctcgtagtcgccgtcgcggccaccgcagtgctggcctcccaccgaggccgccgccgccggcgccccagccgactccgactcatccgtatcagcaggtacccgtcacaggtgcaccgaggcgtctgccgcaagaacaggttcaggatcagggctggcagcacactatgtcctccaaactctcacgctggatttagtcgcgatcgtcgtcttgctattggctcagttcc

SEQ ID NO: 3514 - DNA, 695 bp, Zea mays
  misc_feature (1)..(94): n is a, c, g, or t
  misc_feature (695)..(695): n is a, c, g, or t
  Peptide Sequence Number=SeqID_9747
  Probeset Number=SeqID_17917
nnnnnnnnnnnnnnnnnnnnnnnnnnnnnnnnnnnnnnnnnnnnnnnnnnnnnnnnnnnnnnnnnnnnnnnnnnnnnnnnnnnnnnnnnnnnnncacccacccacctccgccgctgcagaatagaaattgcggcattgcctccggcttgagcagaagatcatctgggtgttggagtcatccagaggcacaagctgaggaatggggcaaaaggactccaagccttcacatggatatggctgcgctgcttatgattacgggagtgcttcatcgggatacacctcgagaaacactgggaattcgtcctccagttatagcgtcaggtacgcgccttcttcggagaacagtgtacagccggagacacatgccaggttgcagaggaagtattccaagatcggggatgactaccgttctttgagccaggtgactgaagctttggcacaggcaggccttgaatcttcaaatcttattgtaggcatgtgattttacaaagagcaatgaatggacagggaaaatttccttcaatgcgccgctgcctgcatggttttggaaacactccggacccatgatgagcaagctgtatctatgggggggaggacactttcagcatttgatgaagataatttgattccctgcttcggatttggtgacgcgtcaactcatgatcaggaggtatttagcttttaccccgagaacn

SEQ ID NO: 3515 - DNA, 1068 bp, Zea mays
  misc_feature (1)..(2): n is a, c, g, or t
  misc_feature (1068)..(1068): n is a, c, g, or t
  Peptide Sequence Number=SeqID_9748
  Probeset Number=SeqID_17918
nnggccgggatctcccacctcgatccctgcactgcaagcaacaaagttctactctttccacccgtccatctagctcccaagaaccaatccgtaccagcgctatatccggcggtccggcctgccatggcggcggcgggccggctctccctgcccctcgtcctgctggtcgtcctggccgtcgccggccgcgcggcggcgcaggactacgacttcttctacctcgtgctgcagtggccgggggcctactgcgacaccaagcagagctgctgctaccccaagtccggcaagccggcggcggacttcgggatccacggcctctggcccaaccgcgacgacggcacgtacccgcagaactgcagccccgacaacgccttcaacccgtcgaaggtgcatcatctccacacgcggatccttccccttcccctctttctctcgcgccgccccgcatgtgtttgatcatgccgcggcggcgtgttctgggtttcatccgcgtgccaagtgccaacacgtacgtacgtcttttgcatcgtgtcctcacgcacgacgtacgttacggtttaaggttgttggcgcttttgctggtcattcggcgaggtcttttctgttctgctagtcgccgctgggcccccccgaccaactgggagtcctcggggcgctccccccccccggggtcaagcccgacggcgggttctaccccctgagccagatcaagggccccatcccccagggccccggcttcgagccctacgtggagggcaaccccgacgaggccggcaacaaccagctctaccagctctacttttgggtcgacccccccggcgacaactttgtcgactgccccgtcccccccaacggcaggccctgcggcaaccggatccaccccccgcctttttgagctaaccccctcttcccgccagttgctgcaaaaaactctgctagcccctttgcttgccttctatgcaaaaggataatggaatgtttaaaaaaaaaaaaaaaaaaaaaaaaaacaaaaaaaaaaaaaaaaaaaaaaaaaaaaaacccaataaaaaaaaaaaaaaaaaagcggcn

SEQ ID NO: 3516 - DNA, 650 bp, Zea mays
  misc_feature (601)..(650): n is a, c, g, or t
  Peptide Sequence Number=SeqID_9749
  Probeset Number=SeqID_17919
acccacaccaagagcaaaatcatacgccacgccttgtgagttctgtccaaggctgtgacagttcagattgtaaggatgaagcttgggagccgaagccgaaggacaggaggattcagcgaagccctcaaggaacaaagatcaaagctttatatcatctcgcggtgtgttgttatgctgatccggtggcatgactgacgaagaacattttttcttttgctattgaattttgtttccttttcacagttcttggtgttttttttctgctactcctactaaacagatcgggaaattgtatatatagctagaggcagaccgttgtagcagccaacatattatgaagtcaattcagatcaaaaaaaaaaaaaaaagcccagtcaccagggcgcatcctcctccccacccgtcgacggccaccacccgccggtgcgcctcagtgcgcaaacaaaaaggaagaaaaatacctgttgtttgtggccggagtgcacagggtgcgtggccagagtggagggctgactctgacgcaaattagcaggatccggcggcgttgaactacgcctgtaccagttcacgcaagagaagatgtcaacacagtgccggccannnnnnnnnnnnnnnnnnnnnnnnnnnnnnnnnnnnnnnnnnnnnnnnnn

SEQ ID NO: 3517 - DNA, 755 bp, Zea mays
  misc_feature (653)..(653): n is a, c, g, or t
  Probeset Number=SeqID_17920
gtaacaatgaaaatcatgcaagccttacaaaataatttagaagcaaaagcaaaacaatacaaggatcctgcattgatgcacatatttttgatgaataacattcactatattgtcaaatctgtccgcaggtatgttcttataccaagtaatgctaggaagaaagtaacaatagtgtgtgtactaccttatactctcttttctgtcactcagatcagaggccaaagatttgttgggtgatgactggattcaaatgcaccgaaggattgtacaacaaaatgccaatcagtataggaggattgcttgggcgaaggtatccatgctctggatctctggttatttttccttggatattgatatctttccttttttttaggattactcgacctcactaaatagatattctcactagacactacctacatgtccaaacacatttgaagtaggcttccagatacattgttggtcataaacttagcacctctgatgcataatggaattgacctaatcattgcaacaactgccatgtagtatctagtacttgttcctgactgagtaggcaattgtttaggcataagattatatcgggatgtaggattcttgcaggaaacaccacctggcctgtttgtacatgcaatacgataatatcacttggnaaaatgaaactagtagatatccatgtgggacaaccttatttggtctgatgttacaggtgttgcaatgcctctctggtcagggtttgacttcatcaggtggta

SEQ ID NO: 3518 - DNA, 500 bp, Zea mays
  misc_feature (120)..(120): n is a, c, g, or t
  Peptide Sequence Number=SeqID_9750
  Probeset Number=SeqID_17921
tgggtaccccgaggtcggccggggaagcacacacccgccgctgtttcttcatcttgctcctgctcgcacccaggcggcggcgacggcggacggcggcggccttcatgctcgggctctcancgacgggatcagggggctcccgcctctcgccagtggcgtggcgccctcgcctccgggcctctgcgcaccgtgcggggaccttgtgtggtgagtgtttccagcgctgcgtgcggggggggggctcaattagaaaacctcaaatgctgtgcctgagcgccaaatcaagaccctaccaattcagggaggccggacagagggcgatggccggagggctggccaatggggagtcacagggcgcggcctcacaggagctaccaaggggctggggcgggggctccggacatgggcattgcggaaggatggggtcttgccatggaagcttcctggggatcttaaattctttaaagaggttacactaactacatcggagcctggcaaaa

SEQ ID NO: 3519 - DNA, 533 bp, Zea mays
  Peptide Sequence Number=SeqID_9751
  Probeset Number=SeqID_17922
gactagttctagacctcgagctctactcacataccactgcatgggtgttggggttcttgtattcctgctagtgatgaccctctcccacatccaccaagtctactctgtctagagcatcaagcgccagtgatgaccacgctcacaattcttcaccccaccatagctagaacgttctagggagttgctggtctgtatgaagcttgttccgtaatcatctcagaactcctaccagaaggagtgaagattcaagctgaagtggtgactgaagaggaatctactccagtggctgctgatcaagtggaggagccatctaactggtgtttaatagagggatcgagtacctcttcactgcaataaggagaagttttattcccctatctttgggttagttacttcttgtggagaacttgaagcttagaaggtttttatatatctctttggaaaggcttcacccttccaattattgtagttaagttatgcacttcgagtagtatcaggacttgtaataattacaattcttcttatattgtaaa

SEQ ID NO: 3520 - DNA, 270 bp, Zea mays
  misc_feature (252)..(252): n is a, c, g, or t
  Probeset Number=SeqID_17923
ccgccggcgccggcctactccgcccgacgcccctcctcccccaccggcgagcgtccgcccgacgtaccttatgtcccgcaccgccgcccaacgtccgggtcgcccccacgtatccatgccttaggtgccggctagcccctaggcaaggcgggacccctccgcccagaggcgcgcccaggcgagcgcggaagcgcgcctatatcatgggggggggggggcccttccctcattttcctttcttctttttttctntttttccccttttccctt

SEQ ID NO: 3521 - DNA, 917 bp, Zea mays
  misc_feature (7)..(7): n is a, c, g, or t
  misc_feature (30)..(31): n is a, c, g, or t
  misc_feature (41)..(41): n is a, c, g, or t
  misc_feature (46)..(46): n is a, c, g, or t
  misc_feature (48)..(48): n is a, c, g, or t
  misc_feature (59)..(59): n is a, c, g, or t
  misc_feature (64)..(64): n is a, c, g, or t
  Peptide Sequence Number=SeqID_9752
  Probeset Number=SeqID_17924
aagaaancaaagaagcaggggaaccccccnnaacacagccngagcnanatgaggacatngggancaggccaccgaagggattttttttttttggggaacctggaacaggggagggggggggcgcaaaggctgttgccaattctacttcagcaacgttcttgcgtgttgttgggagtgaattgatccaaaagtaccttggtgatggtcccaagcttgttagaggattgttcagggtggctgatgatctttctccttccattgtctttattgatgagattgatcctgttgggacacagaggtccgatgctcgttctggtggcgagcgtgagattcacagaaccatgttgcagttgttaaatcagctggatggttttgattcgagaggacatgttagagttgttctagcggcggatcgtattgggagtctggatccagccttgcttcggcccgggtcgaattgccttttttattttattccctttacctgatgtcaagactagtttttgtatcttccagatacacacatcgaaaatgaccctggttgatgatgtaaacctagtatagtttattatgtcaaaagatcacttttcaggtggtgacatcaaggttttttgttctgaaggtggcttgcctgctttgagagaccggaggatggaggttttgcataaagtcttctagaaggccttagcaaaggttttgttcaagaggaaagaaggcgccccggatggcttatatatgtgaaaatcatttttttttatattagtcttagtgatttaaatggggtttgtaatctgcttaatggtcaaaaaatgtttgcttccagcatttattttggttgaaacaacacactcaaaaaaaaagttctccccattatgagaacttgaaatatatgaaatggcaaacaagaagtcaagacc

SEQ ID NO: 3522 - DNA, 790 bp, Zea mays
  misc_feature (1)..(89): n is a, c, g, or t
  misc_feature (690)..(790): n is a, c, g, or t
  Peptide Sequence Number=SeqID_9753
  Probeset Number=SeqID_17925
nnnnnnnnnnnnnnnnnnnnnnnnnnnnnnnnnnnnnnnnnnnnnnnnnnnnnnnnnnnnnnnnnnnnnnnnnnnnnnnnnnnnnnnnngcgacatttttacaacaacggtagagtgtggccttgttgttattcgacggcgccttctcctcggcttacgtgctcttacgactatcgttttcgggccacctgcgtgcaccgtcatgaatcgcgtggagagaccacaggcggtcctgtcgcgcgaccgtgctgtgctcgttagagccggtggatacattaccggcataaaggttggagtggcgattggcagaatgcatcaacaaaattatcaaccggatgatcggaatcatcctccagggcataggaattttatgctataaacaccgattcccaagcccttattaattcacaagcgcattatcctgtgcaaattggagagcagttgacccgcggcttaggtgccggtggaaatccgattttgggagagcaggctgctgaggaatcaagagaaaccatagccactgccctgagggattcagatcttgtcttcataacagctgggatgggagggggtactggatctggtgctgctccagttgttgcccagatatcaaaggaagctggttatcttactgttggtgttgtcacctatccattcagtttcgagggccgtaagcgctctgtacaggcnnnnnnnnnnnnnnnnnnnnnnnnnnnnnnnnnnnnnnnnnnnnnnnnnnnnnnnnnnnnnnnnnnnnnnnnnnnnnnnnnnnnnnnnnnnnnnnnnnnnn

SEQ ID NO: 3523 - DNA, 734 bp, Zea mays
  Peptide Sequence Number=SeqID_9754
  Probeset Number=SeqID_17926
cgagccaagtgatagatggctcaagcgcctgcagctcggcgtaccagaccctgacgtccctggttccaagaggccaaaagtcggagacagtcctccgccacccaggcaaagaagccgttggtttgacgtggcactcccttgcaaccgggctggcagtgacactggagcgatcgatcgtggtaaggaggagcagagcttggatggaggggggaaagtgcagggaagagctcccccgattccagagaagagcgtcagtcgctggatagggagatggtgccagggcggcactcctgttttccgtgaaggcccaggccaccaggcaaggcagccaccccaaccctcctggccggttgtccgaggagcttgaaggacagttctttccaagccctgcggcgatggcgatgatggggcgcgcgatgcccaagctccggccgtgcgagcagcagcagaaggggcccttcgtggtgtggaagatagattggcctttttgggtgtcatatacctgtttctttaaaaattaaacaaaataaaatgtaaggcaactgtgcattttgcctggctgtggttcatggtttattgctttaatttctggtagtggaagtagctaggtatagtgtctactgatgatgtaatgatttgctgtaccaaaagtgtaatactacactgtttactgtgtcgttcgttatggtgatgtacaccatggagtcctcgaatgggcccgacgaatgaactgg

SEQ ID NO: 3524 - DNA, 1050 bp, Zea mays
  Peptide Sequence Number=SeqID_9755
  Probeset Number=SeqID_17927
attgggtacctcgaggccggccgggatcgcaatcagcaacacaaagccctgcgtcattaccagcaacaccgagagcgagagcgagagagagagagagagatagaaagatggcagcaccggtgcagacgacagccacgacgcctcaggtccctgctgctgcggtagtcacgtcggtgttccagccagggaagcttgcggtcgaggtgatcacagtggatcacgatgcacagccaacaccgccgatcccgatcctgatcgctgctcccaaggatgccggaacctaccccgtcgccatgctactgcacggcttcttcctccagaaccgctactacgagcagctcctcaagcatgttgcctcttttggcttcatcatggtcgcaccacagttccacaccagcctcatatccaatagcgacaacaacgacatcgcggcggcagccaaggcgacggactggctccccgagggcctgccatccgtcctcccgacaggcgtcgaggccgacctttccaagcttgtcttggcgggccacagccgaggtggccacacggccttctccctggccctggggtacgccaagatcagcagcagcctgagcttctccgcgctcatcgggctcgaccccgtcgccggcacgggcaagaactcgcaactcccgccggcgatcctcacctacgcgccctcgtctttcgacatcgccatgccggtgctggtcatcgggaccgggctgggcgacgagagggagaacgtgctgttcccgccctgcgcccccgtggatgtgaaccacaccgagttctatcgcgagtgcagggctccgtgctaccacctggtgaccaaaaactatggccacctcgacatgttggacgacgacgctcccaagcttgtcacctgcctctgcaaggaagggaacagctgctaggacgtgatgaggaggaccgtcgccggtatcatggtggccttcttgaaggccgtcatgggcgaggaggatggtgatctcaaggccatactcacagaccctgggctcgcaccaaccactctggaccctgtcgagt

SEQ ID NO: 3525 - DNA, 412 bp, Zea mays
  Peptide Sequence Number=SeqID_9756
  Probeset Number=SeqID_17928
tctgcaagcagcacagctaatgatatagggaactgccaaagctcaaatggaggggccacgtatggacttgctgataacaaggtatcacagacatttgttgaggtagaagttggcaatttgatgagaaaaacaagtaccagtaagggtataaatcctacatggaacagtacattcaacatggtacttcatggagagacaggcattgccaagtttcttctgtatgaattggattctggcggtgtcaaattcaattacttgacaagctgtgagataaaggacactgatgcagtaatgtaaacaggtaaagtatgttcatgatggtttaacatctggtcgatgatgcaaagcatactgatgcatcgaggacaaaataaaggaatgggatgctatattgagaggatataacatggca

SEQ ID NO: 3526 - DNA, 436 bp, Zea mays
  Peptide Sequence Number=SeqID_9757
  Probeset Number=SeqID_17929
aataaacatctgaaaaaggcaggtgttcctctagtaagtgatgggataacaaaacaattgcattacaggtttcaaacttgcattatatattccgcggtatcagatctgaccaaattgtcaggcatcaccaaacaaatcgaactgtgagagctcgcacatgtctaaaaacaacacgggtatcaagtacgaagcatatttggttgccattctcggtgattcggccagacgatatcgtagccatcggccaacgtacacaaatactcactgcacaggtctttgtccgttctactacgcggtaagaccgctccaactactagtattgtctactccagtgagaggaaagatgagtaccattggcttggcgattcctctctgtagatacgagtcctatatcaagtgatagccttcttatcgggtgaaccagaagactggggag

SEQ ID NO: 3527 - DNA, 497 bp, Zea mays
  Probeset Number=SeqID_17930
gacgcggactgttgtcccggctattatacgcagcttccatcgctgcgaagctatccattcgtgatcgtcatggccagcaacgcaccgtggaaaacctcacccccaaggtcttaaaatgtgagtttgcagtccgtggggagattgtgatgcatgctcatcgcctgcagcaacaactacaaacacaaccagggtctcttccttttgatgagatcctctatagcaatattgagaatccccaatctctagatcagcaacctgggacattcttcagggaggctcttgctctttgcgatgcatccgagcctcttggaaaaagaggagaccaaatcatagtagagcgctgatgcaatttctcgagcaaagcagattcttgcaactattcactgaaaggcaacatgtgcctatacatacagcccgggtatcaaaggactgactcacacaattgctgctggaatcatgtcacgtgaaggattccctgcttatgcagatgacatttt

SEQ ID NO: 3528 - DNA, 341 bp, Zea mays
  Peptide Sequence Number=SeqID_9758
  Probeset Number=SeqID_17931
gctcggaattcggctcgagtgtccggttgccttgtttcctcgtcatgcacactgaatctaaaacggaaggaaagaagcctaccactagtctgcacagggttttgatagcagacaccgtctgtctccttttaagttttaacagcacattacaaggattggaggtagagctaggaagtggtaactaactccattccccatctcatcggctttggagctctcgtgctgccgtcagttgaccatccatgttgaaaagactagctgcgagattttcaccagcacgagctagatgtacggtagaacaaccgggcgcccgactactagtgaggtatccatccggggaa

SEQ ID NO: 3529 - DNA, 867 bp, Zea mays
  misc_feature (785)..(867): n is a, c, g, or t
  Probeset Number=SeqID_17932
ggttgccaagattttacttagttcgatgtgggagcaaaaggatatgccaaattgaatgtagtttcattagttatgctcaattatggatgttcagaggcatccaatttcagtgtgtactgcaatacttgggtccacctgtacttgtcactctccgacagctcatcgccgcctggttctcccgccggtacacaaggtttaagaagcactccgcagacttccacggtcgcgccgccgatctcgtccatggcctccggggcacggcgatgcccatgagacaggccctcaaggaagagcaatgtagagaagagaaaggtatctcgactgttccaaagcacaagtatgcatccaaagcctgttccccaaaaggatcgaaaggagctccaacctgaaccagcgagagtatcgatgctaacactgtgtgaaatcttctagaaatgacatcgaatggaacttcaaactgatcaagcgaaagcatctatacgaagactgtctaaaatcttctaggaacgacatcgaaaggaatttccagctgaacaagcgatagcatctatacaaagactgtctgaaatcttctagaaaaacctaaaccctatcgggaatggagacgctctcggcgaagcagtagggcacagtggacgtgaagctgaagccgacttccaaccaatccaactcgtagacgggcggaaatcggatgtgccaactagaagagtggtctctctcggcgcttgcttgacaaacgtgtgttattaaccgttgtatataatgttattaattaatgttctttnnnnnnnnnnnnnnnnnnnnnnnnnnnnnnnnnnnnnnnnnnnnnnnnnnnnnnnnnnnnnnnnnnnnnnnnnnnnnnnnnnn

SEQ ID NO: 3530 - DNA, 379 bp, Zea mays
  Peptide Sequence Number=SeqID_9759
  Probeset Number=SeqID_17933
gtgctgccctgctgcctgctttggcttgggctgctgctggggccggtcggctgcgacgtccccacgccaagtgagcctctgccatgcatggccgtccgtgacttccacactgccccgctgattcctctcttggtcttgggtgctgactatgccatgacgatcgcaggaagcctgcgcctggggagccaccagctgcacccggcgccggatatgaagctcagctactctcatgtactggcaattggctgtttccgtcaggacacgacggcgatcgcggcggcgatgatgaaaaacacgggcaggccgacggcgagggtggacgtggaggtgaacgactaccagccgtccggccccaacaaccgccacgacccacccaagg

SEQ ID NO: 3531 - DNA, 456 bp, Zea mays
  Peptide Sequence Number=SeqID_9760
  Probeset Number=SeqID_17934
caaagttcagccaaagtcacccggatatcatagcagtccttgcaccaatggaactgagattatttctatattctttggcccctgaatgtgcttcaaatgccaccagcagccccattttgccagtgttatgtatcaggagaaggacgccctcctggtagctcatgtgtcccattttcccacccagcccaagatgtatgaccctgtttctttgcctgaactaagctgcctggcctggtaggattgagtagacccggaatattctcaaacaggtttggtggactaggtctctttcctggttgtacatttaatataaggtctcttttaagggtatttagggataggcttttcctgaagagttgtctctctcttaactatatttatattatgtagttttttagttgtcttttgtactactagaaaaaacgatctctaaattataccatcttcgttttcgaa

SEQ ID NO: 3532 - DNA, 516 bp, Zea mays
  Probeset Number=SeqID_17935
ccacaaaaaaaaaaccaagaaacaaaacacaaaacccaaaccaacgaaccactcaccgcgcaccccgtccaaggagaacagctcgacgccacgcagtgatcaatccccaagagccaagcgtgtgagtcccgctgcatcgtttcttcccagacaagacgccgccttcaactccgcaactgatgattcattgataaccggccgcccccgcattgttcattatattaggtcgacgtctgcgggcgcgtgcgggggatccatccaaatctctcactctgctattgtttctgtacgtccaagattataatgatactcataatcacctcgtcgcaactttcgcgtgaaaaaaaaaaaaatcaaaaaaataataaaaaaataacatgcaaatcaaataaaaacataaccttaaaattaataaaaatatgttcactcatcctctaactatgggggggtctttctataggatccaagttttttttccccgggctttgggaagtcatattttttttattgggcccc

SEQ ID NO: 3533 - DNA, 469 bp, Zea mays
  Peptide Sequence Number=SeqID_9761
  Probeset Number=SeqID_17936
aatctgtcattaattaggccagcgccgagtgcttccaagaacggttggagtttatcttctgcgccaaaggccaaagcaccaaaggacgtgaatccggtaacagattttgaaggcgatgatgaggaaaacaaaagggagtaggaatgtcctgtcgatttggttaggggagggtatattctgagatcatttgaagtgggtgctagagcagttttggtacttaagagaggactggccattctaattactaccagtggagcacgccccttgcggctgttagttcttcgcatgggtggttagttgtgttgttatccccatagtctgaatgatggttatgatagagaaaaaaaactagtcaggtgtataatatttatagtaatggccccccattgcttctggttcctgtgggctcgacacccgttatgaatgtcagagcctcccctgtcgataggatcaattagtctgaaggaag

SEQ ID NO: 3534 - DNA, 1396 bp, Zea mays
  misc_feature (1)..(591): n is a, c, g, or t
  misc_feature (1192)..(1396): n is a, c, g, or t
  Peptide Sequence Number=SeqID_9762
  Probeset Number=SeqID_17937
nnnnnnnnnnnnnnnnnnnnnnnnnnnnnnnnnnnnnnnnnnnnnnnnnnnnnnnnnnnnnnnnnnnnnnnnnnnnnnnnnnnnnnnnnnnnnnnnnnnnnnnnnnnnnnnnnnnnnnnnnnnnnnnnnnnnnnnnnnnnnnnnnnnnnnnnnnnnnnnnnnnnnnnnnnnnnnnnnnnnnnnnnnnnnnnnnnnnnnnnnnnnnnnnnnnnnnnnnnnnnnnnnnnnnnnnnnnnnnnnnnnnnnnnnnnnnnnnnnnnnnnnnnnnnnnnnnnnnnnnnnnnnnnnnnnnnnnnnnnnnnnnnnnnnnnnnnnnnnnnnnnnnnnnnnnnnnnnnnnnnnnnnnnnnnnnnnnnnnnnnnnnnnnnnnnnnnnnnnnnnnnnnnnnnnnnnnnnnnnnnnnnnnnnnnnnnnnnnnnnnnnnnnnnnnnnnnnnnnnnnnnnnnnnnnnnnnnnnnnnnnnnnnnnnnnnnnnnnnnnnnnnnnnnnnnnnnnnnnnnnnnnnnnnnnnnnnnnnnnnnnnnnnnnnnnnnnnnnnnnnnnnnnnnnnnnnnnnnnnnnnnnnnnnnnnnnnnnnnnnnnnnnnnnnnngaaacgggtgacgatagaatatcgaactgtgctggggttcctcgaggcccgcccggcaacgacatcagtagagctgtctcctcatcgcctgcaagagatcgagcggttctttgaagattataagaagaatgtgaataaacaggattgctgtcgatgcattcttgcctgcgaccacagctcgagagcccgttcactactccatggatctgtatgcgcagtatattttgcaaagcttgaggcagtacattgaaagcaactatttatctgggcgtcttgcaatgaggtgactttaatcagttcaagcaattgacatcgggtcccctacatgatcgtgaatttgaaactgccactgtagcatatgtcttgaagtctaaagggaatagtgctgatggatcttggctctggtgcaccacagaggatagcgtctatgacgctgtcaaatctatgactcaccacaacgtgggagctttggtggttgtcaaacctggacagaataaatcaatcgctggcattgtcactgatagagattatctccggaaaatcatactgcagcgaaggtcttccacgccaactaactgttgacgacctcatgactgaagannnnnnnnnnnnnnnnnnnnnnnnnnnnnnnnnnnnnnnnnnnnnnnnnnnnnnnnnnnnnnnnnnnnnnnnnnnnnnnnnnnnnnnnnnnnnnnnnnnnnnnnnnnnnnnnnnnnnnnnnnnnnnnnnnnnnnnnnnnnnnnnnnnnnnnnnnnnnnnnnnnnnnnnnnnnnnnnnnnnnnnnnnnnnnnnnnnnnnnnnnnnn

SEQ ID NO: 3535 - DNA, 829 bp, Zea mays
  misc_feature (763)..(763): n is a, c, g, or t
  misc_feature (784)..(784): n is a, c, g, or t
  Peptide Sequence Number=SeqID_9763
  Probeset Number=SeqID_17938
ggacgcgtgggcggacgcgtgggccccccgcggccggccgggacaagccttccccaaaggtcttgcacccttgggcttggtaggtcaccgtgaatgatgcactatggaaaatgccttttgatgaattgctcccgctattcactgttgatggtgatgatggcagctatgcacaaacagatgcactggacttagcgcgactgcaaggactatcacaaagaattcatattggtaaatatgttgctgaagcgacgtcaaagacgctcctcaggatatatactccactaatataacacaaggacagcaattctctgatggatatgctgacattctaggctgctggaacagaaggtcaagaagacagcacagaagaaggctacgacgctcgggcagaacgtcaccttggatgacaatgccactgctggagacagcgagtgcaaggtcgatcccaaagtgctctccaagctgtatgatcagagggtgatgccactgaccaaggatgaccaagtctagtatctcctgcgccgcctctactgatcagtgatcacccgattatctgaaactgctaactttatgtacgcgtggaatacagcttgctttgcacatgccctcttatggctctatcgttcacaactccactacgagagaacgataccaggatctggcctacgcctttgtcagcctgcctggccgtcatctgcatgagtagtcccactgtaagtgacgctcggcatggaatgcaagaaaaggaataccactgggtccncatggtatctttaaaaaaaanacaaagaaaaaaaaaaaaagcgaatcctccagctccaacttatgt

SEQ ID NO: 3536 - DNA, 1740 bp, Zea mays
  misc_feature (1)..(130): n is a, c, g, or t
  misc_feature (1698)..(1740): n is a, c, g, or t
  Peptide Sequence Number=SeqID_9764
  Probeset Number=SeqID_17939
nnnnnnnnnnnnnnnnnnnnnnnnnnnnnnnnnnnnnnnnnnnnnnnnnnnnnnnnnnnnnnnnnnnnnnnnnnnnnnnnnnnnnnnnnnnnnnnnnnnnnnnnnnnnnnnnnnnnnnnnnnnnnnnnnnagagagaaagagaacagagcgagagaggggggaggacgacgctccgtgcccctccgcgtcgtctcctgctgttccatcccacatctattctgcctcggcttgcaccttcgacctcgctgaaagttctgacctcaaactgaaaggggcctgtgaagcgtttccttgcggcagtgcaatggaggtatttggcaaatctgtgattgctgagcccagcaatgtgattttcttgtccgcaatccttaacacaggaaagatcaaatccctaagtcacaagtgctgaccaagaggtgccagaacgagaacatttttgggatcatgtacccgatgcaaactgactgaaaccacctcacatctgtgacaaaaactgtaaccaagagaatcctctatgacaatcattactcgctctgccgagtgagtggccagttttttccgctctctccattggagcagcaagcagtgagggatatccgcaggaagcacgaatgcgacagcaatcatgcccgtccctaagcgcgcactcttggtgcactactgtatccttactcctttgagaggccacactcaccagtgtctccaatcctgagccagggcgagaagtattgtcttagtttgtgctgacgagactccttttcttcactctttcacctaccaatgtctatccttatagcttatgaacatctctggttctattttcatcgtcgggtaacaagaaactaatcagggagtctcttcccatttcttgcagtggaggaatgtttagctacagccgcgcagcatgctttccagagcataaattggtggaagagaagtttgatgctaccactttgccagaagaaccgagccagacacaataacatcaaactgagtctgagatactgcactttacaaattctttcgatattggcagattgaagaccaacaagatttgaagagcagcaagatcagcttgcacctgcagtttgaagaaatcctttcaaagaagactgcttgcggcaatcttgccttcactccacaagcatgtgctgtgttatgcgtaccatgtaatgattgtagtacttgacaactgataccaaagtagtggatgcttttctttcgcatgaagtcatgttgatttttgtacgttctaacagcgtctccatcaatatcctattgaatctcccatatctaaaaaaaaaaaaaaccctttttccctttggattacaggatggaactataagagattccttctttgtagacttttataagggatataagactccttaaatgccccgaaaaaatgtctatgtagtttctattctgtttcatgggaccctgttgtaactcgtgaactttgattgagcacctattcggatttagtagcacgttcagaaaatcattcgctgcttatcttttttcacacttccgagttagttattttgtgtgtttttttactttgtgttcaactaagtttccttctaattttgattctttaatgcaatttattataattgaggtgtacatttgtccatcaatgtaaatatgtgaaagattctttggctgtaatccaggcacagggaactgactgcctnnnnnnnnnnnnnnnnnnnnnnnnnnnnnnnnnnnnnnnnnnn

SEQ ID NO: 3537 - DNA, 854 bp, Zea mays
  misc_feature (1)..(253): n is a, c, g, or t
  misc_feature (519)..(519): n is a, c, g, or t
  misc_feature (538)..(539): n is a, c, g, or t
  misc_feature (564)..(565): n is a, c, g, or t
  misc_feature (609)..(610): n is a, c, g, or t
  misc_feature (624)..(625): n is a, c, g, or t
  misc_feature (641)..(641): n is a, c, g, or t
  misc_feature (663)..(664): n is a, c, g, or t
  misc_feature (854)..(854): n is a, c, g, or t
  Peptide Sequence Number=SeqID_9765
  Probeset Number=SeqID_17940
nnnnnnnnnnnnnnnnnnnnnnnnnnnnnnnnnnnnnnnnnnnnnnnnnnnnnnnnnnnnnnnnnnnnnnnnnnnnnnnnnnnnnnnnnnnnnnnnnnnnnnnnnnnnnnnnnnnnnnnnnnnnnnnnnnnnnnnnnnnnnnnnnnnnnnnnnnnnnnnnnnnnnnnnnnnnnnnnnnnnnnnnnnnnnnnnnnnnnnnnnnnnnnnnnnnnnnnnnnnnnnnnnnnnnnnnnnnnnnnnnnnnnnnnnnnnncagcgaagttgttccgcagaagctcctccgaaagagggtgagtttccagaattctcttttcggcgtcatctcttcgtcccacgcccaccaggacaccggccgtctgctctcgaaaggcctcgctcccactgccggtccgaatttggccgtcatcgactttccctcatcatgggtagacatatcaggtctgccctgtagaaccgggatggatacgtccgcaggggtaagctctgtgccggcctatccgtccggtcgtatgggccgtnagcttctcggacttaggtnngcaaagtaagttcggctatcaagcnnctagccaaggtcctgaccagttgggaggtgccctgagattgatnngaggtggagcttanntcagagacggtgatcnatattcttctcgtcaggtgatnngaatgggtgccagatgttgcacataattatggcctaaacaataagtgagccagctgtggtgctcttattgcaatttgacatgatatgggaaaacatgcccctgtgaccctgtgtgcatgtccccatttaaactgaagtgtagcttatgatggttttgaagctgtaggatgcatccagcttggaaatgaan

SEQ ID NO: 3538 - DNA, 629 bp, Zea mays
  misc_feature (148)..(148): n is a, c, g, or t
  Peptide Sequence Number=SeqID_9766
  Probeset Number=SeqID_17941
ccggccgggaaacttacgctcgcgctgctgggagaggagatctctggtgcagcactgagagccaagcgctgagcctgcactgcttccgtacacacgggagcttttcgaataaacatgatcaacacatggcagccctttcatatcacangagctggacacgcccctgctctctactccaaagatatgatcataattggttcgcttctttgatatcggcgagtgcgcgtgggtgcccggcgagcgagccacgggtcttccctgatggcctcttcccagctggtggaaagtcagacatagacggcatatttccaccaccctacttcgagtggatgcagttcattaaggaattcactgaatacacacatctggaccagagcgtttcatatctatgtgattacatggagaaaaacgggcctttcgatggcctgctcggattctgccatgtaaaaatggaaaccagaagtcacttttactgagcacctgaccattgacgcatcctatattctttggaattgctgttttcttccccgagttcatgtattgcgcgatcatatccgcctgcaaactagaattgaggaccatacttggatatgaaatgatgaaatgcaatgaactacactctgtgagct

SEQ ID NO: 3539 - DNA, 209 bp, Zea mays
  Peptide Sequence Number=SeqID_9767
  Probeset Number=SeqID_17942
atgcagctgtgactgactctgctatggcacaagctggtgcagttgaccctgacttagtgttggctcttcaaatgtctgtccaggatgcaaacatgtccagtgacactgatatgagtaaggtgtttgaagacagaacgtttgtgtcatcaaacattaaaaccatatgtattattcttaaactaatggcatacaggtacattttagctgca

SEQ ID NO: 3540 - DNA, 1330 bp, Zea mays
  misc_feature (1)..(211): n is a, c, g, or t
  Peptide Sequence Number=SeqID_9768
  Probeset Number=SeqID_17943
nnnnnnnnnnnnnnnnnnnnnnnnnnnnnnnnnnnnnnnnnnnnnnnnnnnnnnnnnnnnnnnnnnnnnnnnnnnnnnnnnnnnnnnnnnnnnnnnnnnnnnnnnnnnnnnnnnnnnnnnnnnnnnnnnnnnnnnnnnnnnnnnnnnnnnnnnnnnnnnnnnnnnnnnnnnnnnnnnnnnnnnnnnnnnnnnnnnnnnnnnnnnnnnnnnnaatcctcctcagctgcactcaaatctgaagttcgttcagctctttagaagagaaacaaagctaatttcagaagtcgaatactacctgactaacctcatttcagcagagatgtttataatagatgttagtgctcactcgccctcaatggaggaaagggagtttcagaaacatatggaatcgacaagactagctactcaagtatctattgcaagcccaagtagctcacaggggcttcccacatctgcaagggcaaatcaggaggaaacttatatggcaggtacggatgagggatatccgtggtcaagtttgatgcttcaggaccaatatcgttgtgtgtcgttgctggtggtatctgaatgggggtaaagatatagagagggatttttttcttcaaatgatgatttatcgttgcgtgtcgatgctggtgttatttgaatgggggtatgcggtcggtgctcgtgcgacacagacccacgattttccttggacgccggccgcatgtccgtcagtgacatgggcttttcttgggatgagccctgtgcgtcgtgggacggctgaaacgtgtaacaaagagtctcaagttctatagatcttcacttcccctgcttgttctacattttacgatcctgattgatatttctttttatcatattagggccgagatgtatatatactgggttccgcaaatgttggaaaatctgcatttatcagtgcaatgctaaaaataaaaccaagatagttcttcttgacttgttgcggaactcaccgtactcgagatcaaagttgcaggcagacacgatcaagaacattgtgaccaatattgcttcccaaatagatggtgaagaccgtggcggcaaagcgaagaagatgcttgtcgagatggtgaaagtcaacatggagcaaagcatgaggcatgtgtgacaattggggttgggaggaaatgacaaatgatattaggcacatcatcaccccttagggaatgagaacaacaacataagtgggacaatacctcctgaactggagaacctgactaaccttatcagttgtatattgtcttttttcgttagagaataaagatatccaaaaaacctaaaaaaaaaaaaaaaaaggggggggaag

SEQ ID NO: 3541 - DNA, 607 bp, Zea mays
  Peptide Sequence Number=SeqID_9769
  Probeset Number=SeqID_17944
gcaggcatgggtgcctcggtgaaccctttgcctacctgcagatcaaggcaatttggacgcccctacttaggaacttttagttcgagctggtatccccattcccaaaaaacgactggaaccccatggtggttggcatcaagggcgaggttatggttaactacaaaaggcggaagctttccgtggacaactaaaattgtggccccagtctttaaaagcttgcttcttgttgattcaattgttttcccatgtttgtcagcatttgttcagtgcaagtttttctgtacgcaaaccacccttgttaggggtgtttttgttgtttaggatttttaaatttggttccctatggggcccccatgatttgcaaattttgcatgttcagcttcctgggtaagcattcccctatgtcaaatttgtaacttgtagcatttataagcctgtgggttttttgttcaaatcctgatgtttatcattgttttagatggatgtaaaccccaacataacaaataacctaatgaataaactcaggtgttcagtggtaaaaaaaaaaaaaaaaaaaaaaaaaaaaaaaaaaaaaaaaaaaaaaaaaaaaaaaaaactcgagaggggg

SEQ ID NO: 3542 - DNA, 893 bp, Zea mays
  Peptide Sequence Number=SeqID_9770
  Probeset Number=SeqID_17945
taatgctcatataaggctcacgctcacccgtgggaaaaagtgacatctggaatgagtcctggtttcaatctttatgggtgcgccttgattgtgcttgcagagtggaaaccgccagtgtatgataactctcatggaataaaattggttaccgccaccacacgtcgaaattctccaaatagtgtagactccaagatacatcacaacaatcttatcaacaatattctggcaaagatagaaggtaatcttgcccaggctgaggatgccattatgctagacaaggatggctttgtatcagaaacaaatgcaacaaacatttttatggttaaaaagggaattgtattgacacctcatgctgactattgccttccaggcattacgcgagcaactgtcatggatcttgtggtgaaagaaaactttgtgttacatgaacgacgcattagtctgtcagaatttcatgctgcagatgaggtatggacaactggaacaatgggtgaaattactccggttgtaatgattgacgggcgagaaatcggcgatgggaaaattggtccagtcactagacaaatccagaacgcatacaaagtcctgacagcagggcaaggagtaccgataccgaggattgctgaggtgtaattgtcgaagatgcatcccttatctagctaggatcagtcccccaaggagcctgatgataccaatctagcacaacaataaattaataatctccatttatcactgttgtttaaaggcaccatgtggagcataataataaattaataataatctccatttattatcactattgtttaaaggaaccatgtaatcattgttattccaaacaggatgtatacttctggagattataaacgcaataagtcattgcactggtatgcgct

SEQ ID NO: 3543 - DNA, 2143 bp, Zea mays
  Peptide Sequence Number=SeqID_9771
  Probeset Number=SeqID_17946
ccgggctctgcacccaatctctcttctcggttaccttgcattgagctggagtctaggagcattgtttgagcttcactaccgccacctacatatctcaattccgtcacaatgcaaagagctttcgcttcgcgggcgcggacttcggccctaaattcgacctctaagcttcgcacgaccagcttgagcctccagcaacagagatttgcgcacaaggagcttaagtttggcgtcgaggcacgagcaggactgctcaagggtgtcgacacactggcaaaggccgtgtcaacaacactcggtcccaagggtcgcaacgtattgattgagtcaagctatggctctcccaagattaccaaggatggtgtaactgtcgcaaaggccattacccaagacaagttcgaaaaccttggagcccgcctgcttcaggatgttgccagcaagaccaacgaagctgctggtgacgggaccactaccgctaccgtccttgcccgcgccatcttctccgagactgttaagaacgttgccgccggatgcaacccaatggacctgaggcggggtactcaggccgccgtcgaggccgttgtcgactacctcaaggcaaacaagagggacattaccaccagcgaggagattgcacaggtcgccactatctctgccaatggtgacacgcacattggcaagctcctgtccaacgcaatggagaaggttggaaaggagggtgtcatcaccgtcaaggagggtaagactaccgaggatgagctggaggtcaccgagggtatgaagttcgaccgtggttacatctccccttacttcatcaccgacaccaagactgccaaggttgagtttgagaagcctctcatcctcctttccgagaagaagatttctgctgtccaggacattgtccccgcgcttgaggcttcccagcagctccgccgccctcttgttatcattgctgaggacattgacggcgaagcgcttgctgtctgcatcctcaacaagctccgtggtcagcttcaagttgccgctgtcaaggcccctggtttcggtgacaacaggaagtccatccttggcgatcttgctgtcttgaccaacggtactgtcttcagcgacgatcttgacatcaagctcgagaaggctactccggatatgctgggttctaccgggtccatcaccatcaccaaggaggacactgtcattctgaacggtgagggcagcaaggaccaggtctcgcagcgttgtgagcagatccgtggtgtcatcaacgacccgaccacatccgagtacgagaaggagaagctgcaggagcgtcttgccaagctctctggtggtgttgccgtcatcaaggtcggtggctcctccgaggttgaggttggcgagaagaaggaccgcatcgttgacgccctcaatgccacccgtgccgctgtcgaggagggaattctgcctggtggtggtaccggtctcctcaaggcttccgccaacgctctcgactcggtcaaggcgcataacttcgaccagcaacttggcataaccattgtcaagaacgctattacccaccctgcccgcaagatcgtcgagaacgccggtgctgagggctctgtcattgtcggcaagctcatcgacgaacacaagaacgacttcaacaagggattcaacagcgccaagggcgagtacgtcgacatgattgctgctggtattctggaccccttcaaggttgtccgcactgcccttgtcgatgccagcggtgttgcctcactcctcggtaccactgaggttgccattgtcgaggcacccgaggagaaggccggtcctccaggcggcatgcctggcggtatgggaggaatgggcggaatgggtggaatgggtttctaagcagctgaagcctgaccgtctattttcttcttcttatacccccatttcgttattatgactttagtcttacgtctctcccagtgatggcttatgtacgcgatattgagttggtctccgctcctcagtcacggtttttttctcaaaagcacggcatattggttatttgatgtttttttgtacaatactgtgtatctagaagacgtcctgggaagggcgagatgtaaaaagcgacgaaggaaatgtgagccagttcaaagaaaaaaaaaaaaaaaaaagc

SEQ ID NO: 3544 - DNA, 630 bp, Zea mays
  misc_feature (601)..(630): n is a, c, g, or t
  Peptide Sequence Number=SeqID_9772
  Probeset Number=SeqID_17947
ctgcagcatctctagttctttccacaaactcttctccagaaccaccactggaaggcggatatgactgcggtctcgtaccaggacatgtagcatcttgggtttctgactgtcgccgctttattctccacattatggggtattcagtggaagataccggtcctgttgcctgtatatcttggacgcctgacaattgtgctcttgcagttgggtggaaatttaggggacttactgtatggtctgtgtctggatgtcgattgatgtgtactattcgtcaaactggttcaaattctgcctcatctcctatggtgaaacctagcgctctaaaatttgagcctcttatgggaggaacatcacacattcaatgggatgataatggatataagttatttgctgtcgaagaaagcttgtcagaaagggttcttgctttctcatttgccaaatgttgcccaaacagagggctttcaggcacaacatattcccaccaggttctttatggggaagatcgaatccttttggtgcaaccggatgatgccgatgaactgaagatattgcatcttaatgttccagttaagtgttaacttctttgcctttgatttatttnnnnnnnnnnnnnnnnnnnnnnnnnnnnnn

SEQ ID NO: 3545 - DNA, 591 bp, Zea mays
  Peptide Sequence Number=SeqID_9773
  Probeset Number=SeqID_17948
gtgacttcgccgcggctcctcactagctatgctgcgcgtggtggaccgggctaccgaagtaaccactaatgcaatgcgcaagcaggtgagagccgggacatgagctacctgagcccgtacctggaggccgtgaggctccgacttcacgggcggcgccaacttcgccatctccggctcctgcacgctgccccgcaacgtccccttcgcgctccacgtccagggccagcagttcctccacctgaagcagcgctcgctcgacctcgccgcccacggcgggacggctcccggcgacgccgacggcttccgggacgcgctctacctgattttctttttccagaacgacctgtccggcgcattcgggagcggagcgccctacgacgacgtgggccaccacaggatcccggggtatcggactctgtactacaacggggccaagaacttggtgggtccacgggaccagggcctgtgggctggttgccccagaagctgggcgggccgaggcccggcgacagcggcctggggtacagcgggtgagtgaagaccctggaacgacggggcctgacgaggcaacgagcaggtgggcgccggctg

SEQ ID NO: 3546 - DNA, 686 bp, Zea mays
  misc_feature (1)..(56): n is a, c, g, or t
  misc_feature (686)..(686): n is a, c, g, or t
  Peptide Sequence Number=SeqID_9774
  Probeset Number=SeqID_17949
nnnnnnnnnnnnnnnnnnnnnnnnnnnnnnnnnnnnnnnnnnnnnnnnnnnnnnnncacaccactccgcgctagctgaggacggtacagcggcacagagcgacgacgacgacacaggcgccacacatggaatcccagttctccgccgccgtgccccggttccacggcctccggggctaccccgcgcccaggtccccggtgggggggctgccctccctgagggggggcaggaaaaagtcctcctcccagggaatccgctgggaataaattggttccgccaccaacctgattatggggaccaccaccaccctgatggtgttcccgggaaggttcgggttggggccctcggcaaaccccaaggggaagggggggtttaaactggaggggcgcgaatcccgcctgcaaaagggggacccccccgggtttaccctcccccacaccctggcctggggggccgtcggccacatcctcggggtgggaatcggggtcgggttcaaaaacaccggcgccttcgaccagatcattggatagatccctacgtccccgttgttaagatcagactcaacagctttgattgtgcccccggccggcagcaggtgccaggtggtgactttgtaacgtgtgtgcgtgcgtgtaacattgcatccatcttggttccaatggacaaaaagctcctgttgctccttn

SEQ ID NO: 3547 - DNA, 630 bp, Zea mays
  misc_feature (22)..(22): n is a, c, g, or t
  misc_feature (41)..(41): n is a, c, g, or t
  misc_feature (214)..(214): n is a, c, g, or t
  Peptide Sequence Number=SeqID_9775
  Probeset Number=SeqID_17950
ccccgcgtccgtatacctctgntaggggtatatcaaggaanaaacatcatcttgatatacctctatcagaggtggaagtatccggtcgacaagaagcgtgttaacgagtttggcttcgggggcgaggacgaaccggcagcccaggaggctgtggaaggaagtgattcagctgcagcaccccagctaacggaggccgggtccgagacgagtacgngagggacaagaaaaccaagtgatctccaatcttttgatcatccaaatacaagcatacatctctgcaacatctgccttcccagcgggcgtgaaatgccttttgctgtatctggatgctggactcttgcggtcttgccttaccgagacgtgctgaccatcagataaggcgtgtaacaaggtgacacgatagtctttcgtctagagcagcgggcgaacaggcgcacactgtcacacttacgtgtccggttcagtcttttagcacctcattactagtgcgatatgctcagtttgattggtgtcggagtacaatattttgttgcatgttgtcttataacacacactaatttggcggctcgcgaggtgctagataagcaacgacactcgtgcatgtatttgatgacgcttgaactcaactgt

SEQ ID NO: 3548 - DNA, 643 bp, Zea mays
  Peptide Sequence Number=SeqID_9776
  Probeset Number=SeqID_17951
gtaccctccgaggtccgggcccgggccgggctctctccccccactacaccaaacccaacaggacggttgcagtgagcatctgcgcaccaccgttcaaagatggtgaagttactcaagcccggtaagtccgttatccttctgcagggccggtttgccgccctgaaggccgtgatcgtgcgcgttttcgaggagggcacccgtgatcgttcctactgccactgtcttgacgggggccttgcctagtacctcctaagatggtgatccgctgggactccgtcatgaagacgtgcaacaaggcctgcgtcttgtgctccataaagctcgcaaacttcacgcacctcatgcccacccggtacaccctcgacgattacttaaaggtcttcgtatctggcggacccgactcgctcttcacccgggacaagactgtcgaattctgcaatgacggcaaggctcgcctctaggagaggctcaagaccggcaagaacaggtggatttttaccaaactgcgtttatagacgtggggccgccctcatagcgtatgatctagctgtcaatattcatgggcctgacaccctttaaggtttctgaggatagctattttcattaatgctcattgcttgacatatatcctgatgaggatttt

SEQ ID NO: 3549 - DNA, 729 bp, Zea mays
  Peptide Sequence Number=SeqID_9777
  Probeset Number=SeqID_17952
cattgggaccctcgaggccccccccgcgccccgcaggaactcccacctagtccattccaccgacataaaaatggctgacgctcctgctcccgctcgcggcggattcggatctcgtggagaccgtggtggtgaccgtggccgtggccgcggccgtggacgtggtcgccgtggcggcaagtccgaggagaaggaatggcagcccgtcaccaagctcggccgtctcgtaaaggccggcaagatcaagagcatggaggagatctacctccactctctccccatcaaggagtaccagatcgtcgacttcttccttcccaagctgaaggacgaggttatgaagatcaagcccgtccagaagcagacccctgccggtcagcgtacccgcttcaaggccatcgttgtcatcggtgactcccagggccacattggtctcggtatcaagacctccaaggaagtcgcgaccgccatccgcgctgccatcatcatcgccaagctcgccggtgtccccatccgtcgtgggtactgggggaccaacctcggtgagcctcactcgctccccaccaaggagtccggcaagtgcggttccgtcaccgtccgtctcatccccgcccccccccggtaccgggtctcgttgcctcgcccgctgtcaagcgtctcttgcagttgggctggtgtccaggatgcttacaccgcgtccactggttccaccaagactcttgagaacacactgga

SEQ ID NO: 3550 - DNA, 640 bp, Zea mays
  misc_feature (1)..(39): n is a, c, g, or t
  misc_feature (640)..(640): n is a, c, g, or t
  Peptide Sequence Number=SeqID_9778
  Probeset Number=SeqID_17953
nnnnnnnnnnnnnnnnnnnnnnnnnnnnnnnnnnnnnnncggacgagcgaatctactgtcggtcgcggcgccgttttctcgctctcgcgctcgccttctgggatgggatgggaccgcacgcacacggccatccttctcctctcctctcttcacctaccgattctcttgctctgcgcgcatagaagaggcactccttcattgtcagctgcctttcgcatgtcggcatgcatgcatcttgcccgacaccacgctggcccgtgggtagtcgccgcacgccgagcaccggcaggctgcgcagccgtcgaccatgaatttgccaagaaggcaccgatcacataacctcatccatggagtagaagaactcgttggcgagaagcatgatctcctacctaggctcctcgctcgttgcaggcaatcaaacggttcaagtcaatgtacaggaaggtggcctttagctggagatctctcctgaccagatcccacaagtcaccatccagatcagtcaaatgccgagctcttgatccgacaggtgcatcccttgacccattggtgctcctgacagcctcctctgcagctctgctatatcttcttgcagctgcaaatgacaaaggatcagaaccaatgatttggacgtattttn

SEQ ID NO: 3551 - DNA, 1346 bp, Zea mays
  Probeset Number=SeqID_17954
aaaagggatgatgatagatgtataccttttgcttcattcattgcttaatgtgtgctcgtagaaatgtagagtctatgtgataccacaacatgatgggttttgagacatttcatacaacaacaacaacatagccttttagtcccaagcaagttggggtaggctagagttgaaacccaacaagttatcaccaaaaggataaagagagagaaaggggaggggaaaagcttttgagagcactaaaagggaaaaggcctaatcacggttcgggcacgtggatagcttctttccaagcacttctatccaaacacaactcccattgggatattccattccttcaagtcccttttgattgcctcctcccatgtcaagtttggtcgacctctacctctcttcacattattgtcccgtcttatgatgcctctgtgcaccggtgcctctgagggtctccggtggacatgcccaaaccatctcaaccggtgttgaataagcttttcttcaattggcgctactcctagccgatcgcgtatgtcatcgtttctcactcggtccaatcttgtgtgcccacatatccaacgcaacatacacatctctgcgacacttagttgttggatatgtcgtctcttagtaggccaacactcaagccccatataacatagcaggcctaattgttgtcatgtaaaacttgcctttcaacttctgtggcactctcttgttgcataggactctcgatgcttgacgccatttcatccaccccgctttgattctatggctaacatcttcatcaatatcaccatctctctgtagcatcgatcccaaataacggaaggtgtccttctttggtactacctggcctcccaaacttacatctccatcctcactaattgtagtaccaaagtcatatctcatatactcggttatggtactgctaattctaaatcattttgactccagtgtctcacgccataactctagctttctatttactccttcctggctttcatctacatatatcaatagagaaggatgagttcaaacatgaaatcttggctcttgcaaggcaccaggtccttgcctcgtttttcgcaaaggctttactgagtggaatgctgctgttgaaaaatgaaaaatcatagcattgcgtcccttctagagcttccataccaccaggattgccaacaaccaaatgacttaggcatgctctcagcgtttaaatggacacagattgaaaggaagcccagcatgacggtcagggaaccctccctcagtccaagtcctcactgcagaccaaactaagttagctgtattgactctgcaagcaagtgtacaactgattcacctctaactca

SEQ ID NO: 3552 - DNA, 560 bp, Zea mays
  Peptide Sequence Number=SeqID_9779
  Probeset Number=SeqID_17955
gactctagagatccccctgcggcggcgttggtctctggcgggatagagggaggagggaagaggagaggggagggaggagggaagaggagagggggagggcgcacacccatagcagatttggttacggcggttgagtgctggtgcggtggtgacttgagtgtttgcggcggctgcgggaagattaaaaaggggtcggtcgccttacctcgccttgccgccttaacaactatgttattgtgtccaatcacacatttgagctctgctaagactaaactcaagtccattgagtctcagcttaatgaagccctcaatgctagcgatgctagatcaactattgggtctgaatctgcttcagtaatttcttccccaaagataacagaatcaactgctgactcatcttcagtgacgaaaaggcttgaggaggaattggcaaaaagggatgcccttattgagcaagtgtgacctgttaatttctgactgttccatgtttaacttttgttttgctatcttcaactacaagtttagaaatctcctcacactgcaagtcgactataggggat

SEQ ID NO: 3553 - DNA, 736 bp, Zea mays
  Peptide Sequence Number=SeqID_9780
  Probeset Number=SeqID_17956
ggtactctcatctcagtagcattgtcgcaaaaagaagagttgcagctgaatctgacctctctcaatgagcagcatggtgaatccaaagcttttggagacaatgcaagtcagaagattattgagcttgaagcgcaaatacaagcaatgtgtgcagctgaagaggcgctcaacctagagctaaaagaagctgaggcaagtgtcaaagctgctgagaagaaaggctcagtcctcgagcagcagctcagtgagattgagaatgaattagttgcatcaagtgaagaaatagagttgctgaaagagcgtattcaacaagaagctgctgtatcagcagaaagaggaatgcagcttgaagaagcaatgcccagcgcagagggatgcaaagaaagaattaacgagctacaatgctccctagattcctcgatgtctaaaagccagctacttgaacaagagagttaaggagcggacttgataaatgttcatgagcatcacggacacgcagcgtcatctcagttcgacgcaacagaacgtctgcagcatggagagatcgtgcttcacgtcatcaaagactccgatgctgaatggtgcatactctcggactcaggagctggagcaggagctgaacagcacatatgaaaagctcaagggggttgaagaagaacttgagcagtacctgcccggccgcccgaagggcggaattccacacactgggggccgttactaatgggatcccgagctc

SEQ ID NO: 3554 - DNA, 327 bp, Zea mays
  Peptide Sequence Number=SeqID_9781
  Probeset Number=SeqID_17957
aaaaaatgatgttagtaggtaccaatctccgggtcttggtgggtatgggtcaagtaacaggttctagcactagttcgtcattattctttatccccccagcgcaccttgtatcgattcctgggtcattattgtacaagtcagcaagtttcctgctctgtgtgcttacgggcaggggatcatttcactagtcagcaagttctatacattgaatgcttccgggcagggatctggtagattatcctgcatcccaattcccagtacccagacttcggggtccaatttgctttgacaaacaatgaaatcggaaatcgtgcatgttaacaaaaa

SEQ ID NO: 3555 - DNA, 851 bp, Zea mays
  Probeset Number=SeqID_17958
caagatcctagaccgccgccgccgcgcccagcgccacgcggcggggcccgtccccacgccatactgtacgcgctagttgcaggctctactccgggagggatggcctaccacgaccctgacaagttgaagaagtacgatctggaggacctgaggaagaccccgaaccctttctacctcgagtcggacaagaaggctggcaacgggtacagttttgtgaggacaccgtcgccggcacccggcgtggacgagtcgccgttcatgacgtggggtgagatcgacggaacgccgctgaggctggaccccgacgagacgccgggcggcagcgagagagcgcatttcaagatgccaccacctcctgctcgcgacgtcaaggcgcacttccttgcgggcgtcgccgcccggaaagtaaaggagcggtctaagcccttccataggccgcccctaccctcccctgcgaggggtgtcagcgcgagccctacgaccctttcgccggccgcgcaagaattcgtcaggaacgccatctcccagtcgccagagtcctccagcgccattcacgcatctctccgcgcaagctacagaggctcggccccgtccgcgagcactcccaagtcaaggttttcgagacaccctggccgtcgcatcgcgttctccatccacaaggcagggttccgcccctcccatggtgagcggtgtgcgagtcgttagtaagcctcttaactgtatatttcgatacaatggtgtaggcggcccaatcctgttctgtaacccattgcataatgatggaagatagtaaatcatcaagtgatgcttatttttctaaaaaaaaaaaaaacaactcgaggggggcgccc

SEQ ID NO: 3556 - DNA, 1337 bp, Zea mays
  misc_feature (1)..(119): n is a, c, g, or t
  misc_feature (831)..(1337): n is a, c, g, or t
  Peptide Sequence Number=SeqID_9782
  Probeset Number=SeqID_17959
nnnnnnnnnnnnnnnnnnnnnnnnnnnnnnnnnnnnnnnnnnnnnnnnnnnnnnnnnnnnnnnnnnnnnnnnnnnnnnnnnnnnnnnnnnnnnnnnnnnnnnnnnnnnnnnnnnnnnnnatgggtggtgtctccgccgccgtctcgaagaccgctgccgcccccatcgagcgtgtcaagctcctcatccagaaccaggatgagatgcttaagaccggtcgtctcgaccgcaagtacgacggtatcgccgagtgcttccgccgtacttcccagcaggagggtgtcctgtcgctctggcgtggaaacactgccaacgtcatccgttacttccctacccaggccctcaactttgcgttccgtgacacctacaagtccatgttcgctttcaagaaggagcgtgacggttacgccaagtggatggccggtaacttggcctccggtggtgccgctggtgccacttccctcctcttcgtctactccctcgactacgcccgtacccgtcttgccaacgatgccaagaacgctaagaagggtggtgaccgtcagttcaacggtctcgtcgatgtctacaagaagaccctcgcctccgacggtattgccggtctctaccgtggtttcatgccctccgttctctggtatcgtcgtctaccgtggtctgtacttcggtatgtacgactcgatcaagcctgtcctcctcactggtaacctcttgagggtaacttcttggcctctttcgctctcggcttgggccgtcaccactggtgccggtatcgcctctttaccccctcgacaccatccgtcgtcgcatgatgatgacctctggtgaggccgnnnnnnnnnnnnnnnnnnnnnnnnnnnnnnnnnnnnnnnnnnnnnnnnnnnnnnnnnnnnnnnnnnnnnnnnnnnnnnnnnnnnnnnnnnnnnnnnnnnnnnnnnnnnnnnnnnnnnnnnnnnnnnnnnnnnnnnnnnnnnnnnnnnnnnnnnnnnnnnnnnnnnnnnnnnnnnnnnnnnnnnnnnnnnnnnnnnnnnnnnnnnnnnnnnnnnnnnnnnnnnnnnnnnnnnnnnnnnnnnnnnnnnnnnnnnnnnnnnnnnnnnnnnnnnnnnnnnnnnnnnnnnnnnnnnnnnnnnnnnnnnnnnnnnnnnnnnnnnnnnnnnnnnnnnnnnnnnnnnnnnnnnnnnnnnnnnnnnnnnnnnnnnnnnnnnnnnnnnnnnnnnnnnnnnnnnnnnnnnnnnnnnnnnnnnnnnnnnnnnnnnnnnnnnnnnnnnnnnnnnnnnnnnnnnnnnnnnnnnnnnnnnnnnnnnnnnnnnnnnnnnnnnnnnnnnnnnnnnnnnnnnnnn

SEQ ID NO: 3557 - DNA, 749 bp, Zea mays
  misc_feature (1)..(148): n is a, c, g, or t
  misc_feature (749)..(749): n is a, c, g, or t
  Peptide Sequence Number=SeqID_9783
  Probeset Number=SeqID_17960
nnnnnnnnnnnnnnnnnnnnnnnnnnnnnnnnnnnnnnnnnnnnnnnnnnnnnnnnnnnnnnnnnnnnnnnnnnnnnnnnnnnnnnnnnnnnnnnnnnnnnnnnnnnnnnnnnnnnnnnnnnnnnnnnnnnnnnnnnnnnnnnnnnnnccagcagccacacccgcagcaggctccgcccccgaatcagcagcagccggcgcttccttcctccacggacgcgctaccgctgcctgtggatggccatattccagctcctgtcgccttcttcaacccgccgcctgccttgccggagcaaccagcccagacaatgctagtacatgacgtgcgcctgacggcagctgctggccttggaggtacgcactccatggaggaagaactgattggacaaaactcccggacggctctgatatattttctgaagaagggatcggaggtatagacggagttgaggctgactctggaggatcggagacacgatggtggagtggctgggaactcctccgaggattcagcgatgatcctgatgtccatgctgcaacaggatattgctggccaggctcgaagcttagacgataatatggaccgcttcattaaagctcatagagaacggatgatgcaatctatactgtcagaaagatcttgttttgtaatttgaggcactggcctcagttgaggacgagatattcctaaaaatacgggataaagaggctgaagtggaaaccataaacaaaaggaactctgaactagn

SEQ ID NO: 3558 - DNA, 201 bp, Zea mays
  Peptide Sequence Number=SeqID_9784
  Probeset Number=SeqID_17961
ccggatgctggtcgtcgcgggccgatccggctcgacacctgggtctcatggcggaacagttgggcgggcccgccgcgacgttgtcgttccatctgaaagaactcatgcagcgccggcctcctcacccaggagcgcgacggccgggatctgatctaccgggcctccttcgagcaaatgaatgcgctgctcggcttcatgacc

SEQ ID NO: 3559 - DNA, 510 bp, Zea mays
  Peptide Sequence Number=SeqID_9785
  Probeset Number=SeqID_17962
cccaagggtgggccccaatggcttactaccaggaggtggactactgctcgaagaaggtgaggtcggtggccccggccggcttcggcccccccggagggggggtccaccagcacgtcgtcaaggaaaagttcgaggaggttgacagggtttcacgggcgggggccaacccccccccccccccccatggtccccccggcggccccggttttttggtgcgcgaaaccagggtcaaggaggacatcaacccctgccccggcgaggtccccaagcgcagggaaagtttcctccccagggctaattaaaccgcccggcggccggcatccacgcccgttggtgcctgcctgcgtcccttatgtatgtctgtggttgactggttgtccagggtcatcgtacttggctatggtacgtgcacccactcagctcctgtacaaattacgccaataagctcgtgccctaaataaaactttttcgtaatcctaaaaaaaaaaaaaaaaaaaaaaaaaaaaaaaa

SEQ ID NO: 3560 - DNA, 561 bp, Zea mays
  Peptide Sequence Number=SeqID_9786
  Probeset Number=SeqID_17963
cggcgggaacgattttaggatatggctacgcagctacatctcgcgtgcccgctgcgactgtgaagctcgccatcgtcggatcggacaaaggggatgatcctcagcaatccctgagcagactagaggagtatctaaggcaaagggaggtgtgaaaaatgctgccgaccaccgctttcaaggggcgcgtgatctcccgatcctgccacccggtcttctgctgctacctccgcctcatcgtcaagtgtaaacaaatggatatagaatacacgttttgaaaaatgatgcgtctctgtccttcaccatcagtatgctatgaatacaccaaacatgcatgacgtcaaacacacaacacgtgtgccactgattatcttgcatgtgtcgttattctgatgcttttcctcgcgtctgcaacatcacacttactgtgcagcatatggagagagtgcctcacatgctgctctaactatcacttcggttgtggttctccatttcttgtctgttgcgaaacctatggccacactttgctggtaccagcaaagtgtggccaaaactatcccagca

SEQ ID NO: 3561 - DNA, 726 bp, Zea mays
  misc_feature (8)..(8): n is a, c, g, or t
  misc_feature (711)..(711): n is a, c, g, or t
  Peptide Sequence Number=SeqID_9787
  Probeset Number=SeqID_17964
ggtacccntcgggccggccgggaatataccctattcacactcgctattcactcttttccctagcctcattctgcgcgaatatactgcttgggttgcatcgggcgacattgagcgccagacaggatgagttccaacacgaagagtagcctcacgggctatctcccggctatcctcatggcagctgctgcaccattaatagcatacttgggcatccgcaacctgctcacgcgcctcgatcccgaagcccaacaaaaagaagaagcccgcgcaaaggccacggccgcaactcgcaaacttgatgctattctcacatgtaaacggcggaaaagctatagcgagtatgatagcgaagatgacgacgagacggactcgcggcatcgacggccacggttgcaagacctcaatctcaacacgtacgaacaaacaatcgctatggaagtcgttgcgcccgaggagattcctgtcagctttgaggacatcggaggtctcggctccatcattgaagaactcaaggaatccggcatctaccccctcaccatgccccacctatacgcccacagttcctcgctcctcagtgcaccttcaggtgtcttgctctacgggccctcccggctgcgggaaggacgatgctggccaaagcccctcgcacacggaatccggcgcttgcttcattaacctgcacatttcgactctgactgagaagtggtatgngcgacagcaacaagc

SEQ ID NO: 3562 - DNA, 374 bp, Zea mays
  Peptide Sequence Number=SeqID_9788
  Probeset Number=SeqID_17965
cggcacgagtggcatcggcggcggtgtctgaataagcgtctcacatgcatgcatggtggtgcaagcagaagcaagtgctcgagtgcgtctggtctgacgaactcgctctggtattccctccgcaggcgtgcgtggacctggagtcgagctatagcattagcatgtgtgtgctataccgatcgatatctggatcatactctcgtagcaaatagcgatcatagtaataacagaataaggatgctgcaatacgtctaatcggtgatcattatacgatggtttatacggtatatatacactgcgttggtagcaagctgaaagattactttgtatcgtactattaaaaaaaaaaaaaaaaaaaaaaaaaaaactcgagc

SEQ ID NO: 3563 - DNA, 535 bp, Zea mays
  Probeset Number=SeqID_17966
gggcaaccatccgtcccgattcccgaccagcttttagattccgatggcggacggccccttctgcccctttctggagatcctttttgccatcatcctcccgcccctgggggttttcctccgattcggttgctgcagaataaagttttgcatttgcctgctgctcccaatccttgggtacgtccccggaatcatttacgcgatttatgtccttgttgctctcgactctggccagcccgagagggaatactccccccctgcttagagcatctggttgtgccaggcgggcctgcccagttgagtcgaaatcagtattttttttctcatgtggattgtctgacatggcataaacggcaatgggtaaccaagtgttgtggtctatatctctgttacccaacctgtgagctctctttattgtgccccagttattcaatttgtaattgtcctcccccaccaccacataagatgcgcatgttctttgtaaaaaaaaaaaaaaaaaaaaaaaaaaaaaaaaaatccgaggaaggggcccggtacc

SEQ ID NO: 3564 - DNA, 215 bp, Zea mays
  Peptide Sequence Number=SeqID_9789
  Probeset Number=SeqID_17967
tgcagactggtggagtgtgggaatccttctttttgaaatgcttacgggaaagccaccgtttgttggtggaaacagaggcaagattcaacagaagatagtaaaggagaagataaagctgccaacatatttatctagtgaagttcactctctgttgaaaggagtaatttccaagccaactggttacaactctagtctctagctagccaccagctgca

SEQ ID NO: 3565 - DNA, 336 bp, Zea mays
  Peptide Sequence Number=SeqID_9790
  Probeset Number=SeqID_17968
caataatgaagtcggcatgccatcgcatgcgactcattgtttaggaataaaacaagctaataatgacttttctctcattataatgtatatctctccctgtcaaaaaaaaaaaaaaaaaaatagctttttcctcttcccgggaggggggggggggcttttttttccccactttttgccattttttgtcggtccaagcttcgtttcaagctcccgggcggcccttttttgggggggtttttgcggttttccctcccccttggggcccgctcgggcttccttttggggggcccttttccccctttttcgcgtcggcgggcctttccctggccgtctttt

SEQ ID NO: 3566 - DNA, 279 bp, Zea mays
  Probeset Number=SeqID_17969
cgcgtacgtatgctgggaattcggcatacgagcgagcaggacatggttaagttggagcagggaggccaaaccgtctgcatcagtgggttcatggcgtatgacgtagtccaccgccgcctggtcctcattgtggatgcttggacacgtataactactgcatgcttactacatagggtttctggcttttataacgtcgggagtgctctccacacttatgcagatagccgggaaggcaatcctgtcgttatctaagccatacaccgtgtggtaggctcccat

SEQ ID NO: 3567 - DNA, 602 bp, Zea mays
  misc_feature (120)..(120): n is a, c, g, or t
  Peptide Sequence Number=SeqID_9791
  Probeset Number=SeqID_17970
aaaaaaaaaaaaaaaaaaaaaaaaatcagtctccaaagacgctctgcttcgctgcgcgggggggtgccgggaactgtgggccactcgcgggcccgccgccagacaccccggtgttctccntcgccggcgaatgtcggcgccgcctgtgcgtaccgctcgccgacacttgatggggacagtgctggctcacatgcgccggctatcctcggcgcccgcgacgtcgccaggctcgccatgggctgccgccccctgcgcgccgccgcgtattgcgacgcggactggtaccgcctcttcagggatcaatggccatttgagaaagagcctcgcgatgctttggggctaagagaactatacatccgtagacacactgaaatacatcagatgaaatttggtgaccccatatcagctctttattacttagatcctgcgggaacaacaccaagtcatgtaatgatggataggaactccatctggttttgtcagggtccagcagccaaaaaactgaatattgactcgccagaaactgaacttgtagacacacacaggaaccatagtgcacgtgacactcggttgaggctatttcctctgcatgaaccgcccct

SEQ ID NO: 3568 - DNA, 574 bp, Zea mays
  Peptide Sequence Number=SeqID_9792
  Probeset Number=SeqID_17971
aaaaaaagggttccatcgaccccaaacccttgggtcagggaaaggcttttttccactacgccaagcctgtccttcatttaaatggcttaaatgttccggaaaatttccctttaacagggatttgatttataatggccatccttttgttcaaaggttcagttgtgtaaaaccctctcaaaggacttgggcacatgcaaaagccagcaatttttaaagcagggctctttcagccaagatataggtaaatataatagtagcttttaacaaaaagaccctttctaaaaagcctatagccccaaaactaacccaaacaatattctgaatttaaaacagtatattgtccatgcccctattttaaatgcgcgcgctgaggccttttgtcatgaaaccccaagaggcttagtctatgacaaattggcatctgacaatgtatcgagctcctaagggataatatgaatggtgtaaacaagtaaactaccccatataagtgattcagagctacccggtccctatgtttctcttatatattgataatggaacgtaagattgtttgcttttgaaaaaaaaaaaaaaa

SEQ ID NO: 3569 - DNA, 703 bp, Zea mays
  misc_feature (511)..(511): n is a, c, g, or t
  Probeset Number=SeqID_17972
gaactcactaagggcgaacactggggtacccctcgaggccggccgggagttccgtgccgtgctcgcgcgcacccaccccgcacgccgcatgccgcctgccgccttttactccgcgctgctgctgctgctgggacgaagaaaatcttttccttcacctttctctcctctttcccagttcatgcacgggctctgattgacgccatgggggatgccgccgccgccaccgcaacggcctccacgtccgctcccgccacgcccacctccatcctcatctgcctggaggacggcagcgaccttctctccgacgcctacgatggcgccggcgccgccgacttcgtcgtcgcccgcgacgagcatctgcttgtcgaggaccaggacgaggagtacgtcgcgctgctcctgtccaaggagagcgcgttagtatgcgccccggcggaggaggaaacggagaagtgggtgaaagaggcacgctgcgtatcccggccgatgaagcactgagaaccagggtatngtaacgtctctcgctcggaaggcccatggctcgaggatcccataaccaacgatccctacatcagtattcattaaatgggaagcctcctttagctacgcacgcattttagtcccctacacgcccttggattggggcggggctctggtaatcatccttcaaccttcggctgcatttctcccctgcccgtcgccg

SEQ ID NO: 3570 - DNA, 984 bp, Zea mays
  misc_feature (1)..(36): n is a, c, g, or t
  misc_feature (984)..(984): n is a, c, g, or t
  Peptide Sequence Number=SeqID_9793
  Probeset Number=SeqID_17973
nnnnnnnnnnnnnnnnnnnnnnnnnnnnnnnnnnnntttcaactctgtactgggcgtaggccgtatggcgagctcccaggtcgacgtggcggggatggctgcgacggccggcggtggcggtggtggaggggctaaggcggcagtggcggagcagatagcacaagcagtgccgtccacctccaacctcctccagctgatggagcagtcctcccccgctcagcaacttccacaatgctgcgctgaagtctccatggtgcagcatggcggcttagatggatcctctacttcaggttcacttggcaaaactaccgaagaacctgttggaaaaagcatcctttgcaaagaacacagagcatgtgctgcaccagctacctcaagtaatatcatccttggatgcttatatggacaggagtttgcaaagtgcctctcaaattaagactgtcacacagctcttgtcaaacatggagaagacacagctgaagtccatgttgccttcctctcaaatgaaggaagatcagaagagtactgaaccagtcagggttgattgacgtgttcaccgagacataatggaaggatatgcttttgcttgtgctaaagaaatctgagtatgatggtttggctgattggctctatgcatctatccggcataaggatccatcgctgcctaccgtttgtgccacattttaaaattcagttggggaatgctgttatggtgtaatggagctgtttttttatgagttggagatgctctaaggcaagcatgcctacctccattcttgaatatttgtcgtccgttaatttattttaactaaaccacgacaattaaaagagatcgctttcagtaatttgcactggttgttttagcagtaaattatggtagaaattatgaagtgatcaaagtgtttaacgtggcactgatctttgtacttcaattgcatgcataccctatgcagtgatgaggcggagatttttggattatataan

SEQ ID NO: 3571 - DNA, 636 bp, Zea mays
  misc_feature (1)..(9): n is a, c, g, or t
  misc_feature (610)..(636): n is a, c, g, or t
  Peptide Sequence Number=SeqID_9794
  Probeset Number=SeqID_17974
nnnnnnnnntttctaaactggcggttgtaaatatgatatgattttgtaggttgatgcatcggatggacgagtgagagtgctataattgcccctacaaggaagctgcaccattccatcgccctagattttattcccctttttacagaggagaggggaaaactggaagccattttgaaccaaagacgattcagaaataagactgtctgggagattaatccacttaaactggacttcacaaaagcacttgttatcggaaagttttgtattggattatcttaaagttggccaaacctgctacctacaacaaggctctttcggtgaaattctgaaagcaaattggcgaggaacacccattgctgtcaaaccattcttccatccttatctgatgacaggctggtgatgagcaggccaatgcagaaagtgttcactctgaagacgccccaacttgttcatacagtagtgcactttcagttattttgtttttgttattggtttgtatgaatgctgtagttggtttcatgtttggatatgcttgtatgattattaatctggaaatggtacaaacaattcagatgaacatttttagtgacgaaaatatggtctaatttgnnnnnnnnnnnnnnnnnnnnnnnnnnn

SEQ ID NO: 3572 - DNA, 255 bp, Zea mays
  Peptide Sequence Number=SeqID_9795
  Probeset Number=SeqID_17975
tgaaagaacttatttctgtgtgtgaagctcaaaggaggaccggcgagacatacttaaatggaaacagctccagatcacaccaaatacttaaactggtttgcctactgcttgttgttgctagtgtggtgagaaattataatttactcatatttctttcgtggcaaaaaaaatgggtaagtataagcgcattcgattgtaccatgcagaacttcgttgatttggctggaagtgaacgtgcatctcaggcattgtcag

SEQ ID NO: 3573 - DNA, 230 bp, Zea mays
  Peptide Sequence Number=SeqID_9796
  Probeset Number=SeqID_17976
tgcgtcaagctctggaggctccataatcgctgcgttgctgctggagaacggagcggacgtgaacggcaggaacatctacggccagacggcgctgatgcaagcgtgccggttcggccactgggaggtggttcagacgctgctgctgttcagatgcaacgtgtccaaggcggacagcctgagcggcaggacggcgctgcacgtggcggcggcgggcggccacgtcaggggat

SEQ ID NO: 3574 - DNA, 726 bp, Zea mays
  Peptide Sequence Number=SeqID_9797
  Probeset Number=SeqID_17977
cccggcggcgcgctgacgaggaggtcgctgagaaggccgcgtcggcgaaggcggcggcggccaccgccgctctgcgcggcgtggtgagcgtgccgcagacgtgcgacctgtaccggggcagctgggtgtacgacgaggtgagcgcgcctgtgtacagggaggccgagtgcgagcttcctcacggagcaggtcacctgcacgcgcaacggccgccgcgacgacgacgtaccagatgtggcgctggcagcccgacgggctgcgacctgccccatatttgaggctaagattgcgttgtgtgagaatctattgagacgaagggggtgatgtttgtgggggattctctcattctggaccagggggagtctgtggtgtgcctgccccattcacaggcaccatggcacacatgatctgtagtctcagagtggttctgttagtggagtccatcttctcgagtgcagtgccacggccttgttgtgctgggcttcgttcctagagttgtggaactcgggcgaccctctcctttatcgtctgaattgcccggtggtctagccgccatggttcgccagaggtgccgctactttccttggttccttctccctgttcttcggcgcttacgatctgtggatgaacgcgaccggtgagcaactggttgatagagctttcttcttgcggcctcttccttttttagcttttattagtgcttcactccgcctgcccccaggtgct

SEQ ID NO: 3575 - DNA, 758 bp, Zea mays
  misc_feature (1)..(54): n is a, c, g, or t
  Peptide Sequence Number=SeqID_9798
  Probeset Number=SeqID_17978
nnnnnnnnnnnnnnnnnnnnnnnnnnnnnnnnnnnnnnnnnnnnnnnnnnnnnnggctgaaaacatggcccttccttttataattacatatttgtccaacgtaagtgtcagtgcatcccatgatggcatacatacatattttgcgtacatacacatcacatgactggttaattacatatgtccaacgtaagcctcagtgcaccccatgatggcatacatacatattttgcatacatacagcgacagaagcgatgatggtgcagcacgacaaactgaaacagggacgcggcaacatgggcttgacccagcgaacagcgacgcaaagagcaaagcgaggttgcaaccgggcgggctcggatacaagcacacgcagcgtatcaccgtgtccagcgcgcgcgttacggactcgatgtcgactgcgagcagtttcgcgcgtacgacaacgcgacggaggagaactgaacagggagcttcgcgacagcacgcgcaggaacaacgaaatgctacacgcgcgatgcaaaggcgagcaggacgcggactgggcagagtcgagccagggagcttcgacgaacgcgaaggggctcaggcaggatcgacggcgcggctggagaaacaggagatgcgccagagaaaacaccaradgcgcgactatgagggagatggaggtgcagccgagcgcggcgacataggcagaggtgagctcgagggcgcscaraacgccgarctcakcgcgcgcgcagacagagagcaaagcaggg

SEQ ID NO: 3576 - DNA, 667 bp, Zea mays
  misc_feature (1)..(37): n is a, c, g, or t
  misc_feature (638)..(667): n is a, c, g, or t
  Probeset Number=SeqID_17979
nnnnnnnnnnnnnnnnnnnnnnnnnnnnnnnnnnnnnttttttttttttttcatagtatacctatttgatactaactttttgtaatttttctataattttaggccaacttgaagatgctttgcccttctaaaaaattgaatatcttatagttcgggatggagggaagtgcatgtctcccgtatgaattgtccaggggcagggttgtaccgggctatccttttttgtatttgttcatgagacatcgtaatcttttatattttttgcattatataatgttttcccaaaatgttacagtccaacgggatcaaagttggctatgctgttcccaactcatctggaggtggtgctggctcgtcctcacaggctggtggctgctgcagttgagcggtggcagcaagtcatacaattacaagggttctctctgcagtatcttgatgtttgcctatagctggccccgaatgatttgttctttcagccatcacgtttcaatccatgaacaaaccatcttcagtgttagttgtcattcaaacttgtgcgatctttctgtaaagccaatcattcacgattgctaacgtatgtgctttctgtaaccaaattgaaatcagttctatggtattcatttgttcaaaatgtatannnnnnnnnnnnnnnnnnnnnnnnnnnnnn

SEQ ID NO: 3577 - DNA, 1179 bp, Zea mays
  Peptide Sequence Number=SeqID_9799
  Probeset Number=SeqID_17980
gccaccgcgctgcgtggcgctgcgacgctgagaggacggcgcagcggcagcggcgggcacggccagaacgagagggcggagcacgcggggccggctctgtctcaggacgacctcgacttcgacttcaaccacgcgaggtccagggcggcgctggccaagggcgacgagatgttcgtcgcgatgccggacgggaagtggaagctccacacggtgtcggcggcgtcgaacaagcgcggcgagatcgtgctgcggatcaagaagacgaacctcgtcatggccttctcccacgcaaaagaaagcgtgatccacgacgtgcagccgtgctccccggagaagccgagcccccacgagggcgcgacatacccagtggaggtctccacgaacaagggcaaggtggagctccgcacggacgactacggcgtctacaagcggtgggttgcgacgctgagccacatgctcgtgatgtccaccgccgtctccgtctccaccaggcacgagccggcgcgccgggactgacccaccggtgcggctcctccctcgaagcaatggacccaccccacccatcacgacgtaaacgaaaacgttgatctgtgtcgatcccatgtgtatttagtactactactgcccatgaactgtatgagtagcagtatcagcactgcaagctgcaaccaaagattcagatactgtttaaaaaaaaaaaaaaaaaaaaaaaaaaaaaaaaaaaaaaaaaaaaaaaaaaaaaaaaaaaaaaaaaaaaaaaaaaaaaaaaaaaaaaaaaaaaaagaaagaaaaaacgaaaggaaccaaaattatatacaggctccataaaaacaataaactggtcctataatgtacaacaaaagtgaatggaaaaaccaggggtttaacccaagttaaaaaggggaaaaccactggggtaccccatcttgttggcctatataaaaaatatgcctttaccgacctgccttaataacagaatgggcccccaccatgggccttggcaaacaccttttcaaacctgaatgaaacttggaaggcgccgtggatacgcccattaaggccgctaaatttgccggcaacccacagcgcgccccttacactttctatcccccttttctcggctctttcgccgatcttccccggctttgtctacacctgggggcgcttttccggggttgt

SEQ ID NO: 3578 - DNA, 591 bp, Zea mays
  misc_feature (269)..(270): n is a, c, g, or t
  Peptide Sequence Number=SeqID_9800
  Probeset Number=SeqID_17981
tggggatgagcttgatgatgaagagtgatagtggagtcggttaagtacttctgatttgagcgcggtgttccataaggaagtatttaggccgcttatcttggtcagaggttccgggacgaagatttccggagcggcgagctgtcgaacaatggcagttcgtcaactccccttgcacgtgacggcacagaatttccgggtcagatgagaggctacatcgatcaaagctgaactattcgggaatgctgtcgtcgaatcatgtattaggattnntacgccccacgatcccgtagccgccgcccacgatagccgccgccgccgccgtgctgggacgacacctcgccggacggcgcggaggacgccgccgaggcgacggccacgagccgccgccgccgccgccgcggcggcggagggagcagccgggaggccgcgtggacggctgcaggcgcgcgcagcaccaggagcgccatcgtgctggcttgtttggtgcttgctgtgggcctgtgggcgtgcggtgcaggcgcgatgctccggcttcctggcgggctgggggacttggactggagtggagcgacgatccgaaggaggagaggt

SEQ ID NO: 3579 - DNA, 619 bp, Zea mays
  misc_feature (601)..(619): n is a, c, g, or t
  Probeset Number=SeqID_17982
gaggctcggccgggacgtccgcgctgctggccaatgcggcccaatttctaacacggctttgaacctaggtagccacgagcccctcagccccctcactccggtcacccaccagccgccgctacgtgacgaggtctcccgtgtgacacagactgccgtccttcgcctggcgagtggtgacctgcgacctccgtctccggctgccgtcctctgccatggtccgtggaccgtagtccggcagcagcagggctccagcctctgcccgaccgcttgcccgccaccggcgtctgctacctccgcatccggcctctgggcaccggtctcccgtctctgcccccggcgttcatcgtccggtctccgacaccaggccctcagctacagcagtacagcaccagttcccgcaacagcgaggtcatcgacgccgccatctaggacggctcttaagttgcaggaagcaggtgaagtgaacctcatgtccagttcttgctcctctttaactagtaactagatcatttgtagtgatggaagctgtaaagaagctccatgctcatcctcgttgtttctggcctgcacaactgtcaatatgcaatgtcaaaggaaaaannnnnnnnnnnnnnnnnnn

SEQ ID NO: 3580 - DNA, 348 bp, Zea mays
  Peptide Sequence Number=SeqID_9801
  Probeset Number=SeqID_17983
aagatataaaacctagtcaaactaaagactacttatcaataatttcattttcatcagtttgtatgtagactgacccctgaaagtttattgcaggacactgtatgttcagtcttacaggcagtttcatcaatcccatcttgtaaactgcttgaagaagtatgcaagaggaattttgctacgcattttgattattgcacaactgcttgcacggactttgtgtcattagatgaggcaacatttaaggatattcttgaggcaagtaatataaccatcactggcaacccgagggctctccggaggctgaggacctcttgtgagagggccaagagaactctgtcttccactgcc

SEQ ID NO: 3581 - DNA, 815 bp, Zea mays
  misc_feature (1)..(173): n is a, c, g, or t
  misc_feature (774)..(815): n is a, c, g, or t
  Peptide Sequence Number=SeqID_9802
  Probeset Number=SeqID_17984
nnnnnnnnnnnnnnnnnnnnnnnnnnnnnnnnnnnnnnnnnnnnnnnnnnnnnnnnnnnnnnnnnnnnnnnnnnnnnnnnnnnnnnnnnnnnnnnnnnnnnnnnnnnnnnnnnnnnnnnnnnnnnnnnnnnnnnnnnnnnnnnnnnnnnnnnnnnnnnnnnnnnnnnnnnnnngtgaacccctacaacgtcacgtaaaaccgcgtggaggcggccccggcaagccctggcctggtggtgttgctggacccgacgcggagggacctcggcgcacaatacgagctcggcggcgagctgggacgcggcgagttcggcgtcacgtacatgtgttcgccatgagcgcgcggtacccgtacaagtccgtctccaagcgctgtctgtggacgctcgtggacatggaggacgtgcaccaggaggtggacatcctgcgctacatgccggcgcaccccagcatcgttagcctccgtgccgtttatgaggacaccatgcacctgcgccacatgaggacgccgtgcacctcgccatggagttctgtgagggaggggacctcttcgacaggatcgtcgctcggggccactacatcgagcgcgcagtcgtcacgcgcaccatagttgaggtcgtccagttttgtaagaggggatctgtaccagtcaggctgagcagcagcagcagtggtgtgttctggcttgtgtgggacctagaggaagcttacacaacagggaagagtattgtgttaagtgagttagaaagtaatggaatgaatgcagtgactcannnnnnnnnnnnnnnnnnnnnnnnnnnnnnnnnnnnnnnnnn

SEQ ID NO: 3582 - DNA, 930 bp, Zea mays
  misc_feature (1)..(297): n is a, c, g, or t
  misc_feature (930)..(930): n is a, c, g, or t
  Peptide Sequence Number=SeqID_9803
  Probeset Number=SeqID_17985
nnnnnnnnnnnnnnnnnnnnnnnnnnnnnnnnnnnnnnnnnnnnnnnnnnnnnnnnnnnnnnnnnnnnnnnnnnnnnnnnnnnnnnnnnnnnnnnnnnnnnnnnnnnnnnnnnnnnnnnnnnnnnnnnnnnnnnnnnnnnnnnnnnnnnnnnnnnnnnnnnnnnnnnnnnnnnnnnnnnnnnnnnnnnnnnnnnnnnnnnnnnnnnnnnnnnnnnnnnnnnnnnnnnnnnnnnnnnnnnnnnnnnnnnnnnnnnnnnnnnnnnnnnnnnnnnnnnnnnnnnnnnnnnnnnnnnnnnnatgcaagccacgctccagaaggttgagcaagggctgctgcaaatcaaggcaacagtgcaacatgagcagcaccagctggcgttgtccgcacaactccagacgtcggcgactgtgggcacacaagctgctgctcgtggcttccttgcacgacggagagtgcgggagatgcgtcggcagatgctcgaggcagccttggtgacggttgacctcggcacacgggggcgcgacctcgccctgtcggacggccatcagcagcggcaccgggccgctatctccaagtgcgagcatggtacgtgtcccgcgggcgacgaacttcaactctacggcagcggcggtagagaaggcactcccctcgtcatcggcaagggcgcactatttagcgccaccacattccgctaccggccgccacgagggcgcctccgctggttattgttgcgacctactccagcacccgtcatgctgcagctcgagtacgagctgcttgtccaggaggggtgtactgtcagggccaaatttctagcattgttgattgtggttccatgggtgatagattttctagtgcatgactatgttatgatgccctttttagagaggtatgtccagaaggtgccacttgcagctgagctactcgan

SEQ ID NO: 3583 - DNA, 388 bp, Zea mays
  Peptide Sequence Number=SeqID_9804
  Probeset Number=SeqID_17986
caactccatcccatcctcttggtatattttgtttcatttggcatcctagattctgaatccggtggagagtttttgaaatattgtcgccgattacccgtaagaacaacgaccactcttctaaatctgcaaggtatggcacttggggaatatgttttatctatgggaccctccatgcgataaatggcttagttgctgctgggagaaattatgagaacaatatttgcattcggaaagcatgtgaatttttgctctcaatacaactcaaaactggtggctgggcagagagctatcgttccttggaagtcagatacttttaggctctttatcgcaacaatgggcaaactgtcaaccatgtccaaaagctcttgtccagtcctagttattgaag

SEQ ID NO: 3584 - DNA, 1584 bp, Zea mays
  misc_feature (1)..(3): n is a, c, g, or t
  misc_feature (1558)..(1584): n is a, c, g, or t
  Peptide Sequence Number=SeqID_9805
  Probeset Number=SeqID_17987
nnnattcaattcatgatctctgacagtttattagtacatgtatttataagccattagataagccagattacaatttaaaaaaagccacacaatgacccagattaactctaatgcttctagaaccacgtagatctacagatctacactcacctctgcttcggtcgttacacgcgtgctcgtcaggagttcaggcgcggcgagcaggggggcgggggagaagcagccggactcgttagcccagtcggcagtcgccatgggcatcggctacgtagtgggcgtcctcggcggcgccatcctcgcccacgccgcctacgccaccatccagtaccgcgcggtgctcaagatcacggaggaggagttctcgcggccgcccatggatgtgatgatggagttgctcttagggttggtcttgtgcatgtgggcaggtcttgctgttcccactaaatttctctcggtgcttccacattctgatgagaataggatcgtctcgctcccggctaacctggatttcatgatcttcaaccaccgtggaagagcgctgccgtcagactcagacctgaaactccatacatagacatgtccagaatccagatcttttttctttattttctgtaaggccttgttcggttattcctattacacatggattagatgagattggaaaaaattaaaaataaatttgacttgcttgagatttaaaaaaaaaaaaaaaaaaaaaaaaaaaaaaaaaaaaaaaaaaagtccatcaggcatccaagcttaaagcaagcagatctaagctccaggcagcgtcgcgacagagtgagtgagtagcacgacaacaacaatggcttccctgaaggccgcgaagcccagcggagttgcggcgcagggcaaggagccggcgcccaagctcagcgagacggcgacgaagccgtcagccgcgaagagcggcggcgttaagaaggctgagcagaagccccgggaaaccaaaaggaaggtgaagagcagcaaaccggcggcggcggccaaaaagtgacgtacagtacgtgtggagtgtaatggagcttccatgcatggcatgagtggatccatgccatgttatgaatctagtccttcctttcttgtatcttccatgtgacgcggcgtgtgcgtcccttcatgtgtgatgatgccagatgaatactacaaataagacgttgtgactgtgccaaaaaaaaaaaaaaaaaaaaaaaaaaaaaaaaaaaaaaaaaaaaaaaggaaaaaacatcgccacagaaccgcaagctagtttagcctccggaagggacattcttctaaagatggcagcaagtcatgtccatccatggggactgcgaaacagcttccgcacctggttcctatatttaatatatttagtctgatctcccagttatctgtaaaccaccgagaccgagtgcaagcagacttggttgattcacaatttgcctggtggttgctaatgatatgggatgaaacggttgccggcttggctgctattaaggttgtgcaatctgccgggcaattttagcattctaaggccctaatgatgaatctttgnnnnnnnnnnnnnnnnnnnnnnnnnnn

SEQ ID NO: 3585 - DNA, 543 bp, Zea mays
  misc_feature (494)..(494): n is a, c, g, or t
  misc_feature (496)..(496): n is a, c, g, or t
  Peptide Sequence Number=SeqID_9806
  Probeset Number=SeqID_17988
taaaaaatctatggcagctcaccaagtccggtattctgcatatgcacctcctccgctctcagggaagcactcccgcgcgctctttgctggtttcaagtacaatatttcctcgacggttggcacttggaactgcagcgggtcggctgtgtagagccctttcacgcacgaccgtacgtggaccttcaccagcgcgtacgctgttgtccaccacatagctccaccgccgtccgtcatacctctcccaggcgcagcaccccatccctagcgatctccgccggcacggccgccgtcgccgggaccctggcggccggggcggtagccttcgccgtggcctcggcctcccttacggcggtgcgcaccgcgtcccgcacggcaggcgcggacagcgtgacggtctgcgctgctgccgcccctgctcccgccgcaggccgcttcagccccatcgccggcgccatgaggtgggggacgcgggggtgggtgggtgggagagagancngggtgaggggcgagcgggcggcggcgagcactggcggactcgagggt

SEQ ID NO: 3586 - DNA, 341 bp, Zea mays
  Probeset Number=SeqID_17989
tcaagttcctgtttattgtctatttgtctctgggtttttggttagcttgtttgtcgttgtctccgtgtacgttcttcatcttgtcttttactttggagaagaaattttattacaggatgttatttgaaaccaaccagtaacatcgatgaggatctcgccaagaatggtggggggagatgcccagtctcccactcctttcactctctctcttcctcatcatgatcctctcctagcttgtctttatatcagtaaaaaaaacgtgggatcttttcgagcaccaaaatagaaaaagaaaaaatccccttacaataatccaacccacgcgtccgcggacgcgtggg

SEQ ID NO: 3587 - DNA, 1005 bp, Zea mays
  misc_feature (942)..(1005): n is a, c, g, or t
  Peptide Sequence Number=SeqID_9807
  Probeset Number=SeqID_17990
ggcggcgctcaggcggcggccgcgacgaatccgcacacgcttgcgcccatctcaccaactatgaccgcgtgacccgcccgcctatatagccaacccgacctcgccgctcttgcctcaatccataccgcgagaaggtctcgggagcgataccgagggagaagagagacccgccgccgccttatttactcggcatcaccggagcacgaccattgggttgccaggggtgctaactaagactggtggaaccgattggtggggtttcgaggctcggtgaccgaccgtggaatacccaattgctcaccggagtgctctactcgcagcaaagccgctatttgccatgggcagctctctgggcatcaaatccatcacccatcccatctccctccgtaacagcggccgggcagcccgcgcctggccgccgccgcccgtcgctcccaccatccgcgcgcccaacccggctcgcccccgccgtcgggcacgctccggtgaacccgcccacggcatcgccgcgcgcgaccaaccccgaccccccacccggggtaaagctgtgggggctgtgttgctcgggagtggcagctactccgccggggctccctgcaggtggaccacacggcgcccgggccccgccttccgccatggggagcggccttccggcggtgccgcttcccgacgagcaagtgatcgaggacccaggtgttcagcaggtggaaattgctgagcaggagctcgttgaagctccccccaggagaagaacatgtggtctaggaggagctctacaacgatgagtatgagcttatctaggtggcgtctcccagtcagcttgatggcgccgaggaataatacttagttcgttttattgttcttattcatttttgtaagacttctgctatataataatgatatttgtgacatttatctctatacactttgtaattatatgcnnnnnnnnnnnnnnnnnnnnnnnnnnnnnnnnnnnnnnnnnnnnnnnnnnnnnnnnnnnnnnnn

SEQ ID NO: 3588 - DNA, 745 bp, Zea mays
  misc_feature (601)..(745): n is a, c, g, or t
  Probeset Number=SeqID_17991
gcatatataaaaaatatttttccttaaatcttgccggcaagcatacatgcattatttcaaacttcggaggggggagctcgatcgatttatttgaggactagcatcaggactaaaatagaattggatcagggacacacgtacgggtttgaccaggagcaccatgcatggtccatggatcatatcatcattatcatggcttcatgggatgggaatggatcggagtacgtgcttaaccatgatcagtacacacgtatctctcggaggggcggcggtatcccgggtgatggccgggcgattaattagtagctgtagttcttgacgaacattccctccttggcctcggcaagtacacctccgacggcgaggccgccgaggccaaggagggcatgttcgtcaagaactacagctactaatcgcccggccggccgcggccatcaccggaataccgccgacgtacgaccctctccgagatacgtgtactgatgatcatggttaagcacgtactccgatccatctccccgtgaaagccatgatatgatccatggacgaccatgcatggtgctgatcgatgccgtacgtgtcctgttacataaatacatannnnnnnnnnnnnnnnnnnnnnnnnnnnnnnnnnnnnnnnnnnnnnnnnnnnnnnnnnnnnnnnnnnnnnnnnnnnnnnnnnnnnnnnnnnnnnnnnnnnnnnnnnnnnnnnnnnnnnnnnnnnnnnnnnnnnnnnnnnnnnnnn

SEQ ID NO: 3589 - DNA, 921 bp, Zea mays
  misc_feature (751)..(751): n is a, c, g, or t
  misc_feature (901)..(921): n is a, c, g, or t
  Peptide Sequence Number=SeqID_9808
  Probeset Number=SeqID_17992
gagagaagtcttcatttactggctgatatgaaggaataaaaggcttcagctgagatacatggaccacagggtgaatctgtgctgctgatattgctccagtttgtgaaggagctgttcaacacatagcttctaagagattacagattgggggagttgacttgacaaacctcttttcacaagaactgaatatactaatccatgggcataccttgatgtttctgatgttgagaggctgaaagagcagtatgcatgttgcacagaatatcagctggctttcgaagctatagagagctcttgccgaccaaaaagggacactcttcctgatgggcaggctttgaggacaggttccagagagaagcaaatctgtctacttcagcaatctgtccatcacttgtgaagcctcctgaaacaggcccgagaacctagcaaggtactcggcctggttgggtggtgcgatattggctaaggtcgttttccctcaaaaccagcatgtgaccaagggcgagtatgatgagacggggccgtccattgtgcacaagaagtgcttttagagacaaatgccttgaactagcacggttggtgcaccatttgctgctgttcatgtcgcagttgtgctcgtacctgaacgttgcggccttgcgggtgctgatgcagcgatgcttgtgtctacaccttactccagccacagttcatacctgacggttgctaagtgttgatgcatctagctagctcggttaggatggattggtcnttagctcccaccaccctggaatggagtgtagcctcggcatgtattccttaggagttttagccaattgctcatttgtacctgtagtaccagagaatttcctgagatttccttttaaatttacattatgatccattacctgttcagctgctnnnnnnnnnnnnnnnnnnnnn

SEQ ID NO: 3590 - DNA, 441 bp, Zea mays
  Peptide Sequence Number=SeqID_9809
  Probeset Number=SeqID_17993
agctggaccacaatgcagccattaatgattctgtctagccacacattacattaagcgtctgtaattcatgcctgccaaaacatatatcgttgacaggtcaaaatataactgatccaaaagcagcatacacacatggttcattagaagtggcgaacagactattagcgagtattgcttgcacacaaaagcacatagttcgtttgtccagcggcaatattagcagaagacaagtgctattctcgttggacagaaaaacgacatgtcccttcatttccaacgatagacctgcaatccactattgccatcgggtacatgaaggtgcttcctctatctagcttcagcttcttgtcctttagtagctgctctctcctaagttcttcatatagaagcctaacatcggattccttgtttgggggatatttggggggaattgatggatcc

SEQ ID NO: 3591 - DNA, 405 bp, Zea mays
  Probeset Number=SeqID_17994
agctcggtaccctggctgcagtgtcgccaagatactgccattcacagatttgtcggatcaacggtgcaaaatgcatgccaccatgggttagtcgatccaactgtcaacctaaaggaggctatggatgatataaacggtatgtttgggagaccactgaacttgtgcgacagagcaaagcggaaagccaacgcactgtcagatagaagaaaagctgccccagcttctggttgtttctccatattagctgctgacgtggacctagaagataataaccctaccagcaaagccggtcagaacggttcttgtcgatgcccaggatggtctgtgtctgttcgagcccacagtcgacacccgtgacgtctcatggcagagatcaacgatatgtatagacgacctggcatgggt

SEQ ID NO: 3592 - DNA, 856 bp, Zea mays
  misc_feature (766)..(766): n is a, c, g, or t
  misc_feature (774)..(774): n is a, c, g, or t
  misc_feature (792)..(792): n is a, c, g, or t
  misc_feature (817)..(817): n is a, c, g, or t
  Peptide Sequence Number=SeqID_9810
  Probeset Number=SeqID_17995
gaggactggccacctgtcctccgccgcatcaagggcctcctcgggcgtcgtccgtcctccgtcatggccacacgacactggtggacgtcgtcgccgcgcccctacggtgtaggtggcagccagagactcactttccaccttccctgtggtgagatgaccgtgacgctgcaagactgttttatttcgcttggtctcagcattcgtgctcgtctagtgaccggtgcgccatctgcgcctgctctgacttctgcgcgcgcagtccgcgcactgtagcgttgtcagccgaccgttgagctcgaccgttgctccgcttggcacaccggacactgtccggtgctacaccggacagtccggtgaattatagcggagtgtcttcctaaattcccgaaggtggtaagttcagcttcgagttccctggtgcaccggacactgtccggtgcgccagaccagggcagccttcggttgtcttttgctctctttatttgaaccctttcttggactttctattgggttgtgttgaacctttggcacctgtagaatgtatgatctaaaacaaactagttagtccaattatttgtgttgggcaattcagccaccaaaatcaattaggaaaaaggtgtaagcctaatttcctttcagagctcattgaaggcaagttgtgcccttgaccacttttgttacccaataatgttctttataatcatttaccatgcattgacttaattttgatgggacccgataggtcaccctagattgtttatctctntaccttgntatccctgaatcacttgngtagttttgctattgctttacatgngtttggggatatattttgttatatccatgttctagttat

SEQ ID NO: 3593 - DNA, 704 bp, Zea mays
  misc_feature (10)..(10): n is a, c, g, or t
  misc_feature (16)..(16): n is a, c, g, or t
  misc_feature (51)..(51): n is a, c, g, or t
  misc_feature (93)..(93): n is a, c, g, or t
  misc_feature (105)..(105): n is a, c, g, or t
  misc_feature (141)..(141): n is a, c, g, or t
  misc_feature (158)..(158): n is a, c, g, or t
  misc_feature (168)..(168): n is a, c, g, or t
  misc_feature (702)..(702): n is a, c, g, or t
  Probeset Number=SeqID_17996
ggcattcacngggganaccaacgctgaggttgcttcaacatgagcatccancagaccaacatggtccgcgaaggccgtgcagcgcgccttttngtgtcaggcatngtttacgattttcagagaaagtcaaggtcgtgcttnccagcatgtcatgtaanctgcaaagcnatcatggagttccacttttgctgactctggtgacagcgacaaaccctctcctgtggaggagttcccaatgagagaatggagcatccgcattttcatgcttgatgaggccggcaacgagcagcctgccgatgtcttcaccaaggttgtttacaatctgcatccaacattcgagaacccagtccagactttcaccaaggctcccttcgcgtgtaccaacgagggatggggtgaattcgagattggcatcgactgctacactacagagaagacgaagctggcgcctatcgtgcacgacctcaacttcctgcagaacaagtacgagagtgtccacagtgtcgtcttcaagaacccttcgcaggcacttcaagagaagcttcgcgagacgggtccgcttcccaccgacgaggaccggggcaagaagaagggtggcctgggaggtagcgccggaggccgcaagagcgcgcaacaaaagcacgactacgagaagatcgccgaggcgctggagaagctcgagggggggcccggtacccaatngt

SEQ ID NO: 3594 - DNA, 465 bp, Zea mays
  misc_feature (23)..(23): n is a, c, g, or t
  misc_feature (85)..(85): n is a, c, g, or t
  Peptide Sequence Number=SeqID_9811
  Probeset Number=SeqID_17997
cttgtatacatgctccctccctntcttcaacccacttattagctccttatccacatcgtgcacagtattgtccaccttcggtctnccgtccaaacacactgcgcctttgacccccccgaccttgaggtacaccatctccacgtccccctatgccgcctcagctgacgccaccgccaggacgaaacccagcaccgccgtcgccgtcgcacgggccagccatgccccggacgccgccattccgcgaggcaagacctcaccctcctacgagtcgcagaaggagaaaaacgagcagacagagagacagagacgcaagcagtggctctgcgcggcctcaggggtgagacgctgacactctttgttcccaccgctgctgggagtggctgtggcataaatagcagcagatgactggttgagggaggaaggaaccgaaaaccaagaggaaggggagcggagcggagggcacgg

SEQ ID NO: 3595 - DNA, 478 bp, Zea mays
  Peptide Sequence Number=SeqID_9812
  Probeset Number=SeqID_17998
cctttttccttattttcagcaacaccaattttttccattcaaccaactgtttacattgaaccctgctgcttttttgcagcaacaacaatttttcccattcagccagttaggttctgcctacgttcagcagcaacaattttttccttttaaccaattggccgccctgaacccctttgtttttttccagcagcaaatactactcccttttggccagctaggtacaacaagccccgcttcctttttgacccaacaacaattgcttccgttttaccaccagtttgtggctaaccccccaaccctttttcaactgcaacagttgcttccctttgtccaacttgctttgacaaacccagcagcctttttccaacaacccatcattgggggggcccttttttagattgcttattagttgtaattcaataatgaagttttttgggtgaggtatggggccccctagaaataaaaagttttttttccc

SEQ ID NO: 3596 - DNA, 504 bp, Zea mays
  Peptide Sequence Number=SeqID_9813
  Probeset Number=SeqID_17999
gtcggggcctctatggcgggcgggggatttttgccagaacattgggatcctgggcctagcttatgggggcgtgatgggcgaccggaccacctctaattgctcgtcggagcagatgttccgccgcaaatccgctcctcgccgtggccgacgtcacccgaacgaccatccatgctcctccttcgttgcttggtcttcttgacgggtgctgacagcaagaatcccggcggctccagcttggagataagcttcctctcaagtccgggggaatgtcagcaccggtgacaagaacgcgacagcaatgacaagagcaccaccagcagcaaccatgtcgatgccggcagaggcacaagcgggtgatgggcggcaagcgcgggagggtcgtttaaactcaaagtattataggccgcagtgggctgtgtaagccgtggggctgtgtaagccgtgtgggctgaaaccgtgagtagtaagctgaactattaaaccgtctaaaaaaaaaaaaaaaaa

SEQ ID NO: 3597 - DNA, 320 bp, Zea mays
  Probeset Number=SeqID_18000
caacggccccccccctgtggctgggaggagtgctacaagaaaaatatttggcggatccaatactaaaggttggtaaaagtaatcaacacactgttgacatattagcatggtggaaagcacacaaagaagaatatcctctcttgggccagcttgctcatgatgtcttagctatgaaagtgtcaacagtagcttcagaatctgcttttagtgctggtggtcgtgtactcgatccatcttgtactcgccttgaccctaccatggtagaagcactggtctacaccaaagattggatagctagagcaagaaacggttccaaggct

SEQ ID NO: 3598 - DNA, 1546 bp, Zea mays
  Peptide Sequence Number=SeqID_9814
  Probeset Number=SeqID_18001
actagcaagacgatcaagaagaaagaggccagctccttaagccatgccagaggtagagaaaaaaggaaaaacgattatggagtcatgggaagtcaagaagataatataattgacaataccaacagtttggcagagacggttgagaatactagagaaaataacaatactactaagataaaaagagggagttcctgtggtcgcccaaaggtagaggacgaagcaggacaactgcgggaagtgatgcaacaataaatcaggaggattatgaaatagaatattctacttcagcttcagatgaggattcatgtaaaaggcattccaacagttacggatcggaaggaagggcattgcgaaggtcaagtaggaaacggaaacaggtgacatacatggaagatggtcacgaagcatatggcaatgatgttccaatgcatcaaaacgatgaaaataacccaggccaacctgctgcagccgcagacgtggctggagaagacacaggatttaacatttaccatcaggatacaagtgaactaaacagcagtcagatgcatacaggtgcaggcattaccgaagatatcaatgaagattcccagcgttttgagttacgggaggacaatcaggtggattcaacaccgaaagactatttgttcaatggtggtggtttttgtatggagggcgagggcgagggcgatgaacaagaaccagcgtgtgatcaatctggtgcagaagtagaacctggaccaagtggtccatgtggcgccatggatgaagtttcagagagtgcaagcatatcgacggctatggagtgtaccgagaatgcaagaatggaggcacgtggtgcatcttcgtcgcagcaaagacgcaaggcaagccgaggtttgagtgccatgccgacgcttatcaagcgtaggagaaaatcgtgacttatttgcagtttcactgcatgtatagcacgccattacggcctctgtttggttcaagcgcttatgattcgcatcagtctggccaccagtgatgagcgctgttttgcggacgcaaaatgcacatctgtgatttagttcagtcttttttttcatctgattggttgcttgcatcgtctcaaaaaaaaaaaaaaaaaaaaaaaaaaaaaaaaaaaaaaaaaaaaaaaaaaaaaaaaaaaaaaaaaaaaaaaaaaaaaaaaaaaaaaaaaaaaaaaaaaaaaaaaaaaaaaaaaaaaaaaaaataaattgggccgcaatttcaaacaacatcaactttaaaaaaaacctctggcaacatcccatcttaatacgttttagaataaaaaacccgtgcgggcactaaacgtaacaccctaaaagcccacgccgattgcccttgccaacgtctcaacatactgaaccgcaaacgccaccccccaaaaagcgctaaactaaaaaacaaggaaaggcccgctctcaaactcccctaattaactctctaaacaccaaaaggcctccctcttctaatatataaaatatctcccccgacaggttactccttcttaaatcgacgctctaattctagagct

SEQ ID NO: 3599 - DNA, 578 bp, Zea mays
  misc_feature (291)..(291): n is a, c, g, or t
  misc_feature (353)..(353): n is a, c, g, or t
  misc_feature (438)..(438): n is a, c, g, or t
  Peptide Sequence Number=SeqID_9815
  Probeset Number=SeqID_18002
aagaaaaacaaaaaaacaaaaaaaaaaaaacagcaaaaaaagaaaaaaaaaacaaaaaaaaaataaatagaaaaaaaaaaaaaaaaaaattaaaaaaagaaacaaacaaacaaaaaaaaaaaaaaaaacgagggatgacgagaaaaaaaaggaaaaaaaaaaaacacacaaagaagaaacaacacaaacaaaaaaaaaaaaaaaaaaacacagcaaaaaaacaagaaggaaaaaaaaaaaaaaaaaaagaagaaacggagaaaaaaaaaaaagaagaaaaacaaaccggtntaaaaaaaaaataaacaaaaaacgaatgcagatctatgttaaaatataattattataataanaaaaccacccccccaccacaaaaattattatataattaaaaaaaaaaaaaacaccaaaaatactaacccccaagaggatccgcgnccccggcgccggcgccggcgcggggcctatccggcgtgtccatctggtccggcgaccccgcggtgggcgtcccgcatctgtctccctccccgccgccgcctcctccactgagtactgacgagtgacgagcgaacactaat

SEQ ID NO: 3600 - DNA, 651 bp, Zea mays
  Probeset Number=SeqID_18003
aaaatatatgcttttaaacaagacccgtgacttaaatgagttgtccagaaagggggttgataaaataataaaagtgtgcatgaagcaagattgcatatctcctaacgataacacccgtaaaagggggtccattccaataataattttgtgtggcagggcgggcacccgagcccaactcattccctttttactccaaataagggaaggggcggtaactattccccccattcattttcagggcgaggtttttgcaaaaggtcttttttcattttttgaagaaccccttcctgtgctggagagactaaagcattttaaaaaggccaaagttggccgtagtttgaagttgttccccagatccctttctcccctaaaggggatgcccatcagacccatacccattttaaggcccccagcctgtccaatgtacatgtttattaggaaaggaccccccgctaaatttgcaaatgtaaaacattgttgggtaagctctcaaaaaaaaaaaaacaaacttttgccctaaggcaaaaagctgtatgtcatgttttaaaagtaaaatgtgatttttgaggggtttccctttaggaacattaacatttaaactgtattttttggccaaaaaactttccctggagaaaatactttttttgtttt

SEQ ID NO: 3601 - DNA, 562 bp, Zea mays
  Peptide Sequence Number=SeqID_9816
  Probeset Number=SeqID_18004
actattaacctttctctttttttttatctctttatttttttactcgtgttatctttgtttgtctgttccagaccacttcgtcctccgaggcgagcaaccatcaaggattttttgggagttggtttttttccaaagaggcaaggggggagttccccccagctcactgtatttcaaatccaaaggcaaaaaataatttccccacaatctctgaacagatgtcaaaccacagttgaatccgacgctcgagtttgcaaaaacaccttataaaaaaaaaccttttcatccttctttgataagggcccaaaaaaaattgctaacaaaaaaggatccttggccctcatgagttaaatatgatacacaggacctaaactgtcagctttttttcattcgggtaaaattggactgcttggtatcccaaaaagtgccgtccggggaggaacccaaaaacggaaaaaatgttgaaaaatgtctttggcataaaaagattgaacaaaaccaactgagggaacttgtcaacatttttctttcgctatcttaagctcaaaaagctgggtcataaccg

SEQ ID NO: 3602 - DNA, 355 bp, Zea mays
  Probeset Number=SeqID_18005
aggacgcgtgggcgcagcgctctgagaatgatcgaagacgcagaggagagggggctgatctcgcccggcaccacgacgctcgtggagccgacgagcggcaacctggggctgggcctggtcctcgtcgccctccgcaagggctacaggttcgtcgcggtcatgccaggccagtactcgctcgacaagcagatcctgctgacatacatgggcgcagagctgtacgtaacaggtatcacatgctgtgctgccacagtggcaaggcaagtaatgagttgagcagagcggaagaactgcactgcactgcactcacccttgcgtttggcaagcgcaaatccatccctcgggttcccgggca

SEQ ID NO: 3603 - DNA, 210 bp, Zea mays
  Peptide Sequence Number=SeqID_9817
  Probeset Number=SeqID_18006
tttaatttgaataaatgaaatagaaaatggacaagcaaggggtgtatcctggaggccgttagtgaagcaagtgctgttgaaattatcaatctcaaggatagcctaaatgaatgggtcactaaagtgggcgatggtggtagtggaaccacagtttttagaaaagcaaatgataaagctaaacataataaaataatcaaggctaatccagaa

SEQ ID NO: 3604 - DNA, 622 bp, Zea mays
  misc_feature (1)..(1): n is a, c, g, or t
  misc_feature (487)..(487): n is a, c, g, or t
  misc_feature (492)..(492): n is a, c, g, or t
  misc_feature (521)..(521): n is a, c, g, or t
  misc_feature (536)..(536): n is a, c, g, or t
  misc_feature (561)..(561): n is a, c, g, or t
  misc_feature (566)..(566): n is a, c, g, or t
  misc_feature (573)..(573): n is a, c, g, or t
  misc_feature (587)..(587): n is a, c, g, or t
  misc_feature (589)..(589): n is a, c, g, or t
  misc_feature (592)..(592): n is a, c, g, or t
  misc_feature (597)..(598): n is a, c, g, or t
  misc_feature (600)..(600): n is a, c, g, or t
  misc_feature (602)..(602): n is a, c, g, or t
  misc_feature (604)..(604): n is a, c, g, or t
  misc_feature (607)..(607): n is a, c, g, or t
  misc_feature (610)..(612): n is a, c, g, or t
  misc_feature (616)..(616): n is a, c, g, or t
  misc_feature (620)..(620): n is a, c, g, or t
  Peptide Sequence Number=SeqID_9818
  Probeset Number=SeqID_18007
ngggtaccgggccccccctcgaggagaccggcatcgatgcgaggagcggcaaggtcgtggtgaagatcgatccgacctatttccgcccgaccgaggtcgatctgctgatcggcgatgccagcaaggcgcggcaggtgctgggctggaagccgaagcgaagctttgcgcagctcgtcgaagagatggtggcgagcgatctggcggaggccaaacgggatgtcgcgaatggcaagcataccgtttgagctgaagggcaaggtcgtctacgtcgccggccatcgccgagttcgcgctcatggtagccgagatcgtcggctatcgcggtgagatgatctcggacacctcgcgccctgacggcacgccgcgccaactgctcaatgtcggcaggctcgacaagctcagctggcgcgcgacgacctcgcttcgcgatggcttgaagcgcgcgtatgaggcgtatcaagcggcggcgcaggtgacggcgctatancgtancaacctttgtctgcgcgccccgggcgcanataacatcatgttangtttatcgcataactgggtaattgngttancccggcnagagcctattatcncnccnatcanncncntntcngcnnngacnatcnct

SEQ ID NO: 3605 - DNA, 728 bp, Zea mays
  misc_feature (73)..(73): n is a, c, g, or t
  Peptide Sequence Number=SeqID_9819
  Probeset Number=SeqID_18008
tcgagtcagctacgtaggcccccccccccccctccatttcatagccaaaatggacgctgccaagttggctaancttcagcagagcgtgcgcattggaggaaaaggtaccccccgccgcaagaccaagcgtgtccacaagacctccaccacggacgacaagaaactccaaaccacactcaagaagatgaacgtccaacccattcaggccattgaggaagtcaacatgttcaaggaggacggaaacgtcatccacttctccaaccccaaggtccacgccgccgtcccctccaacaccttcgccatctacggcaacggcgaagaaaaggaactaaccgaactcgtgcctggaatcctgaaccagcttggtcccgacagtctggcgtctctccgcaaattggccgagagttatcagagtctgcagaagaaggaggctggtgagggaaagaatgacgatgaggatgaggatgatatcccggatttggtggagggggaaaactttgagggtactgttgagtaaaatgcctttctgtcaagagggtgagaaaaaaggaaagttgtctcttttctttccttagctatatgtcctagcggaatttattaggatattttgttgaggaatttttttattttgaagaaaaatgaaaaaaggaatttcttgggacctgcattattattatgaatgcgagtgtgtgtctagtctattgaggcgaatgatatacataaaccac

SEQ ID NO: 3606 - DNA, 555 bp, Zea mays
  Peptide Sequence Number=SeqID_9820
  Probeset Number=SeqID_18009
gacacatcacaaggtaaagaaactaagtgagatttcacacagaaagagagagacagagagagatggagttgaagaagaaggcattggtgaaggttgcttttttgcttttcctgttgggcttcactgcaactgttgatgctcgctttgatccaagctccttcatcactcaagtacttcccagtggtgatgctaattactatgtgaaatccacaaccacagcttgctgtgatgcatgcccttgcacaagatcaatccctcctcagtgtcgctgcccacatgttggggaaagctgccactcaccttgcaaagcatgcatttgtacaaagccaatccctccaaagtgtcgttgcgctgatatcactgacttctgctatccaaagcgttccccctctgaagctgaagctcactaagaatgagcatgttccaataattatgatgtgggacaaagtcacttttaggctttgttttcatgtatggaaatgaattaatcgaataaaagttactttggccattcagtttgttttcatcaaactgttctggtcagagtgtttgtgc

SEQ ID NO: 3607 - DNA, 598 bp, Zea mays
  misc_feature (16)..(16): n is a, c, g, or t
  misc_feature (598)..(598): n is a, c, g, or t
  Peptide Sequence Number=SeqID_9821
  Probeset Number=SeqID_18010
agctggagctccccgnggtggcggccgctctagaactagtggatcccccgggctgcaggcccccaaatgggtttctcaatacatcaagtaagacaaacacacgctgtgttattattaagccgtaagcttgcttctataaatcctgttttttgtatcgtcttgcttcgttttttagagctcactagtccccccccccccgatccatcactacacacatctcctattgcaaacgaacataaaacactacctaagagatcaatatggctggagtgatgaagttggcatgcttgctcttggcctgcatgattgtggccggtccaatcacatcgaacgctgcgctaagctgtggctcagttaacagcaacttggcagcgtgcattggctacgtgctccaaggtggtgtcattcccccagcgtgttgctccggcgttaaaaacctcaacagcatagccaagacgaccccagaccgtcagcaagcttgcaattgcattcaaggtgccgctagagccttaggctctggtctcaacgctggccgtgcagctggaattcctaaggcatgtggagtcaatattccttacaaaatcagcaccagcaccan

SEQ ID NO: 3608 - DNA, 827 bp, Zea mays
  Peptide Sequence Number=SeqID_9822
  Probeset Number=SeqID_18011
aagctggagctccccgcggtggcggccgctctagaactagtggatcccccgggctgcaggaattcggcaccagagagagagagagagagagagctcactagtccccccccccccccccgacaacctcataatcactttcgaaattacatttacgctttcttgcaatcaaattttccgatcttaagttcagaagacgatgtcagaggtggaaatagagaacgctgctacgatcgaaggaaacaccgctgcggatgcgccggtgacggatgcggccgttgagaagaagcctgcagcgaaaggacgaaagacgaagaatgttaaggaagtgaaggagaagaagactgttgctgccgctccgaagaagagaactgtttcatctcatcctacttacgaagagatgattaaggatgcgattgttacgttgaaagagagaactggatctagccaatacgcgattcagaagttcatcgaggagaagcgtaaggagcttcctccaacattcagaaagctgttgcttctcaatctgaagagactcgttgcttctgggaagcttgtgaaggtcaaagcctcgtttaaactcccatcggcgtcggctataagcatcatcccctaacgcgggagcggagaaatctgctcctgcgaataataaaccggcgactgtggcgtgtaccacggcgaagagaatagccgctgcggcttcctgggctaataacacgatcggcgttaaacctacgactgctgccgctaacaaagcgccccctaagtctaaagctaaacccgcccctcgaggccttgctgctgcaattaagaggaaagctgttgatggc

SEQ ID NO: 3609 - DNA, 240 bp, Zea mays
  Peptide Sequence Number=SeqID_9823
  Probeset Number=SeqID_18012
cgttgctgtcgcgccgcgttagcaaccagccgcgtctgccacaggtcgtggctcgcttctcccctgcttttccgcgtccccgcagcgccgacgacgactgggtgcgcagcgcggcgccgccgttctacgccgggcgcccaagtcctcgacgggaccttctctggcgacgagcgccccaccaggccctaagctcatatgagcacggagcatcaatgcaagctaataaacccgacagcaacg

SEQ ID NO: 3610 - DNA, 641 bp, Zea mays
  misc_feature (601)..(641): n is a, c, g, or t
  Peptide Sequence Number=SeqID_9835
  Probeset Number=SeqID_18013
aagctggagctccccgcggtggcggccgctctagaactagtggatcccccgggctgcagggagagagagagagctcactagtccccccccccccccccacgaggatcgacaggtgcggtgaatcagctgactcaacctaccatcctatcgccatcaccagttccacggctacggaagcggatccaaagttcgtcgccctgtcttcccttagccgcgaatgaacgcagctcgcactaggcatcctcgatgctgggccaatcacacggtaagcgcctttgtgggagcttacatttcactccctcagaatcaatagagcacctcgcccttcatcaatactcttgctgtcctcaacagctcagctgaaacaatggccccatctttcatgctgataccaatatcaagcttcccagaagcatgtccaatcgtcacagttttgctcgtcaccgcccctgaggaagatgaggctttcgcagcagcctctccgccatgccgcgcctctgccgacatcatcttccatgcaatactcccctccacttgacatgcagccccaagacacagcgctagcgtcagaggaacagccttatgtgcctgccccatagannnnnnnnnnnnnnnnnnnnnnnnnnnnnnnnnnnnnnnnn

SEQ ID NO: 3611 - DNA, 586 bp, Zea mays
  Peptide Sequence Number=SeqID_9836
  Probeset Number=SeqID_18014
gcaaaaatgtaagtcagcgtgcgttggctcatatgagcagagcttgcttccgcatctcgctactctccgtgccttgctcgccggtctgctagctgcagtacccacgggagccggaggtcatcaaggcggcgtcggtaaaccatgtccatggccacaggccacagctgagcttcctccgctgcccgccactcgtgccatggcaacgacagatattgaaagcatgcaagtagagttgctggccggttattacaaatcgaggttcagcgtgggatataaataatggattttcctgtgtgtattagggttgttgtggcggctgcttcattcgtttattcttgtgacttgttgctagcgattggagtgagctgcttttgtgtgtgtgtgtgtgtcaccatttcgtgctatcagacgtacgacatggaaatgtggttgactactatatatggtacacatacatataataataatcatctgtgttggtgaacgtgcctctgatgaataaaaaaaaaaaaaaaattgtatttatcaatttaaaaattaaaatcgaataaaatgagaccaaatacccgtaaaaaaaaaaaaaaaa

SEQ ID NO: 3612 - DNA, 1210 bp, Zea mays
  misc_feature (1)..(585): n is a, c, g, or t
  misc_feature (1186)..(1210): n is a, c, g, or t
  Probeset Number=SeqID_18015
nnnnnnnnnnnnnnnnnnnnnnnnnnnnnnnnnnnnnnnnnnnnnnnnnnnnnnnnnnnnnnnnnnnnnnnnnnnnnnnnnnnnnnnnnnnnnnnnnnnnnnnnnnnnnnnnnnnnnnnnnnnnnnnnnnnnnnnnnnnnnnnnnnnnnnnnnnnnnnnnnnnnnnnnnnnnnnnnnnnnnnnnnnnnnnnnnnnnnnnnnnnnnnnnnnnnnnnnnnnnnnnnnnnnnnnnnnnnnnnnnnnnnnnnnnnnnnnnnnnnnnnnnnnnnnnnnnnnnnnnnnnnnnnnnnnnnnnnnnnnnnnnnnnnnnnnnnnnnnnnnnnnnnnnnnnnnnnnnnnnnnnnnnnnnnnnnnnnnnnnnnnnnnnnnnnnnnnnnnnnnnnnnnnnnnnnnnnnnnnnnnnnnnnnnnnnnnnnnnnnnnnnnnnnnnnnnnnnnnnnnnnnnnnnnnnnnnnnnnnnnnnnnnnnnnnnnnnnnnnnnnnnnnnnnnnnnnnnnnnnnnnnnnnnnnnnnnnnnnnnnnnnnnnnnnnnnnnnnnnnnnnnnnnnnnnnnnnnnnnnnnnnnnnnnnnnnnnnnnnnnnnnnctctgtggtcaccaatcgtcctgctccttttcccctggtgtgctcaacgcctggtgcttcgacctcggcgagttcccctgcgagcgacacctcggctcgactccctctcccggctgtgagctcctctgtttgcgccggtccaccgcagcagcctcaacatcccctctgcgttgcgccctcgacgtgctcgacaaaatgccgcagcgagcagcggtcatgagatcccctccgtgttgcttgcatcggcccgatctgcgcagtccctgtcgcgacgccaaaattcttcggtgagacctcgctgatctgtgttcattgattttatgaaattactgaactaataagctctttaataattgtgtatgtcgtttaatcgcagcaccttgtcgttgttcacgcttcgcgcgtcgtttctcgacagaaagccaaaccgacatgcacgcatgcgcaactccactcgggtttcggccaggttgttcgccttgaatgattcgcgatctgttttatttacgtatttggtcgatgatgtgtgtgtgtgaatatgtgcgtgaaattataattgtataaatgaacacgtatatagaagaaaatgaagtagaacaannnnnnnnnnnnnnnnnnnnnnnnn

SEQ ID NO: 3613 - DNA, 1210 bp, Zea mays
  misc_feature (1)..(25): n is a, c, g, or t
  misc_feature (626)..(1210): n is a, c, g, or t
  Peptide Sequence Number=SeqID_9837
  Probeset Number=SeqID_18016
nnnnnnnnnnnnnnnnnnnnnnnnnttgttctacttcattttcttctatatacgtgttcatttatacaattataatttcacgcacatattcacacacacacatcatcgaccaaatacgtaaataaaacagatcgcgaatcattcaaggcgaacaacctggccgaaacccgagtggagttgcgcatgcgtgcatgtcggtttggctttctgtcgagaaacgacgcgcgaagcgtgaacaacgacaaggtgctgcgattaaacgacatacacaattattaaagagcttattagttcagtaatttcataaaatcaatgaacacagatcagcgaggtctcaccgaagaattttggcgtcgcgacagggactgcgcagatcgggccgatgcaagcaacacggaggggatctcatgaccgctgctcgctgcggcattttgtcgagcacgtcgagggcgcaacgcagaggggatgttgaggctgctgcggtggaccggcgcaaacagaggagctcacagccgggagagggagtcgagccgaggtgtcgctcgcaggggaactcgccgaggtcgaagcaccaggcgttgagcacaccaggggaaaaggagcaggacgattggtgaccacagagnnnnnnnnnnnnnnnnnnnnnnnnnnnnnnnnnnnnnnnnnnnnnnnnnnnnnnnnnnnnnnnnnnnnnnnnnnnnnnnnnnnnnnnnnnnnnnnnnnnnnnnnnnnnnnnnnnnnnnnnnnnnnnnnnnnnnnnnnnnnnnnnnnnnnnnnnnnnnnnnnnnnnnnnnnnnnnnnnnnnnnnnnnnnnnnnnnnnnnnnnnnnnnnnnnnnnnnnnnnnnnnnnnnnnnnnnnnnnnnnnnnnnnnnnnnnnnnnnnnnnnnnnnnnnnnnnnnnnnnnnnnnnnnnnnnnnnnnnnnnnnnnnnnnnnnnnnnnnnnnnnnnnnnnnnnnnnnnnnnnnnnnnnnnnnnnnnnnnnnnnnnnnnnnnnnnnnnnnnnnnnnnnnnnnnnnnnnnnnnnnnnnnnnnnnnnnnnnnnnnnnnnnnnnnnnnnnnnnnnnnnnnnnnnnnnnnnnnnnnnnnnnnnnnnnnnnnnnnnnnnnnnnnnnnnnnnnnnnnnnnnnnnnnnnnnnnnnnnnnnnnnnnnnnnnnnnnnnnnnnnnnnnnnnnnnnnnnnnnnnnnnnnnnnnnnnnnnnnnnnnnnnn

SEQ ID NO: 3614 - DNA, 924 bp, Zea mays
  misc_feature (1)..(42): n is a, c, g, or t
  misc_feature (924)..(924): n is a, c, g, or t
  Probeset Number=SeqID_18017
nnnnnnnnnnnnnnnnnnnnnnnnnnnnnnnnnnnnnnnnnngtcaatataattcttggtggttatgataaggatgttggtgcttccctctactacatcgactacattgcaaacttgcacaagattgacaaaggtgcttttgggtacggatcatacttctgtttgtctctgatggacaagttgtcccccccggacatgactgttgaggaacgcagtagatcttgttgacaagtgcatcaaggagattcggctgcgattggttgtcgccgcctcagaactttgttatcaagattgtcgacaagaacggggcaaggaagaaccccaggcgtgaactcgtcggtgacaatgcacctgctaaagctccacccccagttgtttctgcctaaggcataaactcgtttaaggttaaaatgtgttagttgtttttcagcaatgctacttatgcgatcacaggaaactggtggggggcccccaactgttttatcaattttagcccagtcgtgtaattctgtttctgcactattcatgtctgctgagtacaagtagtgtttcacgctcaaacgagttcatgcctcaggcagcaacaactgcggttgcagcttcagcaggtgcattgtcaccgacgagttcacgcctggcgtactccctcgccccgtccttgtcaacaatcttgataacaaagttctgaggcgcgacaaccaatcgcagccgaatctccttgatgcacttgtcaacaagatctactgcttccctctactacatcgactacatggcaaccttgctcagaatcgacaaaggtgcttttgggtccggttcgtgcttgctgcgtgtctcgtatggcactatttgcacctcccgtctatgtgttttcattggtgagggtgttttggtgggacgtgctctaggacttttgggctgcctttn

SEQ ID NO: 3615 - DNA, 1107 bp, Zea mays
  Peptide Sequence Number=SeqID_9838
  Probeset Number=SeqID_18018
cccccgcgtccgcccacgcgtccggtaggcattcattaagaccgctggtacaatatacaaggaaaatccaagatggcatatttgatgtatcaaatgaggttagattttagttacttcctttcctttctcaagtgtttgttcaaggttgtgctaagcattggtaattactgaaatgacaagtttatagcacggtaataattcatttaatgtgggattgtcttaaattttgccaccagtttgcatgattattgcaaacttgccactagaaattgtaaaaatcaacaaaagaaaaagaattgacattcaagtcacatttttgtacaaaactaaaaaacctcttatactcttcactgcccccaaatccttttgtctgtataaatctacaggaatgttgaagtctttctagaaacctgtagaagattgattaaaaatgtttgtgtcttatctgatgcatttgcttacttgttcattcaagaccagttgaactaccatgtgaaccatatgatgttatatactccctccattttagattataaaatgttgtcttttctagatacattgttttactacgcatctagacgtagtgtatatctatgtgcatagcaaaatccatgaatctaggaatggccaaacttcccgctgtggtgcaaaatgcaccaaacggtgcgggtgcattcattaaggccgctggcagaatatgcaagggggtgcgggatggcctttttgatgggtcaaatgagtccaacggggtcgaagttggttacgctgttcccaactcttttgcaggtggtgttggcttgtcctctcaggatgggggctgctgcagtttattgttggcagcaagtctttcaaatgcacaaggttctcccttcagtattttgatgtttgcctatagctggacccggatgatttgttctttcatccctcatgtttcaatccataagcatttcatgttcagtgttttcctgtccttttgcaaaaaaaaaaaaaagcaccaaaaagagtaatagaaaacaaaaaaaaaaaaaaaaaaaaagaaaaaaaaaaaaaaaaaaaaaaaaaaaaaaaaataaaaaaaaatagaaaaaaaaaaaaaaaaaagcggcc

SEQ ID NO: 3616 - DNA, 554 bp, Zea mays
  Peptide Sequence Number=SeqID_9839
  Probeset Number=SeqID_18019
ggcaaccagctggaggatgcccgtcccctccccgattccaccacccagaaggagagccccccccccctggtgctccgcttgggaggtggtatccagatctttgtgaagcccttgactggcaagcccatacccctggaggttgagagctccgcccccatcgacaacgtgaaggcaaagatccaggccaaagagggcttccccccagcccagcagggtttgtttttccccggcaaccagttggaggatgccccccccctagcagattccaccatcccaaaaggagagccctccccccctggtgccccccccccgcggtggtcagtaacccatggttcatttaagctgctgctgtacctgggtatctgcgtcgtctggtcccccctggggtccccctatatggaggtcgtcgtctaataaccacctgtggtttgtgggccctgaaccggggttggggctccgttggtttaagggccccgttgtgccccctgggtgggcccccaacctcttctgccccagtagggcttgaacccctatgaagtttgaggtttgccctt

SEQ ID NO: 3617 - DNA, 661 bp, Zea mays
  Peptide Sequence Number=SeqID_9840
  Probeset Number=SeqID_18020
cccacgcgtccgcggacgcgtgggcggacgcgtggggcgacataagaaatacaggtccggaatatgctgtcataacagctcttgcattatgacagagtatgtttgaaatgttggatcaagagatcgaagccacgatcatgcctcttgtgtatcgctacaagatttgggtgttttgcaaggagggggagaaggtctcagaggtgaactttcacgtgattggccacaagtgcagccacttgagatcgtacaacacccgaacaacataccgccctgcaaatttatccggaagcagctcacctttaacagacttattcgacaacaacatatagagaagaaaccattgacagagccagtatgctcggaattcggctcgaggaagaaccggaggaggaaacattgtttcggggcgtgcgtgcttgccaaacttgaagactcccagccctttattggccctcatcttggttagattcagttcattccatgagtgtgagcggctgtggcaacttccaccctgctcgtccagggtgcaacaacccacatggacggtgcaaactttatcttagaatgttgttcgacggcgtgaattctgacactgtggatgaaacgtgatcacatacttactgttatctactatggttgaagaatgtgtgcccccctgact

SEQ ID NO: 3618 - DNA, 419 bp, Zea mays
  Peptide Sequence Number=SeqID_9841
  Probeset Number=SeqID_18021
gccgcacttgctttgcttctcctcagtgtttgaatttagaagatatcgtctacttgaattcaagatgcagaacgaagagggtcaggtcacggaactctacattcctaggaaatgctctgctactaaccggatgatcacatcaaaggatcatgcctctgtgcaactcaacattggtcatttagatgctgatggcatctacaccggacaattcactaccttggctctctgcggttttgttcgtgcccagggagatgctgacagcggggtggacaggctgtggcagaagaaggtcgaagccaaacaaatctaaagagagcctttttaagctgtctttttgctttgttctgaatgtttgttatttaattcagaaatgatcatcggacatactgaagtaacgatgtttgcttgactcttggttt

SEQ ID NO: 3619 - DNA, 533 bp, Zea mays
  misc_feature (500)..(500): n is a, c, g, or t
  Peptide Sequence Number=SeqID_9842
  Probeset Number=SeqID_18022
atccatgtcgcgcacaaatatttttcagccgcctagccgtcctcttcccttgatattccttggcgtcgtcttcaactggaccaccggccaccagcctgccgcgccccaccatgtgaccatcgagctcttctctgacggccatccttccttgtcagctgcggccaagctgctcgtccgtggtcccgggtgcccgacctcttcctgcgcgccgtcgttcccctcgcagctcgcggaggccgacctcggcaacgcccccatcgccgtggagttctcccggccgtctccagcctccctcccatggcgcgccatcacctcatcttctttcctgggtgcgccgttttccccagcggcaagccgcagccgtgcagcttgccctctccagccgcggtgcgcatctccatggcggtcgagctccccttccatggctgccgcgccctctgctcctcccagctggccaaggttcttcccatggcgctcggctttccccaggtccgaccggngctcctccttgctccatatcctttccccagcac

SEQ ID NO: 3620 - DNA, 599 bp, Zea mays
  misc_feature (561)..(561): n is a, c, g, or t
  misc_feature (564)..(564): n is a, c, g, or t
  misc_feature (566)..(570): n is a, c, g, or t
  misc_feature (572)..(573): n is a, c, g, or t
  misc_feature (575)..(575): n is a, c, g, or t
  misc_feature (577)..(578): n is a, c, g, or t
  misc_feature (580)..(583): n is a, c, g, or t
  misc_feature (585)..(587): n is a, c, g, or t
  misc_feature (593)..(593): n is a, c, g, or t
  Probeset Number=SeqID_18023
tggagctccccgcggtggcggccgctctagaacagtggatcccccgggctgcaggaattcggcaccaggagagagagctcactagtccccccccccccccccccactttcttctctgtatctctcatattttgcttaaaccctaaaaccctttttggattaggttttctccaaatcttatccgccgtgataaaatctgattgctttttttcttcatgaaagtttgatttgtgaaactcgatgattctctcacgctctgtctccgtgcttcatttgtgtggagtctcttcttcagcgccgtcgaagctcttatctcagaggctcaaggccccccccgctctcgcttatcgttcatctgcttctttccgtttaagctctctcaagcgacccgcgagccgacggggtcgtgcgtttccggctgcgccgcatgcaccaggcgggaaagggccgggtgcgccctttttggctgaccagtccgttccggggggctccctcgcggcatcccaccacgtctccatcgccccgccagattctccgtccgcgtcgccatctcctactcagntgngnnnnngnngngnngnnnngnnnggtcgngggccc

SEQ ID NO: 3621 - DNA, 437 bp, Zea mays
  Peptide Sequence Number=SeqID_9843
  Probeset Number=SeqID_18024
taggggccttttttttttttagcacaggatcgaatgtcacatctttactatataataggagttctatacaaaataaataaataattacattattaggagacaacggtccagcaacccaaagttgactgggagacgacggcctagacctctcacgaactcatcacagcatcctccaagcgcctcatcctgtggtacctgctcttgaccgagattataggagacgcctggccgtggtgtcggcgccatcacctatttggttcttcggctcccagtgcgacgtgtcgattgttccatgcacatctccctcgaacggcagcagaactggagtcgcagcgtatgccctctctctcttctatctcccatgcgatggcgcttgcttgaggatgcagaacgcaacgttctttttttggaagaactgggggattggcccggccggc

SEQ ID NO: 3622 - DNA, 802 bp, Zea mays
  misc_feature (309)..(309): n is a, c, g, or t
  misc_feature (344)..(344): n is a, c, g, or t
  misc_feature (347)..(347): n is a, c, g, or t
  misc_feature (394)..(394): n is a, c, g, or t
  misc_feature (474)..(474): n is a, c, g, or t
  misc_feature (491)..(491): n is a, c, g, or t
  misc_feature (505)..(505): n is a, c, g, or t
  misc_feature (511)..(511): n is a, c, g, or t
  misc_feature (528)..(528): n is a, c, g, or t
  misc_feature (561)..(562): n is a, c, g, or t
  misc_feature (622)..(622): n is a, c, g, or t
  misc_feature (631)..(631): n is a, c, g, or t
  misc_feature (662)..(662): n is a, c, g, or t
  misc_feature (698)..(698): n is a, c, g, or t
  misc_feature (700)..(700): n is a, c, g, or t
  misc_feature (711)..(711): n is a, c, g, or t
  misc_feature (713)..(713): n is a, c, g, or t
  misc_feature (715)..(715): n is a, c, g, or t
  misc_feature (731)..(731): n is a, c, g, or t
  misc_feature (742)..(742): n is a, c, g, or t
  misc_feature (752)..(752): n is a, c, g, or t
  misc_feature (757)..(758): n is a, c, g, or t
  misc_feature (761)..(762): n is a, c, g, or t
  misc_feature (777)..(777): n is a, c, g, or t
  misc_feature (785)..(785): n is a, c, g, or t
  misc_feature (787)..(787): n is a, c, g, or t
  Probeset Number=SeqID_18025
aggggtgaaaaactggactccccgcggtggcggccgctctagaactagtggatcccccgggctgcagggcagtatcctggaatgtgaaaccccgtaaatttttaaaatgaaatattcagattgacacaaaactgaccaatctattttctaacggccgtgcattggggtgctcataccgggcactgtaaaagtgcagggggttcagatgcggaatcggtcgggcaaggggcgtttgctgtcgggctgtcttgatggcagtggcagtggaaatggtggcgcctgccgccatggcgcatacggttccgtcgnccgccgtggacgccgcggatgccgatgcgacccancanaccgccagtgagtcgctgaccagcgatatcgtcgccaatggtcgccngtcagcggacgcgcctggactaagagcgtaccgccatcgcgacgatctacatcgtgcccacctggcgacggggcgttcanttcgcagaccggcgtcnacgatctggcccangccttnccggcgtgtctgtctcntcaccagcggcgctccatccctcaccggtcacnnccgttgtctctttctgcccgtctacacacatctatgcctttctctgtcgccgcctcttcncacatcgcntcgtatcccgccgcctgtcccctgttcttcntcccttctaggttgcttgcatatatctttcttgctngngtccgtctgtncntnttttgcttctcccctnttgcttagcanttattgatgnttctnntgnnttactttatcttttnttttcttntnggcgtttttcgggct

SEQ ID NO: 3623 - DNA, 490 bp, Zea mays
  Peptide Sequence Number=SeqID_9844
  Probeset Number=SeqID_18026
aaaaccatggtctctattcttatttttagagaaaaagagagaaaaaaatatgtccaacagtctaagatctaacctccttattttctcgaggtcgaataccatgccatgcgctgcgcaaatttttgccgctcgccaagctctcaatccactctgttgttcccagtccgcgccattttcctccattctcgcctcggcccgctcacctctcctctcgcgcccgccacggcagctgccgccccatccttcggcgaataggatttcttcaagatccagcggatcccaacgctggcgctggcatcggcggcacagagccgaagaagcggaagcagaagcctagtggcgcgctagcggtgctgaagaagaagaggcggaggccgctgcccttcatccccagcactgacccggcgcagcggctctggcagatgttgtgcctgctcgttttttcagcttgttgcaacagcaaaagagtattctccgggtttttttgatt

SEQ ID NO: 3624 - DNA, 410 bp, Zea mays
  Probeset Number=SeqID_18027
gagctttctagtcggcggccgccgcggatgagcgacgggcggttgacaaggcagccgatggtgctcgggagctgctccaggtgggcgcagcggagacccaggcacctgctcatacgaaaaatgcatgaccagacattaatctaggctactatatatactgactgtaagacggaacggggtgcagcgtttctaccacacttgtgaggccgcaggcgtgcatgtccatatatatgcatcaaggctggacgcattcagcttacagaggggagccgaatcaatctattgctggagtcctatcaatacacatggctggaatatagccgggctctctatgggagattgatttcggtgattgaagaatacatgcagacatacagagaaacttctagaatattacctctaacaccccc

SEQ ID NO: 3625 - DNA, 1055 bp, Zea mays
  Peptide Sequence Number=SeqID_9845
  Probeset Number=SeqID_18028
aggcagagaccgaggttggcaggaaaccctggaagatgagatggtaacttgagggataagttatcagaaatggagaagagttatgtcattaagtgtgaagaagctgccaatgcaattgaatctaaagagaagcacatcacttctctcatgaatgaaatttctggtttaagaacagaagtttctcagaaactaccacagttagaaaaattggaaattgaattggctttgtcaaagagttcacttgatgagcagtataagcgctggcgaactgcccaagataattatgaacgccaggttattctgcaatctgagacgatacaggagttgacaaatacttctaagcagctatcttcgttgcagcatgaaatcactgtacttcgccagactgcagatgcactgaaaaatgaaaatgaatgtctaagatcttctgctgaacaagaaaagataggcttattgaaagagaaggacgatgccctgcagaaatataatgagcttaatgatcagaatagaattctacacaatcagttagaagctttacacattcggttagccgagaaagaacggaatattgctgggctttcatcacatcgtactgataattcacatgcagaagatgatctacaaagtgtcatcagttatctgcgcagatcgaaagaaatagccgaaacagagatatcattgcttaaacaggagaagtctcggcttcagatagaactggaaagttctttaaagtctgccaaggaggcacaggacttgttgcgaggtcaagctgatagtgccagggcattgatgttcaaggatgaagagttcaagtcctgcagattcaggtcagagaaattaacttgcttcgtgaaagcaacatacaacttagggaggagaacaggcacaattttgaagaatgccagaaattccgtgaagaagctcaaaaggctaaaatggaatctgagaggttgcagaaccttctactggagaaggaggtagacgctgaaatgtgcaaaagagaactggaaatgcagaaggcagaaatagctaatctcaaccaaagtatttctgag

SEQ ID NO: 3626 - DNA, 234 bp, Zea mays
  misc_feature (178)..(178): n is a, c, g, or t
  Peptide Sequence Number=SeqID_9846
  Probeset Number=SeqID_18029
ccgagataccttttttaataaaatcaattccccaaagggcctcttgactgaattaaggctgtcatttgtaggaagccagatcgagtggagtgaaaaactgatttgtaataatagacacagggatggcggggggtgggttgggcaggggggaaaaggtacagtgtggtgtgttgtccancaacatggacaggacacaagagaagcacttagacacggtaaggccgggaaccatgc

SEQ ID NO: 3627 - DNA, 2277 bp, Zea mays
  misc_feature (1)..(5): n is a, c, g, or t
  misc_feature (1742)..(1747): n is a, c, g, or t
  misc_feature (1968)..(2277): n is a, c, g, or t
  Probeset Number=SeqID_18030
nnnnnaccctcgaggccggccgggaaggtatcccctcttcccctttcctgctctgcgaaaccgagcacgaaccctaacttaagttatgtggctttgaagtgtgtccatggctaacttcgaatttttttttgccaaaaaaatgagtctcgtgtcctttacttggtccgccccctggtctggaacttcaatttattttttacattcgagttttgaatttctgatgcattccgtttctaccaaatggccaatttgtgatgtgctaatcccttttattttctcatttatgccttttcagtaatgctgttggcaagctcaacaagacgctatgagcaatttcctttagcacgaaacaatggacttccaagattttcaagagtaaaaatgtcatgcttgggaacaaaccaaagtaaccatcattctgataccgtcagatcttcatcccctagttgtggagataccagaaagatccaccctgtagtcaaaatgtgtggcatcacatcagctagagatgcagaaatggctgtaaaagcaggagctgagcttataggcatgatactatggcccaactctaaacgctctgtctcgttattggaggcaaaagaaatatcaagagttgcgcaatcttatggcgctgaatcagttggtgtctttgtggatgataatgaagagagaattctacgggtgtctgattcatgtgaccttaacgtagcttcaatgaatctccattggttcatactcctttattcactggtcgcatcatctaaaggctaagactttatgatgatgatggactttttctctgacccggttgagttgattgtcttggcgtgtgctgtgagtttgttaatcgtgggttttcttagtttttttcaccagtgggcctagtgtgttgttgtttttacctccgaagtagacttgatttacgttcagtttaaatgtaatactaatttttgggttcgtgtagtgttcaatgccgtggtggtccgccaacaagattgagcccgttcctcacacagcaccaacaagttcgttggcccacaaatcagcagctctcatttgtcgaaaaatttagcttctttagttccaagcattatgttcataatgtctgaaattatctatcgaacttccatcgccgtcctgtccaattagcctcttcaatgatcctgcagactgtcatgggaactccgggtgctgagttgggaagtgagctatggcgccgagttcacccccgacgcggagggtgggtacaccgtcattgtacagaagacaaggaaggtgcctgctaacgaggaaccgatcatgaagggaagcttcaaggcaggcgagcctggcaaacttgtgctaactgtgaacaaccctgcatccaagaagaagacgctcctttacagatcgaaggtgaagagcaccagcgagtgagtgtgaggtcacgccgctagctgcctgggccctacagttaaaacgatctacagcatgatagaagagagaaggaaccttttggtttggttcgttaatttactgggttttgctggggttctttttttttgggttcgcattctacattttgtttggttgaaaccaaagtgagcttgtttttgtgacagtagatgggagaagtataatggcattgtgtgatggatggttgttgatgagggcagggaggacgaaaatgtgggggaatgaaaggctggagaatgtctgttcctctgtagatgttgtctgtacattgcatctcttggaaaaannnnnnaaaaaaaaaaaaaaaaaaaaaaaaaaaaaaaaccctcgtgttcgttcggagcgcacacacacacaaccagatctcccccaaatccacccgtcggcacctccgcttcaagatgcagatctttgtgaaaaccctgaccggcaagactatcaccctcgagggggagtcgtctgacaccattgacaacgttaaggccaagatccaggacagggagggcttccccnnnnnnnnnnnnnnnnnnnnnnnnnnnnnnnnnnnnnnnnnnnnnnnnnnnnnnnnnnnnnnnnnnnnnnnnnnnnnnnnnnnnnnnnnnnnnnnnnnnnnnnnnnnnnnnnnnnnnnnnnnnnnnnnnnnnnnnnnnnnnnnnnnnnnnnnnnnnnnnnnnnnnnnnnnnnnnnnnnnnnnnnnnnnnnnnnnnnnnnnnnnnnnnnnnnnnnnnnnnnnnnnnnnnnnnnnnnnnnnnnnnnnnnnnnnnnnnnnnnnnnnnnnnnnnnnnnnnnnnnnnnnnnnnnnnnnnnnnnnnnnnnnnnnnn

SEQ ID NO: 3628 - DNA, 1187 bp, Zea mays
  misc_feature (10)..(10): n is a, c, g, or t
  misc_feature (12)..(12): n is a, c, g, or t
  misc_feature (16)..(16): n is a, c, g, or t
  misc_feature (23)..(23): n is a, c, g, or t
  misc_feature (26)..(26): n is a, c, g, or t
  misc_feature (39)..(42): n is a, c, g, or t
  misc_feature (45)..(46): n is a, c, g, or t
  misc_feature (48)..(48): n is a, c, g, or t
  misc_feature (52)..(52): n is a, c, g, or t
  misc_feature (56)..(57): n is a, c, g, or t
  misc_feature (63)..(63): n is a, c, g, or t
  misc_feature (76)..(76): n is a, c, g, or t
  misc_feature (79)..(79): n is a, c, g, or t
  misc_feature (86)..(86): n is a, c, g, or t
  misc_feature (88)..(88): n is a, c, g, or t
  misc_feature (91)..(92): n is a, c, g, or t
  misc_feature (95)..(96): n is a, c, g, or t
  misc_feature (98)..(98): n is a, c, g, or t
  misc_feature (101)..(103): n is a, c, g, or t
  misc_feature (105)..(106): n is a, c, g, or t
  misc_feature (108)..(108): n is a, c, g, or t
  misc_feature (111)..(111): n is a, c, g, or t
  misc_feature (119)..(119): n is a, c, g, or t
  misc_feature (133)..(133): n is a, c, g, or t
  misc_feature (138)..(138): n is a, c, g, or t
  misc_feature (154)..(154): n is a, c, g, or t
  misc_feature (156)..(156): n is a, c, g, or t
  misc_feature (158)..(158): n is a, c, g, or t
  misc_feature (160)..(160): n is a, c, g, or t
  misc_feature (171)..(171): n is a, c, g, or t
  misc_feature (178)..(178): n is a, c, g, or t
  misc_feature (183)..(184): n is a, c, g, or t
  misc_feature (190)..(191): n is a, c, g, or t
  misc_feature (193)..(193): n is a, c, g, or t
  misc_feature (207)..(207): n is a, c, g, or t
  misc_feature (217)..(217): n is a, c, g, or t
  misc_feature (221)..(221): n is a, c, g, or t
  misc_feature (225)..(225): n is a, c, g, or t
  misc_feature (227)..(227): n is a, c, g, or t
  misc_feature (239)..(239): n is a, c, g, or t
  misc_feature (243)..(243): n is a, c, g, or t
  misc_feature (245)..(245): n is a, c, g, or t
  misc_feature (271)..(271): n is a, c, g, or t
  misc_feature (278)..(278): n is a, c, g, or t
  misc_feature (290)..(290): n is a, c, g, or t
  misc_feature (362)..(362): n is a, c, g, or t
  misc_feature (786)..(786): n is a, c, g, or t
  misc_feature (828)..(828): n is a, c, g, or t
  misc_feature (847)..(847): n is a, c, g, or t
  misc_feature (855)..(855): n is a, c, g, or t
  misc_feature (871)..(871): n is a, c, g, or t
  misc_feature (881)..(881): n is a, c, g, or t
  misc_feature (883)..(883): n is a, c, g, or t
  misc_feature (885)..(885): n is a, c, g, or t
  misc_feature (900)..(901): n is a, c, g, or t
  misc_feature (913)..(913): n is a, c, g, or t
  misc_feature (916)..(916): n is a, c, g, or t
  misc_feature (920)..(920): n is a, c, g, or t
  misc_feature (923)..(923): n is a, c, g, or t
  misc_feature (931)..(931): n is a, c, g, or t
  misc_feature (945)..(945): n is a, c, g, or t
  misc_feature (950)..(950): n is a, c, g, or t
  misc_feature (954)..(954): n is a, c, g, or t
  misc_feature (956)..(956): n is a, c, g, or t
  misc_feature (962)..(962): n is a, c, g, or t
  misc_feature (964)..(964): n is a, c, g, or t
  misc_feature (985)..(985): n is a, c, g, or t
  misc_feature (994)..(994): n is a, c, g, or t
  misc_feature (999)..(999): n is a, c, g, or t
  misc_feature (1006)..(1008): n is a, c, g, or t
  misc_feature (1014)..(1014): n is a, c, g, or t
  misc_feature (1033)..(1033): n is a, c, g, or t
  misc_feature (1036)..(1036): n is a, c, g, or t
  misc_feature (1040)..(1043): n is a, c, g, or t
  misc_feature (1047)..(1047): n is a, c, g, or t
  misc_feature (1052)..(1052): n is a, c, g, or t
  misc_feature (1057)..(1057): n is a, c, g, or t
  misc_feature (1059)..(1059): n is a, c, g, or t
  misc_feature (1067)..(1067): n is a, c, g, or t
  misc_feature (1076)..(1076): n is a, c, g, or t
  misc_feature (1078)..(1081): n is a, c, g, or t
  misc_feature (1087)..(1087): n is a, c, g, or t
  misc_feature (1097)..(1099): n is a, c, g, or t
  misc_feature (1102)..(1102): n is a, c, g, or t
  misc_feature (1115)..(1115): n is a, c, g, or t
  misc_feature (1126)..(1127): n is a, c, g, or t
  misc_feature (1129)..(1129): n is a, c, g, or t
  misc_feature (1134)..(1134): n is a, c, g, or t
  misc_feature (1136)..(1137): n is a, c, g, or t
  misc_feature (1139)..(1139): n is a, c, g, or t
  misc_feature (1143)..(1145): n is a, c, g, or t
  misc_feature (1148)..(1148): n is a, c, g, or t
  misc_feature (1150)..(1150): n is a, c, g, or t
  misc_feature (1152)..(1152): n is a, c, g, or t
  misc_feature (1173)..(1173): n is a, c, g, or t
  Peptide Sequence Number=SeqID_9847
  Probeset Number=SeqID_18031
caaaacacantnaaantcgctantangctaagtaaaaannnncannancccntttnnaatacnaaatccccattanaantaaccantnacnnacnnangtnnnanncncangttttagnagaagcgaaaacgncctancgcatccacttctccngngngngagcgatcatnaagcagntggcnngacagnntncccgaatggaaacngacagtgagngcanacantnatgtgagttagntcantnattaggcaccccaggctttacacttnatgcatnccggtcgtatgntgtgtggaattgtgagcggataacaatttcacacaggaacagctatgccatgattacgcctagctcgaaatnaaccctcactaaagggttcaaacgctggagctccaccgcggtggcggccgctctagaactagtggatcccccgggctgcagggtcggtcgagtgtcctaactcaaacctatcccaagatcgcctatggccacccctcagctacaccatcccgcggggcacaacctgcggcccaaatccgatctctgatcttctgacggtgatcgaggtccattttggcggggcgcgtctacgcactccagaagccgctcttgcgtccatggcgatccttcagtccggtcacatacgcctgatggtcggcgtgcccgccatattcctcgatcctgcgggcaatctgggcacaggtttgcaggtggcgggcggcatgggggtatcgtttggaacgggccttctcgaggggggccccgccacccgattcgcctatantgagtcgtattacaattcactggccgtcgttttacaacgtcntgactgggaaaaccctgtngttcccancttaatcgccttgcancacatccccntntngtcactgcgtaatanncgaaaggcccgnacnatcnccnttccaacntttgcgcagcctgnatggnaaangncagttntntctttatatttttgaaaattngcgcaaatnttganactcacnnnttttanacaatatgtcgaatttggnaanttcnnnnaacnaaaantactngnttggttgnggtttcctngnnnnattatnctttaaaccnnnctncccccccgtttantttttttgttnnanatttnannanaagnnnggngnanggagaggggccatcccccccnccccccccccccct

SEQ ID NO: 3629 - DNA, 1153 bp, Zea mays
  Peptide Sequence Number=SeqID_9848
  Probeset Number=SeqID_18032
gggggggtaacatttcccccaggaaacagctttggccatgtttcgcccaggcggcccattaccctccctaaaggggacaaaagctgggctcccccccggtgcggccgctttagaaatagtgattccccgggctgcaggattcgctcgcccccctcccgtgcccactcctttgggtttaaagccttatcgttggaagagaagaagaaaaatgttggagagtataaaccttcctatctcctgcaacttctctagctttcctcatctaaaaccctccagaaaagcccaatccctaagccaaccccgaaacctcacccttgtacagtcaagagctcctttgccttttctgaaacccgatagaattctccttcgcaacaacaacaagagtcaattcttgaaacacgagaagaagggtctcttccatgtgtgcagaagctcactaaacaacccagatccagacaaaactgaaattcaagatgaaggaagagactggacgagctccgtattgcttttcgctctctggggtgcgcttctttactactgcttcaatcttgctcctgatcaaaccccaacacaagacttgtactttgtgaaaaagctgttgaatttgaaaggcgatgatggttttagaatgaaccagatccttgttgggttatggtatataatgggtttatggcctgttgtatacgctatgctcttacttcccactggtcgaagtaaaactcaggcatggcctttcgttgttttcctcatcctcccctgctttgtttcctagggagagagagtacaaaaatgtatagccttttttttttggaatattacaagtttgggtgttgagaattgggattgttcttatggtggacaaaagctatgaatcaattagcctttctactaaaaaaaaaaaaaaaacagccgatccctcccacccgctgtcccaacacaacaaagcgccaaagaggagtcgttttccccgctccccggccccccccccggcggcggggccccgggacaccaattttcccccccaaaaggggggggcgtaatataacgccctcctccgggggggcccgtttttttaaaaacgcgggtgtggggggagaaaaacccgggggggacaaaccaatttttatccccggtgggaaaaaacccccccctt

SEQ ID NO: 3630 - DNA, 1282 bp, Zea mays
  misc_feature (1)..(681): n is a, c, g, or t
  misc_feature (1282)..(1282): n is a, c, g, or t
  Peptide Sequence Number=SeqID_9849
  Probeset Number=SeqID_18033
nnnnnnnnnnnnnnnnnnnnnnnnnnnnnnnnnnnnnnnnnnnnnnnnnnnnnnnnnnnnnnnnnnnnnnnnnnnnnnnnnnnnnnnnnnnnnnnnnnnnnnnnnnnnnnnnnnnnnnnnnnnnnnnnnnnnnnnnnnnnnnnnnnnnnnnnnnnnnnnnnnnnnnnnnnnnnnnnnnnnnnnnnnnnnnnnnnnnnnnnnnnnnnnnnnnnnnnnnnnnnnnnnnnnnnnnnnnnnnnnnnnnnnnnnnnnnnnnnnnnnnnnnnnnnnnnnnnnnnnnnnnnnnnnnnnnnnnnnnnnnnnnnnnnnnnnnnnnnnnnnnnnnnnnnnnnnnnnnnnnnnnnnnnnnnnnnnnnnnnnnnnnnnnnnnnnnnnnnnnnnnnnnnnnnnnnnnnnnnnnnnnnnnnnnnnnnnnnnnnnnnnnnnnnnnnnnnnnnnnnnnnnnnnnnnnnnnnnnnnnnnnnnnnnnnnnnnnnnnnnnnnnnnnnnnnnnnnnnnnnnnnnnnnnnnnnnnnnnnnnnnnnnnnnnnnnnnnnnnnnnnnnnnnnnnnnnnnnnnnnnnnnnnnnnnnnnnnnnnnnnnnnnnnnnnnnnnnnnnnnnnnnnnnnnnnnnnnnnnnnnnnnnnnnnnnnnnnnnnnnnnnnnnnnnnnnnnnnnnnnnnnnnnnnnnnnnnnnnnnnncgccggattccggaggtgtaatttttgtttgggttcgctattttgctttcctcggagaagatgggctcgcttttgactctggaaaaccatctccgggcagaagaagagagccccgttccgagcatgtgattgttggggctgttatcttttttgcaaatcatgaagaggataacctggctggtggtgtggcagtaatttttctgagtagcactagaatgccacttcctctgcgataggaatggattaacagcacatcatttacaaatgatgaagtggagaacgggactggtggtgtggctgtaattttgctgagttgcacttgcatgtaacttcttctacgatgggaatggattaacagcacagcatgcatgcaccacgagaaagattagcttttccttttcttttcgttctcatcttattggacaaagtttgtgcttcttcttatttttgctcaacttatcgatggaaacgggaacaacagccaagcgaaagatttgcttttccttttcttttcgttctcatcttccatggtcaactggcatgctgttttgtgtatttttcgattaggatgttctaggtaatggtctcgtgcgaattcctn

SEQ ID NO: 3631 - DNA, 458 bp, Zea mays
  misc_feature (38)..(38): n is a, c, g, or t
  misc_feature (45)..(46): n is a, c, g, or t
  misc_feature (49)..(49): n is a, c, g, or t
  misc_feature (70)..(70): n is a, c, g, or t
  misc_feature (77)..(77): n is a, c, g, or t
  misc_feature (85)..(85): n is a, c, g, or t
  misc_feature (95)..(95): n is a, c, g, or t
  misc_feature (99)..(99): n is a, c, g, or t
  misc_feature (103)..(103): n is a, c, g, or t
  misc_feature (127)..(127): n is a, c, g, or t
  misc_feature (131)..(131): n is a, c, g, or t
  misc_feature (148)..(148): n is a, c, g, or t
  misc_feature (151)..(151): n is a, c, g, or t
  misc_feature (154)..(154): n is a, c, g, or t
  misc_feature (164)..(164): n is a, c, g, or t
  misc_feature (177)..(177): n is a, c, g, or t
  misc_feature (182)..(182): n is a, c, g, or t
  misc_feature (187)..(188): n is a, c, g, or t
  misc_feature (191)..(191): n is a, c, g, or t
  misc_feature (194)..(195): n is a, c, g, or t
  misc_feature (197)..(197): n is a, c, g, or t
  misc_feature (212)..(212): n is a, c, g, or t
  misc_feature (222)..(222): n is a, c, g, or t
  misc_feature (228)..(228): n is a, c, g, or t
  misc_feature (240)..(240): n is a, c, g, or t
  misc_feature (253)..(254): n is a, c, g, or t
  misc_feature (263)..(263): n is a, c, g, or t
  misc_feature (276)..(276): n is a, c, g, or t
  misc_feature (284)..(284): n is a, c, g, or t
  misc_feature (286)..(286): n is a, c, g, or t
  misc_feature (296)..(296): n is a, c, g, or t
  misc_feature (300)..(300): n is a, c, g, or t
  misc_feature (304)..(304): n is a, c, g, or t
  misc_feature (306)..(306): n is a, c, g, or t
  misc_feature (322)..(322): n is a, c, g, or t
  misc_feature (325)..(325): n is a, c, g, or t
  misc_feature (327)..(327): n is a, c, g, or t
  misc_feature (332)..(332): n is a, c, g, or t
  misc_feature (365)..(365): n is a, c, g, or t
  misc_feature (368)..(368): n is a, c, g, or t
  misc_feature (377)..(377): n is a, c, g, or t
  misc_feature (421)..(421): n is a, c, g, or t
  Probeset Number=SeqID_18034
cggggtttactcagtctcgggatcgttagcatcgtttntcaagannggnaacatgtctccgatccttcanggttcgnctacctcncgctcaaccntaangggngaacgcactctggccatttaattntganttttttgggaactaaangcnttntcttccgaanctttttcttatgncgaantacgnntcnaanngnagcttagtctgattntgagagtcangctttngctatggttaanaattttggaagannaccagagcnaatagcattgaangctgtggnancttcacaccnactngtgngnttatatagggatgcangtnanaaggngaatcgccaggatttttacaccaggcggacagncgnttgcactcnctgcgcggtggaccgcagagaccaatacagtagctctgcaaggnggggccggtacgcgctcggaaactgaatcgtttctcg

SEQ ID NO: 3632 - DNA, 433 bp, Zea mays
  Peptide Sequence Number=SeqID_9850
  Probeset Number=SeqID_18035
acatacaaaccttcgcattatcattcccattctctagattgttcgtagtgactctgtttgatttcgaaatggctcgcaccaagcaaaccgcaaggaaatccaccggcggcaaagccccaagaaagcagctcgcaacgaaagcagccagaaaatccgctccggcgaccggcggcgtgaagaagccacacagattccgtccaggaacggtggccttgagagagatcaggaagtaccagaagagcactgagcttctgatccgtaagcttcctttccagcgtctggttcgtgagatcgctcaggatttcaagacggatctaaggtttcagagcagcgcagtggcggctctacaggaagcagccgaggcttaccttgttgggttatttgaggacaccaatctctgtgcgattcatgcgaagagagtcactatcatgcc

SEQ ID NO: 3633 - DNA, 413 bp, Zea mays
  Peptide Sequence Number=SeqID_9851
  Probeset Number=SeqID_18036
ggaccatttgaagaagcatttcatttccctcattcatggcttcccaatctcattctcaccctaagcttacagtttccacatcacctggaaagtgaaagtggaagcgggggaggtcccaaagggcatagcctgtgttttccaacgacacatgaagggtcattccggtgccgtttacatcgatctgggacagctttttcatcatctccaccatttcggatgaaacgctccaagtccatgtctgctgataagcctgtcgtttctgtttctcacctgtgagtgagtgagcaactatagtgttcatgctgtatatttatcaatccttaactactttcagttcaactttagtagtgtaaataaaggctttgaaccctgcttcggttaacgctctgaattttgccgtttcaaacaagtac

SEQ ID NO: 3634 - DNA, 600 bp, Zea mays
  Probeset Number=SeqID_18037
tcactatttggtgacaagctcccctgcgggcaggtcgactctagacactccaatatatcaaaccctggtgcatacccgcaaccaccccaaaacaaaccggcacttttgaaaacgcccccggttcatttataagagctcttgcgcttggatcgcttcttttctttctcattctttcttgcgatcatactcatttgtaatcaaggcaagagacaccaattgtgtggtggtccttgtgggggaactttgagttcccggttgattgagaagagaagctcactcggtccgagcgaccgtttgagagagggaaagggttgtaagagacccggtctttgtgaccacctctacgggggggaggtttgcagagaaccgaacctcggtaaaacaaatcctcgtgtctcacgtctttattcgcctgccatttgtttttacataccctctctatcggactctattcttatttctaacgctaacccggctcggcgctggctttaactttgtaaattttagtttcgccctattcacccccctctaggtgactttcaattggtatcggagcccggtgcttcattagagcctaaccgctcgaagtgatgtcgggag

SEQ ID NO: 3635 - DNA, 616 bp, Zea mays
  misc_feature (2)..(2): n is a, c, g, or t
  Peptide Sequence Number=SeqID_9852
  Probeset Number=SeqID_18038
tnggtaccgggccccccctcgagaagcagaagatcgaggaaggacgaagttttgagtccttcccctgcccagcgtgcacacgactccacttcatcgacctcgcctccggcaagccgatgaaccgggatcgttgacggcggcatcgttccgacctcgtggaatgaggtccgcaatattacggcactgaatcctgtttactgaatcgtcaagtatcgccattgatggccatgtaacgacgttcatttcatcgtcacattgcagcatccggccagacgcatgtttttcgacgctctcgccccgtcctccgcgctccagctgacccggtttaccgatatcgacgcgtttcggccggccgagtccctggaggattctcgaagcattcccctcgacgtcgccaatttcgccgcggcgcgagcgatcgtaaacctgccggcgtgccgcatatttgtggcaaggtcgtttgcacgcatcctggagacaacctatcgcgcaccgggcggcatggtgatccttccaatgagcgacgatctgtgcgcccgctcgagcggagtggagttcgactcgcgcttcttcgtcgcgttgcgcggcattcatcactgccatttcgtggagccca

SEQ ID NO: 3636 - DNA, 582 bp, Zea mays
  misc_feature (449)..(449): n is a, c, g, or t
  misc_feature (465)..(465): n is a, c, g, or t
  misc_feature (520)..(520): n is a, c, g, or t
  Peptide Sequence Number=SeqID_9853
  Probeset Number=SeqID_18039
gctggagctccaccgcggtggcggccgctctagaactagtggatcccccgggctgcaggaattcggcacgagagagagagagagctcactagtcccccccccccccccggtccgcaaacccctctcgatcgacacacgcagccgcgacccatcgcgacctgacccgaccctcccgaggccgccagccttatcctctccgcctccgcctcccgccgtcccctccgacccatcacaagcgcgagaagacatggcctcgacgttcggtgccacttctacagatggccttatggctgctccatcggggaagaatgtgcgccttcagaggagggctaacttcagagtaaaagcggctaaggagctgtacttcaacaaggatgggtcagctatcaagaagctccagactggagtcaataagcttgcagacctaagttggaggtacactcggaccnaaggggaaagaaatgncgtttttggagaagcaagtacgggtctccccaaagattggttaaacggatggggnggttacagttggcaagagaaggttggagctgggagggacccctgtgggaaaaaaattggagc

SEQ ID NO: 3637 - DNA, 375 bp, Zea mays
  Peptide Sequence Number=SeqID_9854
  Probeset Number=SeqID_18040
ctctcgattggatagcaccaacgtccctgcacgggcccccattcgtgcctcatacgggagatgaagaatcaaattctgcattggctgacatgcacacagtaagaagaaattcacctaaagtatacactactagcagttgtcacatttcttatttcccattgcaagccatcacaatgcttcatgatggagatgcgaataacttggtagatccacaactacatggtgagttcaacttggaagaggctataagagtatgcaaagttgcactttggtgtattcaagataatgaacttgatcgacctacatgatattggtatgccccccatgccaagacaacttgtagctataaccaaaagagagttgtgatacaaatta

SEQ ID NO: 3638 - DNA, 693 bp, Zea mays
  misc_feature (201)..(201): n is a, c, g, or t
  misc_feature (235)..(235): n is a, c, g, or t
  misc_feature (280)..(280): n is a, c, g, or t
  misc_feature (562)..(562): n is a, c, g, or t
  Peptide Sequence Number=SeqID_9855
  Probeset Number=SeqID_18041
cgatgggtactcgagccggcaccaccaccatctcaccgtgctcaggcgtcgtctacaacgccgcccgcactacccccagcgcatagcacactactcgcagaaacaccgatggcccctgccattgcccagcagcagccgcaggtgcagccgatcggtgtcggtggtcgaaaggtggtggacgaggtttccggttggaggcgngtgctggccgcaggaatggccgaattctcctggntcacggtgcttggtttcctatccctcactttcaatcaggcatggngatttatcggttcaacggtgacgccggcttcgtcgttttcgtcgtggtaacttatctcgacctggtggccctggttcgcttgcttgcgctactacgagcagttggaatagcagcactcccaaaagcgcgcgagggttaaggcttggggtttggagcctcacgaccctccttaatatcatgttcagttacaaggtggctgagattatgcccctgccagtcaaatttgttgtctggtcgatggcagccgctacccacctgtggcggcttctacgctttcttcgntcacagcgagaaggctgttattgcccagcggttggcgccacggcctcgccgcggtccaaggaagcattcttcaattatagttcgtttgccaccaaaggcgcatactgccggccttgggttgggaccgcgcg

SEQ ID NO: 3639 - DNA, 498 bp, Zea mays
  Peptide Sequence Number=SeqID_9856
  Probeset Number=SeqID_18042
cggcgttggggggtggtgcgcccgggcggtttgggggggtcccgggggggtgggggcgggcgccgccggatcgaaaaaacaagaaaaaaagaagaaaaaaaagaaccatttaagagcttataaaacaatggctatcgaaaagaaaaccctgctcgcctccttcatcaccatcatgatgatggtaatgatgatcgtgaaccaagtcgaggccaggaaccatgttacaatcaagccgcctccaaagtgatcatagtctttttgtttttctaaatcgatggctccaaaagtttatgagaaaataaatggttccttcaacgtggagcttaaagcatggcttaactaatttttatttactatatatatatcattcttttcatcctcttatttgtttagttatggatgtataacttataaataatgtttcacaaaataatattttgtatgtgaaaaaaaaaaaaaaaaaagcttatcgataccgtcgacctctgtttgggcagc

SEQ ID NO: 3640 - DNA, 974 bp, Zea mays
  misc_feature (1)..(337): n is a, c, g, or t
  misc_feature (339)..(339): n is a, c, g, or t
  misc_feature (341)..(356): n is a, c, g, or t
  misc_feature (359)..(359): n is a, c, g, or t
  misc_feature (362)..(362): n is a, c, g, or t
  misc_feature (364)..(364): n is a, c, g, or t
  misc_feature (367)..(368): n is a, c, g, or t
  misc_feature (373)..(374): n is a, c, g, or t
  misc_feature (378)..(378): n is a, c, g, or t
  misc_feature (380)..(380): n is a, c, g, or t
  misc_feature (382)..(382): n is a, c, g, or t
  misc_feature (388)..(388): n is a, c, g, or t
  misc_feature (392)..(392): n is a, c, g, or t
  misc_feature (398)..(398): n is a, c, g, or t
  misc_feature (425)..(425): n is a, c, g, or t
  misc_feature (432)..(432): n is a, c, g, or t
  misc_feature (442)..(442): n is a, c, g, or t
  misc_feature (466)..(466): n is a, c, g, or t
  Probeset Number=SeqID_18043
nnnnnnnnnnnnnnnnnnnnnnnnnnnnnnnnnnnnnnnnnnnnnnnnnnnnnnnnnnnnnnnnnnnnnnnnnnnnnnnnnnnnnnnnnnnnnnnnnnnnnnnnnnnnnnnnnnnnnnnnnnnnnnnnnnnnnnnnnnnnnnnnnnnnnnnnnnnnnnnnnnnnnnnnnnnnnnnnnnnnnnnnnnnnnnnnnnnnnnnnnnnnnnnnnnnnnnnnnnnnnnnnnnnnnnnnnnnnnnnnnnnnnnnnnnnnnnnnnnnnnnnnnnnnnnnnnnnnnnnnnnnnnnnnnnnnnnnnnnnnnnnnnnnnnnnnnnnnnnnnnnnnnnnnnnnnnnnnncngnnnnnnnnnnnnnnnngtngcncnatnnccatnnacangncngcatcncagnttaggnccatgagctcccttgcgcgcgccatgngtgtgcntcgggcagcnttcaccacatccgcccgtcagctngaagctgccgttccgaccgcgaacaagtcacagacctctcccacgccgattgacgagaacaagccggccgtgatcaaccaggctcccaaccgcgtggaaccctggtctcgcagccagcagccgcgttctaaggccatgaccggccctcgtttcgaacaaaccaacttcgacgaacaggtacgagcttgaggagaaacacatgaatggccagaggaaaagactaatagctctcggtagccacaacccgactctgcgatgatgctcgtacaccaggttcctgtcaagtggacgcacagccggattgtcgcctgcgagggtggcggcggcgccgctggccaccccaaggtcttcatcaacaccgacaagcctgagatcgccatctgcggctactgcggcaaccccttcgtatgtgccaattgctgccaaatggatctctaaatcagaaactaacgtgtcctaaaaggccaacgagcaccaccgcaagcatctcgagggggggcccggaccc

SEQ ID NO: 3641 - DNA, 1133 bp, Zea mays
  misc_feature (1)..(151): n is a, c, g, or t
  misc_feature (732)..(732): n is a, c, g, or t
  misc_feature (1021)..(1133): n is a, c, g, or t
  Peptide Sequence Number=SeqID_9857
  Probeset Number=SeqID_18044
nnnnnnnnnnnnnnnnnnnnnnnnnnnnnnnnnnnnnnnnnnnnnnnnnnnnnnnnnnnnnnnnnnnnnnnnnnnnnnnnnnnnnnnnnnnnnnnnnnnnnnnnnnnnnnnnnnnnnnnnnnnnnnnnnnnnnnnnnnnnnnnnnnnnnnngggagcatacccagaggaggacgtgctacgacgaggtcgagaggcgccaaccttttggcgtctcccgcgagtcggctgcgagggcatggaagaaccctctccatccatcctgccagagccacgtcctctcttagagagggagcgacgaggcggaggagaggggatgggagattcctcctgaatctcatccgagtcgctgctaaactcaatcacggaaggattgtgacgacgcaccatgattgaaaaggttttgaaactgtgaaccggttgaggtgtgtgagagagaaggctctaaatgttgtgaagcgactaaggcgagagtggaaggagtgggagaagagaagtggagtgtccaatatatataggcagttgagctggtcctcaggaccggttcaaccgcccccatgggccagttcaactggttctgaccagtgtggtcagagagccagaaacagcagagggaagacgccaaaaattcaaatttctaacgcaggattctgaaaaagtgtactgcagagattccatgcgccacacaaaaaaagtcaaaacaaagtttctgcgcagatgagaccggacgacanaagaaaaagctgcgcaaaaaaattaatttctgcgcgccctgctgccctcacacttctgcgcgggaagtgacaaaaaaaatttccttgctgcgcgggcgacagcaggcttttgcagaacctgcgcaaggcgcggaacgccggagcacaagcgctactcggacgagccatcggaccggggctcttggacgtcaaggcgagcaggatcggcggtcggggtagggaaagtttgggaggggaagcgagaggccgcgttaccaggcgttcaagcaggcagccggctccggctccnnnnnnnnnnnnnnnnnnnnnnnnnnnnnnnnnnnnnnnnnnnnnnnnnnnnnnnnnnnnnnnnnnnnnnnnnnnnnnnnnnnnnnnnnnnnnnnnnnnnnnnnnnnnnnnnn

SEQ ID NO: 3642 - DNA, 716 bp, Zea mays
  misc_feature (4)..(4): n is a, c, g, or t
  misc_feature (15)..(15): n is a, c, g, or t
  misc_feature (17)..(17): n is a, c, g, or t
  misc_feature (22)..(23): n is a, c, g, or t
  misc_feature (29)..(29): n is a, c, g, or t
  misc_feature (34)..(34): n is a, c, g, or t
  misc_feature (38)..(38): n is a, c, g, or t
  misc_feature (41)..(42): n is a, c, g, or t
  misc_feature (49)..(49): n is a, c, g, or t
  misc_feature (54)..(54): n is a, c, g, or t
  misc_feature (61)..(61): n is a, c, g, or t
  misc_feature (65)..(65): n is a, c, g, or t
  misc_feature (94)..(94): n is a, c, g, or t
  misc_feature (101)..(101): n is a, c, g, or t
  misc_feature (104)..(104): n is a, c, g, or t
  misc_feature (113)..(113): n is a, c, g, or t
  misc_feature (123)..(123): n is a, c, g, or t
  misc_feature (128)..(128): n is a, c, g, or t
  misc_feature (143)..(143): n is a, c, g, or t
  misc_feature (168)..(168): n is a, c, g, or t
  misc_feature (173)..(173): n is a, c, g, or t
  misc_feature (191)..(191): n is a, c, g, or t
  misc_feature (197)..(197): n is a, c, g, or t
  misc_feature (221)..(221): n is a, c, g, or t
  misc_feature (227)..(227): n is a, c, g, or t
  misc_feature (232)..(232): n is a, c, g, or t
  misc_feature (713)..(713): n is a, c, g, or t
  Peptide Sequence Number=SeqID_9858
  Probeset Number=SeqID_18045
ggcngggcccggggngnttccnngctccnaaggncccngtnnatgggtnaagcngataaanatcntcattgcggaacgctggccgatccgcccntcccggnacnacagtgctntggtgtcatnatgtngtgatcgcgccgttnaagcgctgggcttgtcgcgttcaanggtcngagtcgtgctggcactgntgctcntagtcggatcttcgtgatctcagncagccnggtcncggtcgtcggcatgctgatcgcgctgggcatgatcgtaacaggcgcgatcttgcggatcaggtcgccgtccatcctcgacctcaatctgttcgccggttcgtggttcatcgtaggaacgacgatggcctgggcggtggcgcgccagacctttgcgcctgggcgcgtgacctatcatcgcgtgatcggtgccgtgctgctgtacctgacggtcgcggtgattttctccgcgctctacgtcttcatcggctcgctggatccggttgcctttgtcagcatgaaggtgacagacagtccgaggctcgcgagcgacgtcatctatttcagcttcgcaacgatgaccacgaccggctatggcgacgtcgcgccgctgcatcccgtcgcgcgcagcctgtgcaacatggaagcgattttcggccagctctatccggcgacgttgctggcgcgcctcgtcacgctcgagggggggcccggtacccaatnggt

SEQ ID NO: 3643 - DNA, 522 bp, Zea mays
  misc_feature (49)..(60): n is a, c, g, or t
  misc_feature (65)..(141): n is a, c, g, or t
  Peptide Sequence Number=SeqID_9859
  Probeset Number=SeqID_18046
ccccttaaacagtggtaacaacccaaaagcccttttttttttttttttnnnnnnnnnnnnccccnnnnnnnnnnnnnnnnnnnnnnnnnnnnnnnnnnnnnnnnnnnnnnnnnnnnnnnnnnnnnnnnnnnnnnnnnnnnnaccttagctcaatgccaaagactcattgcataacattgataacgatatattatagatagttcatgacagatagatccggcagagccaaccatgaccatggctgccttacaactgattcaaacggaaagatactggtgctgctcacttgcatttcttactaccacgacagaccaaaacgaaacgacactgctagtactactgatagatagtttgctccgacgacttcacgcgagagtcagccgagcgatacctttggagggcccgggatgcctgcggaggtaccatgggacccccgccggatccgaacgcgtgggggcgccgcgcctaacgccttttgttgggggcatcgcgggagatgtggccctcctggccccaattgta

SEQ ID NO: 3644 - DNA, 468 bp, Zea mays
  misc_feature (468)..(468): n is a, c, g, or t
  Probeset Number=SeqID_18047
aggaagagagtaaaccctagcagcagcttttcagctcacgaggagaagagatcgcagccgcgtatcatcaaagatgactttcaagcgcaggaacggagggaggaacaagcacaaccgtggccacgtcaagccaatcagatgctccaactgcggcaaatgctgccccaaagacaaggccataaagaggttcatagtgaggaacatcgtggagcaagctgccattagagatgttcaggaagccagcgtctacgatgggtacacgttgccaaagctgtatgcgaagacgcagtactgtgtctcatgtgcgattcactctcacgttgttcgtgtccgttcccgcactaaccgcagggttcgtactccccctccacgtttcgtcagacgcaaggaggatgcgcccaagcctggacaacctggccaggctcctcgtcctgctggagctggagcagctgcaccgcgtgcctgaan

SEQ ID NO: 3645 - DNA, 447 bp, Zea mays
  Peptide Sequence Number=SeqID_9860
  Probeset Number=SeqID_18048
tgcagctgtagctgatcgtttgcatgggtcaaaggaggaccggaagctggccattgttttggttggcctaccagctcgtggtaaaaccttcactgcagttaagcttacaaggtaccttcgttggttgggccatgaaactagacatttcaatgttgggaagtatcgccgtcttaagcttggagcaaatcagtatccatacacggtggatgccttggagaggctgtatgacaacagtttagaggtgggtatgatgctgcgctgtgcgctcgctgcaggcacttcagaagaaaatctttggcctcttgcgatagatgttcaggcagcagccgcacaagaacgcatcgcagagagctgcccgtgctgccgcatagctgcagttgcaattagtgctgggaattgggctgggccggagcccggcccaagccaatcgtacttcgtgccaaacgg

SEQ ID NO: 3646 - DNA, 224 bp, Zea mays
  Peptide Sequence Number=SeqID_9861
  Probeset Number=SeqID_18049
aaagttaaatcaaaaggttagccaattcaacttaaagcaacaacatcccatggatgttgggtggtgtccgagctcatgaggaacccggaagccatggccaaggcccaagcagaggttcgacgagtactcgacagcaagaacccaggcgaccacgagtaactcctgggctgcctgagctacaccggcatggtgatcaaggagacaataagcattatatatttact

SEQ ID NO: 3647 - DNA, 766 bp, Zea mays
  misc_feature (156)..(156): n is a, c, g, or t
  misc_feature (695)..(695): n is a, c, g, or t
  misc_feature (765)..(765): n is a, c, g, or t
  Peptide Sequence Number=SeqID_9862
  Probeset Number=SeqID_18050
agggggggggttacatagttacaagcatcacacggcaaccttgcttctccaagactttgcgggttccaagctgccttctgcacaacctcttccccacctgtgggtttgtctggggaaaacaaattcttttctgaggaaaaaaaaaaacagcctctnaagaagaactattccataagtgtattgctgagcagactaacttcatcagtgatgggagatctccttatgaagagccttcggtcatctatgagggaataattgatgaatggacatacattcatgtttcggggtccagcccagatgcttggaatcccacagttaaggctttgcgcgaccgcctggatgcctgggttggaaaggtgcatactccattgctttcagttgaggcagaaacccctgatcttgttgctgcctaatttagcacccgttccccttccgcgagaggcttggtcagccaggtgatgagatgcattgggccccttgtagccattttctggataatgaacctgctgccatgagcgtttgtcagcctgcgtcctgataggggcctgtaatttcttttttgatgtcctctggccatggatgggtccaccttcacccagtgttccggaaacgggcccaaatgattgaaatttttatactagtagggtgttcctgtagttttcccagttgaatttaatttgtaactgagtttgtantctgctggccctggatgcaggagaatcctggtggaaaaaaccaaaaataaaaaaactaatttcaaggttnc

SEQ ID NO: 3648 - DNA, 218 bp, Zea mays
  Peptide Sequence Number=SeqID_9863
  Probeset Number=SeqID_18051
ctgtcccccctgctgctccggatgcacggacacaagaaatgataaacgagaaactgaaaaaggcagaagaactaggtgagaatgggatggttgatgaagcccaaaaattgttggatgaggcggaagctctgaagaaggttggtgttttcttttaatatttagctttggcagaattctatcagcttacctgacaggattgtcttgtcatatctaaccag

SEQ ID NO: 3649 - DNA, 918 bp, Zea mays
  misc_feature (1)..(9): n is a, c, g, or t
  misc_feature (870)..(918): n is a, c, g, or t
  Peptide Sequence Number=SeqID_9864
  Probeset Number=SeqID_18052
nnnnnnnnnaattatttcattttccacctagacaattccagtaccgcttctgcccccagcaggtgccagcgccatcgccgttcgcctcctctccacactccgccagatcccatccctctcgcccacgcgcgggtatcggagtcggagcatggcgtctgcagtggtggtggacgccggcgacgcgccggagcccacggttcgtaacctcctggaccaggagtccctcaagtgggtcttcgtcggcgggaagggcggcgtcggcaagactacctgcagctccatcctctccgtcctcctcgccggggtccgctcgtccgtgctcgtcatctccaccgaccccgcgcacaacctcagcgatgccttccagcagcgcttcaccaagttccccactctcgtccgcggattcaccaacctctacgccatggaaattgacccaaaggtagaaaatgatgatttatccaatgaaggaatggaaggattcctgtcagaactgacaaatgcgattccaggagtagatgaagctatgagttttgctgaaatgctaaagtaaggttttgctccgttccgttgtttgccatgcttcccaatatggccagctacttttgttaccatccattttatatttcatttgctactctttctaattcccctgttcattgttcaatgtctccaatatgtcaagagagttagattttgattatcattgttattcctgaaaatgatacttcttgcattcttggcttcgagcaactttttgaatatgatattttcctcactgcagattagtccaaacaatggattactctgttgtagtttttgatactgctcctacagggcatacattacggttgcttcagtttccccagcacnnnnnnnnnnnnnnnnnnnnnnnnnnnnnnnnnnnnnnnnnnnnnnnnn

SEQ ID NO: 3650 - DNA, 381 bp, Zea mays
  misc_feature (57)..(57): n is a, c, g, or t
  misc_feature (287)..(287): n is a, c, g, or t
  misc_feature (353)..(353): n is a, c, g, or t
  Peptide Sequence Number=SeqID_9865
  Probeset Number=SeqID_18053
aatcgttcgaagaccatcggcgagctcttcttcggcgtagcctttcttcccccgggnttgaaagaagaagatggggctgtctttcgggaagctgttcagcaagctgtttgcgaagaaagagatgcgtatcctcatggttggtctcgatgctgctggtaagaccaccatcctgtacaagctcaagcttggcgagatcgtcaccactattccaaccattggtttcaatgtggagactgtggaatacaagaacatcagcttcaccgtctgggatgtcgggggtcaggacnagattcgtccattgtggaggcactacttccagaacacgcaagggctgatcttcgtggtggacagcnacgaccgtgaccgtgttgtggaagctag

SEQ ID NO: 3651 - DNA, 632 bp, Zea mays
  misc_feature (331)..(331): n is a, c, g, or t
  misc_feature (601)..(632): n is a, c, g, or t
  Peptide Sequence Number=SeqID_9866
  Probeset Number=SeqID_18054
ctcggccgaggaagtgtgatagatcgcaccggtctcggcctccgtgtctactctaagttgcagctgccgcagccattcatttcgttggcaaccagggcagaactaaatatccgtggataagagctgcactgtgtgctgctgagatatcaagaacgtaacgtacggtggaagacaaggccccgttctcgattagcccaagccaaagcagagtgagaaagagagtcgtattggtcgtcacctgtcgaagattttcggtgtctcctgagccacagctgctgctgctgctggaaccatggagatggaggccgtggagtcgcacggcggcgccgcncgccgtcccctcttctctcttcgcggcccctcccgcgcctccgccccctcccccccccgttgtgggtttcgcgccccccttccccccccccccccgcctccccctcgcccgctcttcttttccccccccctcccccccccctcccccccccggccggattttttttttttttccccccccccccccccgggcgcgccgcctcccacttccgtcccctccccctccccctcagacaccccccctccccccctcccctcccccccccctccnnnnnnnnnnnnnnnnnnnnnnnnnnnnnnnn

SEQ ID NO: 3652 - DNA, 579 bp, Zea mays
  Probeset Number=SeqID_18055
acccattagccgagccgaactttcatttgcagggaaaacaatggttactcatgaaggcaggaagaaggataaacctttccaaaagtgaagggcgggttaggcattataaacacattctgttccaaggtgtgaactactcgagtttgcttattatcatggaggcggctgtagttttttttccaccgcgactcttttttttttcccctaagggacgtacgttgtcatttttggaaacttttgaaagcatggggtgcgcgtgaactatggatgtatgagtccctccgaagctaaactgtttgagtactatgctaagctgaggagctgcattcccatcatgtggtggagcgcgagggaggcttttttatcggacagcctcccttgtcaccgacgcaatcaggcccccccccaacccgtggactacgctgggtttggctttggcatgagaacgccccctgtgtttgtcgtaagcccccccgcccctagagaaacaagtagctttataatcccaatggatccccatcccacaaagctatggatgcgtcttggacataagccggataaagcgcttttatgttcccg

SEQ ID NO: 3653 - DNA, 453 bp, Zea mays
  Peptide Sequence Number=SeqID_9867
  Probeset Number=SeqID_18056
ccgccctttttttttttttttttggtaaaatggtaagggaatgttaaaaattctcccaattggggtaattcttgggggcaaaccagaatttggtccttattgaaaactccctcagccgggagtcccgttaaaacaaaccccggcagctggcttgcctttgagcaaatcctcgcaaggtccacaacacaggaagattggggaaactacatccaaacccgagcgttcctcacaatggttgggacaaagggatcccctactggctggaaccccaaaaagaaaggggataagggtgggacaacattttttttggctgggtggctccgaaacatttcagggggtggaaggttgaacaacaaggccccttggagtccaaaaacaccttgtgggctgaggccaaaaaggggggggaaaaactcccttggaatttaaatctgcccggaacccgggggttcc

SEQ ID NO: 3654 - DNA, 623 bp, Zea mays
  misc_feature (37)..(37): n is a, c, g, or t
  misc_feature (46)..(46): n is a, c, g, or t
  misc_feature (109)..(109): n is a, c, g, or t
  misc_feature (139)..(139): n is a, c, g, or t
  misc_feature (145)..(145): n is a, c, g, or t
  misc_feature (182)..(182): n is a, c, g, or t
  misc_feature (184)..(184): n is a, c, g, or t
  misc_feature (188)..(188): n is a, c, g, or t
  misc_feature (191)..(191): n is a, c, g, or t
  misc_feature (239)..(239): n is a, c, g, or t
  misc_feature (246)..(246): n is a, c, g, or t
  misc_feature (248)..(248): n is a, c, g, or t
  misc_feature (250)..(253): n is a, c, g, or t
  misc_feature (255)..(255): n is a, c, g, or t
  misc_feature (257)..(261): n is a, c, g, or t
  misc_feature (276)..(276): n is a, c, g, or t
  misc_feature (285)..(285): n is a, c, g, or t
  misc_feature (291)..(291): n is a, c, g, or t
  misc_feature (298)..(298): n is a, c, g, or t
  misc_feature (301)..(301): n is a, c, g, or t
  misc_feature (310)..(310): n is a, c, g, or t
  misc_feature (312)..(312): n is a, c, g, or t
  misc_feature (316)..(316): n is a, c, g, or t
  misc_feature (318)..(318): n is a, c, g, or t
  misc_feature (322)..(322): n is a, c, g, or t
  misc_feature (329)..(329): n is a, c, g, or t
  misc_feature (339)..(340): n is a, c, g, or t
  misc_feature (342)..(342): n is a, c, g, or t
  misc_feature (345)..(345): n is a, c, g, or t
  misc_feature (350)..(350): n is a, c, g, or t
  misc_feature (354)..(354): n is a, c, g, or t
  misc_feature (358)..(358): n is a, c, g, or t
  misc_feature (360)..(360): n is a, c, g, or t
  misc_feature (365)..(365): n is a, c, g, or t
  misc_feature (369)..(370): n is a, c, g, or t
  misc_feature (381)..(381): n is a, c, g, or t
  misc_feature (389)..(389): n is a, c, g, or t
  misc_feature (391)..(391): n is a, c, g, or t
  misc_feature (395)..(395): n is a, c, g, or t
  misc_feature (397)..(397): n is a, c, g, or t
  misc_feature (401)..(403): n is a, c, g, or t
  misc_feature (405)..(405): n is a, c, g, or t
  misc_feature (407)..(407): n is a, c, g, or t
  misc_feature (409)..(409): n is a, c, g, or t
  misc_feature (411)..(411): n is a, c, g, or t
  misc_feature (413)..(413): n is a, c, g, or t
  misc_feature (424)..(424): n is a, c, g, or t
  misc_feature (426)..(426): n is a, c, g, or t
  misc_feature (438)..(438): n is a, c, g, or t
  misc_feature (440)..(440): n is a, c, g, or t
  misc_feature (443)..(443): n is a, c, g, or t
  misc_feature (455)..(455): n is a, c, g, or t
  misc_feature (485)..(485): n is a, c, g, or t
  misc_feature (509)..(509): n is a, c, g, or t
  misc_feature (557)..(557): n is a, c, g, or t
  misc_feature (560)..(560): n is a, c, g, or t
  Probeset Number=SeqID_18057
cgaattgggtaccgggcccccgccccgcaaagccgcntggatggcnaatgggatgagcgcgatatggtgggctttgcccgcctgatggcggcgcatcgtcatgaaatcncggcggtgatcattgatccgattgtccagngcgcangcgggatgcgcatgtaccatccggaatggttaaaacnantccncanaatatgcgatcgcgaaggtatcttgctgattgccgacaagatctccantggattngntnnnncngnnnnnctgtttgcctgtgancatgcgcanatcgcnccggacnttntgtgcctangnctancnttanccggggngccagtgacnntntcncccanactntggntncgcgntgcnnggtgaccggtnagaacgtnanaacnangtgnnncnanancntntggtaacccancngcccgttctccngngtntgaccgactgcncctgtctgcctctaaaggtggaagcgcagngggagctgcattagatgcgcgaanagtcgctcgctcaaagtgcggaacatgcgccgctcggcgcgggcgtanacnaatcctctaatttcgccgagcgccctgcgacgccttgactcattacatacagcccgatcaaaa

SEQ ID NO: 3655 - DNA, 716 bp, Zea mays
  misc_feature (601)..(716): n is a, c, g, or t
  Peptide Sequence Number=SeqID_9868
  Probeset Number=SeqID_18058
aagctggagctccccgcggtggcggccgctctagaactagtggatcccccgggctgcaggaattcggcaccaggagagagctcactagtcccccccccccccagccggcaagaaactcccgaaggaagccggtgccggcggcgataagaagaagaagatgaagaagaagagtgttgagacgtacaagatctacatcttcaaggttctgaaacaagttcatccagatattggtatttcaagcaaagctatggggattatgaacagtttcatcaacgacatcttcgagaaattggcatcggaatcttcgaagcttgctaggtataacaagaagccgacgattacctctagggagattcagactgctgttagacttgttcttcctggtgagcttgcgaaacatgctgtttctgaaggaaccaaggctgtgactaagtttactagctcttgaattgtggatcttgttgaaatcgatgtttgtaaaattagggttttttagatttgatggttgttgttgactcttcgatcgatttctgttttgttatcttggtgcgatgtaatcaaatcggatccgatttctttcttcgatcatttctcccccccnnnnnnnnnnnnnnnnnnnnnnnnnnnnnnnnnnnnnnnnnnnnnnnnnnnnnnnnnnnnnnnnnnnnnnnnnnnnnnnnnnnnnnnnnnnnnnnnnnnnnnnnnnnnnnnnnnnn

SEQ ID NO: 3656 - DNA, 851 bp, Zea mays
  misc_feature (2)..(6): n is a, c, g, or t
  misc_feature (582)..(582): n is a, c, g, or t
  misc_feature (625)..(625): n is a, c, g, or t
  misc_feature (635)..(635): n is a, c, g, or t
  misc_feature (657)..(657): n is a, c, g, or t
  misc_feature (660)..(660): n is a, c, g, or t
  misc_feature (663)..(663): n is a, c, g, or t
  misc_feature (674)..(674): n is a, c, g, or t
  misc_feature (681)..(681): n is a, c, g, or t
  misc_feature (686)..(686): n is a, c, g, or t
  misc_feature (691)..(692): n is a, c, g, or t
  misc_feature (696)..(696): n is a, c, g, or t
  misc_feature (699)..(699): n is a, c, g, or t
  misc_feature (701)..(701): n is a, c, g, or t
  misc_feature (703)..(703): n is a, c, g, or t
  misc_feature (707)..(707): n is a, c, g, or t
  misc_feature (709)..(709): n is a, c, g, or t
  misc_feature (711)..(711): n is a, c, g, or t
  misc_feature (718)..(718): n is a, c, g, or t
  misc_feature (720)..(720): n is a, c, g, or t
  misc_feature (728)..(729): n is a, c, g, or t
  misc_feature (731)..(731): n is a, c, g, or t
  misc_feature (734)..(735): n is a, c, g, or t
  misc_feature (737)..(738): n is a, c, g, or t
  misc_feature (741)..(743): n is a, c, g, or t
  misc_feature (746)..(746): n is a, c, g, or t
  misc_feature (748)..(748): n is a, c, g, or t
  misc_feature (755)..(755): n is a, c, g, or t
  misc_feature (758)..(761): n is a, c, g, or t
  misc_feature (765)..(777): n is a, c, g, or t
  misc_feature (779)..(851): n is a, c, g, or t
  Peptide Sequence Number=SeqID_9869
  Probeset Number=SeqID_18059
gnnnnnggtgacaccttgaccgggcccccctcgagaacgcgctattttgacttcgctcttcaacgctagttggttcgtcggtgccattgcagccgctgggacaacgtatggcacctttcaaatgagcagtacctgggcgtggaggctaccgagtctcttgcagcttatcccttccatgttccaaatcagcttcatgtattggtgccctgagtccccgcgttggttgattagtcgtgaccgtggcgacgaggcattcaagattatccagcgaatccacagcgagggcgataacggtgaagaatttgcgaaattggagtttgcacagatccaatcgacgattcaacaagaacagcaactggcatcgtccttcgtctgggctgatgttgtccgtgatgcccccatgcgtcgtcggttcctccttgctggtatcgtcggcttcttcactcagtggagtggcaatggtttgctctcgtatgttccctgcatgtcagcttacgcaaagaagcgaatcagactgactctttgaggttctatatgaagaagatccttaccttgcggcatcactgatgaccgaaccgtcanaggtgaatcactcttcagactgccttggcaatgctacagcgtnaggcatcctnataccatgctgggcttataacncgnccnatggtttattnacaggtnccccncgggnntccnacngncngggncngngggggancnggggcatnntnccnntnnatnnnaancngcccccnccnnnngggnnnnnnnnnnnnngnnnnnnnnnnnnnnnnnnnnnnnnnnnnnnnnnnnnnnnnnnnnnnnnnnnnnnnnnnnnnnnnnnnnnnnnn

SEQ ID NO: 3657 - DNA, 600 bp, Zea mays
  Peptide Sequence Number=SeqID_9870
  Probeset Number=SeqID_18060
gggcgattatgttcggggcctttttccgttttttccccccactgtgggaaaagggggaattttcttccaaggggggttataaatttgggttacccccccgggttttttccccgttcccgggggtttgttaaaacgaacgggccaatgaaattgttaattccgactccctttttggggcgaaattgggtttcccggggccccccctcgagctgggggctgcgggggaaatccggctgcgaggagctatgctgccgggagagggagccgagcagagacgtcgcgtcatggggaggggacagcagagctgctgggcgtcatggggataggctcctgctgtgcctgctcggactccaagctgccgggggggtggagaaccagcagggagctgcacggctgggaaataggggcgccatgctgaagaaagggaaagtgcaggggggctcgaccatgggaggaagaaggtgtgggctgcacaggggcatcgagctccctgctctgaatgccggggagaagagggagcgctgggcagaggaagaagaagggggaggggatgaggagccggcctgttctcctgcagggagcgagcgccagggaggaggg

SEQ ID NO: 3658 - DNA, 693 bp, Zea mays
  misc_feature (601)..(693): n is a, c, g, or t
  Peptide Sequence Number=SeqID_9871
  Probeset Number=SeqID_18061
tacgtaagctcggaattcggctcgagcccctccctgctcatccccctcccctgctttcctcccctgctttcctcccctgctgaaactgctttcctcccctgtgctgccgctcggtctccctgctcccccgccgtcttgcaggagctaggaacatgcaagagtaagctcagctaggaatcagatatgtctactggccttctttttatacttactgtgactcatattgtcatatatagtagttaattagttatatacataatatatatataatttatggctatattgccaaaacgcctagaaaagcgcctagaagcgcctaagaccgagtactcccgactaggcgctaggcgaatgggtcaccgcctagattccgcctagcgcctagctgaaccttggctgctactgtgatgttttgatctaatcctggtagcaattgtggtgtgcattccatcatggaagtgatggattcatcagtgattcgttgttattgtctagtccagattagttcatagaccacattttagcaaaaaaaaaggtagggaacaattgtaggtttgagaatctcatattatatactatgtcatatctagagatgtgctannnnnnnnnnnnnnnnnnnnnnnnnnnnnnnnnnnnnnnnnnnnnnnnnnnnnnnnnnnnnnnnnnnnnnnnnnnnnnnnnnnnnnnnnnnnn

SEQ ID NO: 3659 - DNA, 459 bp, Zea mays
  misc_feature (348)..(348): n is a, c, g, or t
  Probeset Number=SeqID_18062
aagctggagctccccgcggtggcggccgctctagaactagtggatcccccgggctgcagggagagctcactagtcccccccccccccccctggcggcgggtgtaagtgctggaggttgtacaagagtgaacaagcctcaagaaggagagacagagagagacacaagagaaatcgctggtcagacacgagagacgccaagggaagccagggactgcaggaggacggccaagggcttttatgagttctggttctacggagtggaatctggtactgcggatctaccgtacagcaaacgaacagaactttttttcctctcgcaacagtaatacacctaaaagcagtgcctanatcgcagtcctccgatcatacgcacgcctcggtccttcttcgagcgcaaatctctcttccgcccacgcctctcggtggacgaaaagggttcctgggctggggagtgagacg

SEQ ID NO: 3660 - DNA, 1349 bp, Zea mays
  misc_feature (1)..(9): n is a, c, g, or t
  misc_feature (1338)..(1349): n is a, c, g, or t
  Peptide Sequence Number=SeqID_9872
  Probeset Number=SeqID_18063
nnnnnnnnnccctcctcctccggttctcctcgcaccttctcccacctctgctctgctctgctctgctctcccaggccaggccctgcagctgcaagcaccgaggacagacagagtcgctcgcttcgccaccactagctgttgcttgcctgccacccaaggatttccttccatcgagatcaagtagcgtagcggcttgcctgaccaagaggcagagctctcgatgacgaagcagggcatggtggtgccggtgcctgaagcggccgtggcggtaccgcccaactcggcgccgctgttccagtacccgccgccgcgggccgcgccgggcgtcgccgtgcgcaagaagtgcctgcagatgggcgccggcgccgggcgcatcggcggctgggtggagtccatgcgcgcgtcctcgcccacccacgccaaggcggccaccgcgctcgccgcgggcgtcgaagaggagcggtacaccgcgtggatggtgaagcacccatcggcgctggccatgtttgaccagctggtggcggcgtccaaggggaagcagatcgtcgtgttcctcgactacgacggcacgctgtcccccatcgtcaacgaccccgacgccgcctacatgtccgacacggtggctggatccgacggcaaaggcaagcatcccctgcccgctgccattccaaccatccgagcatcctgctcagctcagggcgaaacaaaaccctgctccctcactgccccctcgcagacgagacgcgtgtagctagggttttggtctcgccgcgcacgcctcctgaagcttctagacgttcgaggaggaggaggaggaggggaggctcccgccgccgccgtagccatggcgtccaccaaggtgcagcgtatcatgacccagcccatcaccttcatcttcggtttctccaagagcaaagcgcgcatccagatctggctcttcgagcagaaggacctccggattgagggtcgcatcatcggatttgatgagtacatgaacttggtcctcgatgatgctgaggaaatcaacgtcaagaaaaacactaggaaatctctgggccggatactcctcaaaggtgacaacataactttgatgatgaacactggcaagtgaagattcttatggcaggaatgatgtttggtgcacgcgttgagtatctgtgacacattgtactccatccatccagacttaaatgtatcatgtcattatggtttagtgagagttgtattggctgttaactacctgagtaacctcatgtgttagctatatgctacatgctgtgacaatgagctgctcagtgctcacttgtgttccaaagattagcccgacttgtgtgacgnnnnnnnnnnnn

SEQ ID NO: 3661 - DNA, 262 bp, Zea mays
  Peptide Sequence Number=SeqID_9873
  Probeset Number=SeqID_18064
tgcatgcctgcagagctcataagaatcattattagccttgtggctatgtgccattcacttggggttatgcaccgtgatctaaagccagaaaacttcctcctttgggataaagaagatgacctgtcaataaaagcaatcgattttggtctatctgtgttcttcaaaccaggtaggacatcaaatttgatgtgcggcggcagcgtcttctgtaaagctgaaatctcagaaaacagtagtaggacctgaaaaaactcaagctgca

SEQ ID NO: 3662 - DNA, 469 bp, Zea mays
  Peptide Sequence Number=SeqID_9874
  Probeset Number=SeqID_18065
tgtcgaagcgaggaagaggaggaacctctggaaacaagttcaggatgtcactgggtcttccagtggcagccaccgtgaactgtgctgacaacaccggagccaagaatctctacatcatctccgtcaaaggtatcaagggtcgtctcaaccgtctcccatccgcctgtgttggtgacatggtcatggctaccgtgaagaaaggtaaacctgatctacgtaagaaggtgctgccagctgtcattgttaggcagaggaagccatggcgccgaaaggacggtgtcttcatgtacttcgaggataatgctggtgtcattgtcaatcccaagggtgaaatgaaaggatctgctatcactggaccaatcgggaaggagtgtgccgacctgtggccaaggatcgctagtgctgctaacgccatcgtttaagttctatctctcttttgtgttgcttgaacgttttatcaaacctctgt

SEQ ID NO: 3663 - DNA, 351 bp, Zea mays
  Peptide Sequence Number=SeqID_9875
  Probeset Number=SeqID_18066
agtcgctccgtcagctcgccgcagttcttcactgcgcccagctcgcctgctcgctcccgcgcgcccaacttgcctgctcgccccagtgctcctgctcccccttgtgcgccaccgccgctgttgcctgtcgcctccaccggggccgctcgtgctggtgctaagcgtcgcgcccgtgctgagaaggttgtgcagcctgtcgttgttttgggtccgaccgcacacccggggttgcccctcaaggtgttttctaggagtaggacggtgtcaacgactgtagcaaaatggttcgtgccgatcgcacgaaagacagtgaacaagatttacaggttcgggccgcttagagatgcgtaa

SEQ ID NO: 3664 - DNA, 704 bp, Zea mays
  misc_feature (166)..(166): n is a, c, g, or t
  misc_feature (638)..(639): n is a, c, g, or t
  misc_feature (643)..(645): n is a, c, g, or t
  misc_feature (652)..(654): n is a, c, g, or t
  misc_feature (697)..(698): n is a, c, g, or t
  Probeset Number=SeqID_18067
ggatcttcattattcactatcacgcactgtctagcagtggtggccatcatgggaaggatttggaagaaggatcattaggagatcaatatgagcaacaacagagcccagtgacacttagccgctatgagtctcaaaagagaagggattggaacacttttggacagtncttgaagaatcagagacccccagttccattatcccagtgcaattgcaaccatgttcttgacttccttcgttatcttgatcagtttgggaaaacaaaggttcaccttcaaggttgcatgttctttgggcaaccagaaccccctgcaccctgtccttgccctctaagacaagcttggggaagccttgatgctctcatagggaggctcacagctgcatatgaggaaaatggtggatcaccacatactaatccttttgcaagtggtgctatccgcgtgctccttagggaggtcacacagcgccaagcacaggctaggggtctacctcacaacaacaaaaacaacagcccaagccagggaaatgaacaatcaacctcctccgccatgcactccccccggatttccctcttgatataatggataatgtggcatataaattaaattggaggagttcttacttacaaggcacaatcaatnnggannntttgatnnntatatattcggtaatttgattgcatcccagtactcttaaagtnnctgttt

SEQ ID NO: 3665 - DNA, 567 bp, Zea mays
  Peptide Sequence Number=SeqID_9876
  Probeset Number=SeqID_18068
tggcaaccgccaaggccgttgccgctgggaactcctgtcgccaggaggatgtcattgccacagccaatctgagtcgccgtgctattgcagatatgctccgggcttgcaaggaagctgcctaccacccagaagtggctccagacgtgcggctccgagccctacactttggccgggaatgtgccaatggctacctggaactgctggaccacgtgctgctgaccctgcagaagccaagcccagaattgaagcagcaattgacggtgcactcaaagcgtgtggctggatcagtcactgagctcatccaggctgctgaggccatgaagggaacagaatgggtggacccagaggaccccacagtcattgctgagaatgaactcctgggagccgcggctgccattgaggctgcggccaagaagctggagcagctgaagccccgggccaaacctaaggaggcggacgagtccttgaactttgaggagcagatactggaagctgccaagtccatcgcagcagccaccagcgccctggtgaaggctgcctcagctgcacagagggaactggtggccc

SEQ ID NO: 3666 - DNA, 619 bp, Zea mays
  misc_feature (612)..(612): n is a, c, g, or t
  misc_feature (614)..(614): n is a, c, g, or t
  Peptide Sequence Number=SeqID_9877
  Probeset Number=SeqID_18069
aggcgatttctctcccgggcggtacttcgagcgtcagcagtaactacaacgggctttttcaagcatggttcgccgatggcgagcgcttcataacacaggcggcggactcgactctcatttattcgaggaccgcggtccaggaggacatcacccaggcgaccggctctgcgttcggcggaacgggcaactggttttacaacaacgcgggctcgcggatcgacatctatcaggtgggtgcgagcgcaactccgaaggcgtcgattaccgtgtccaatcccaccgtcatcctatccggaaccaccttgggccttttgcaggacggtcagctcagtgtcgtcgatttctctttggcgacgcctgcgaagatgcctcagacgctgcccgtcgctggacaattggccggctatgcggcgacggatgcggcccattggtttgtcggtaacaccaacggtgttgtcctgaacggcacgggttcgcccgctactgtccggatgttcgattacggcaaagccctgagtattgcgggcagcgcgagccgctttgcggtggctactggctcgggtcgcgtcatgttctatgacagctcgacgcatgtgctcgagggggggcccncnacccg

SEQ ID NO: 3667 - DNA, 459 bp, Zea mays
  Peptide Sequence Number=SeqID_9878
  Probeset Number=SeqID_18070
gggtacctcgaggccggccgggaatgtgactattctgtgatggatgccaaaaaaaaaaaaaaaaaaaaaaaaaaaaacctcgggttcggcgacgacggcgccgacttcggggaggagcacgtccaggtcccacccggcgcgacgctcgagtacatcgtgcacgtcgacagggtgtccatcgcgccggcgtgacgcggcagtagatagttcgcagtcctgcaggtgttctagatcattagtttgatggctcggctcggttcgtttctgtactggcagtctgacactcggtagcgtgaccacgactgtgctagctgccatgagccatgggacaggttcattcgcgtctttgcaagcaagatcgcccagaagagcagacagatttctgagcctgcagaccatgctcgtttcgacaaatatatgatacagtgcggccttgtacaacaagagcatgtttctgtg

SEQ ID NO: 3668 - DNA, 698 bp, Zea mays
  misc_feature (115)..(117): n is a, c, g, or t
  misc_feature (452)..(452): n is a, c, g, or t
  misc_feature (637)..(639): n is a, c, g, or t
  misc_feature (687)..(690): n is a, c, g, or t
  misc_feature (692)..(694): n is a, c, g, or t
  Probeset Number=SeqID_18071
gagcgaaagagagagtactctcattgagtgagttccttcatcatagtcatcaccacacacaaacatgccgatcagaaacatcgccatcggaaggcccgaagaggccactcacccnnncccttgaaggctgcgttgtctgattttatctccacactcatcttctttttttccggttccggttccagcatcgcttacaacaaactcaccaacgacggacccgcttcccccgccggtctcatctccgccgtcttagcccatgcatttgctctcttcgtcgccgtctccgtcggcgccaacttctccggtggtcacgtcaaccctgctgttaccttcggcgccttcgtcggcggccacatcagcttactccgcggcgtcgtttacatcatcgcacagcttctcgggtctatcgtcgcctccttgctcctcctcttcgttactggactctctgttcnccgcatttggactttccgctggagttggagttggacccgctttggtgtttgtgatcgttatgacgttcggtttggtgtacactgtgtacgccacagccgttgatcccaagaagggtaatctgggaattattgcccccctcgcgatcggtttcattgttggcgctaacattttggcgggtggggcnnncgatggagcatccatgaacccggctgtatcatttggacctgctattgnnnncnnnacct

SEQ ID NO: 3669 - DNA, 565 bp, Zea mays
  misc_feature (5)..(5): n is a, c, g, or t
  Peptide Sequence Number=SeqID_9879
  Probeset Number=SeqID_18072
tatanatatagcaggacggcgggcgcacgcaaacttgaattctctacatctacggccgcttttttttttttttttttctttttttttttttttttttttttttttttttttttttttttttttaaaaaaaaaactttttttttaattacaaacaattttttatttctaggggggacccataaactaattgtcacaggaattacaaaaggttttcattattcaaactgccataattaataataataaatcgcgagggaaaaagtatggttccccttaagcaaagtaacaaaccttattattattaatattatttttagggcctagcactaacagtttgctaaagttttgcataaagcagccgccctagctcctttatattttcagcctccaagcacacgagcacgcggacgttgccggaaccaccgtcgtcgttcatcaagggcataaagccgccgcgaacaaactccgcccgcaacatggattgcggttttccccagccaaaatctgggtcggggtgtggcctacccaaccagctggtaatattcaggcccgccgggggaaaaat

SEQ ID NO: 3670 - DNA, 231 bp, Zea mays
  Peptide Sequence Number=SeqID_9880
  Probeset Number=SeqID_18073
tgcatgcctgcagtcgctcaccaccgtcgcaggagaacgcatggacggccacgcgggcgactccaccatccagtgccagcacctgctccagctggagtccggggccgacatagtgaaggcgcacacggagtggcgcccgaagcgggcgcgtggcgaggggagcttgaggggagcttcgggggttttccggccgagaatgcatgaatgaaactcccacctggagccgaccgg

SEQ ID NO: 3671 - DNA, 550 bp, Zea mays
  Peptide Sequence Number=SeqID_9881
  Probeset Number=SeqID_18074
taggttataggtcttttggttctctttttagggaacacataattccggaaatttttagtggttcatattatagagcaattaaatgggcgtttgatatgtaagcattggcagtgcctcagggaatattgatctcgtacataataattagacaatggttcgtctcacatgtaaccttattttcttggcaaaggatcccccccccccccccccctcttgtggggtttttcacggtgggcgatcagtgattcaccagtatatatatggctattattattacaaaaaaaaaaaaaaaaaatatgggtaccggacaccctcgagcgggcccgcgggacggcggggccggctatacggaacgccgatgggcacggtctcactggagcatccattgacaagaggagcgcgtgaggagcaccgctgggggggcgcccacgtcgtcccggctgtggagacgcttgtcgcctttggcggggcgtgcggcaccgaggcggggagggggggagggggcgcagaccgttgcggggcgtgaggctggtgccgggtcgaagagccg

SEQ ID NO: 3672 - DNA, 252 bp, Zea mays
  misc_feature (63)..(63): n is a, c, g, or t
  misc_feature (75)..(75): n is a, c, g, or t
  misc_feature (77)..(78): n is a, c, g, or t
  misc_feature (82)..(83): n is a, c, g, or t
  misc_feature (87)..(88): n is a, c, g, or t
  misc_feature (92)..(93): n is a, c, g, or t
  misc_feature (150)..(150): n is a, c, g, or t
  misc_feature (201)..(201): n is a, c, g, or t
  misc_feature (215)..(216): n is a, c, g, or t
  Probeset Number=SeqID_18075
aactgcaggaaaaaaaatcttgtttttttcagcgaccatttgagatcgagaccgaccacaccnaaaatccatctngnnaccnncgtnncgannccggccagcgaagatccacctcgcaaccagctccgctgctccgcagctccggcacanactaacgaggatgaacgacctcatgaccgacgacccggagctcggcgcgtncctggccgaggtannacgccgcaaagaccgaggatgatcgcgttgcgcgac

SEQ ID NO: 3673 - DNA, 1219 bp, Zea mays
  Peptide Sequence Number=SeqID_9882
  Probeset Number=SeqID_18076
tttgttttttttttttgaaacactttacttttgattaaaatggaccggtgatatcattaaacatctagcaagcaagatatttgtttacgttgacaagaatatttttagtatgcagtgggcgtgagaagatttgcttatttaacagcggaatgctgcaaaaatctaactaaaaatgtagattatgagcatgcatggggcaaacaatacggtcatttgaacacatctctctttcctgaccatcattgacagcagtggtgagatatctcagtcaaggtctcaatggattgatgaatcacggtgcatggtcaagattcaattgccaaccatatgacctagatccacacttgcttgagtcctcacttatcttggagttcgttaagatctcgcctagaggtccacattgaggtatataccaggagctttatatgcaatcctgctacacttgtgtcatgttaggtgtaagtcaagtagtatgtggaccgtctgaacatgagaaagccgatgagactagcacggtaacattatttctgttcttttctgattctaacctgtcattctgagatagactgataattcttatcattgattgaggtgatttggtgtcatggggctggttagaggcatagaaggaatgattagattcacccatggcttacatggactgtttacatatagttctataagatcacggcgaggcccccacctgaaggcagcttcccggctattgatgtgcaattctggtgtggttgtggtatattctgtgggatggagggtggctgacgccggcatgcagaatagtcagccgacgaggctacgtcgtaatcaggctgcctgttgttttcagactccaacctgtctttgttgtctgcggtcaagtttgacttgtctgaaatcgacggcgacagggtgatggcgcagtgttgggggaatgttcctgtggtcgcctccaccccaggctttcaccatcgtgtcggcgttgtgccaagagtcggaggtaccgccttggttgcctggtttgttcgactgccaagagttggtgtcgcgcgtcgacggtttctgacggcgcgccgccgaccggactggccatccgcccctgcttggttggggccccgtcacttcgttccatccgtccgggggcatcggccacgtgctgggtcagagtgtgcatttgtggatcgtggtgatggaggcgagcaggccggacggtaggggggcctga

SEQ ID NO: 3674 - DNA, 774 bp, Zea mays
  Peptide Sequence Number=SeqID_9883
  Probeset Number=SeqID_18077
tcgagtcagctacgtaggcccccccccccataaaaacatatatccattcgcatagcttgataatctattgagcgctaccgaggttcaccacattagctacacttacatcatcacaactcttctctacccaaaactccaccaagaaaaaaaaaaaactctcattccaacaacctccacaacaacctctcccttcaaaccaaacaaacaacccccgaaaatcaatcaaaatggccgtcatcgacatcaagaccaaagcccagttcgacgaactcacaaaggcaactccctacgtcgccctccaagcccacgcaacctggtgcggcccctgcaaggccatctcccccatgttcaacaagcacgccgaggccttttccaacgacaagtacacctttgcccgcttcgacaccgacgaggtgcccgatctcgcgtttgagctgggcattcgcagcattcctgcgttttttattttcgagaatggggataaggctgatactttgacgggcgcgaacccgcctgcgctgaagaaattgacggagagcattgctgagaagagcaaggctggcgagctcaacaccaccgaggacttttaaacacgtgcgggacgaagacgaggattgttgcagaggaggatacatgaagtattaaggaagaaagagaacaaatgcaaacgagatacctgcaatgcatggtgttggcgaagaggataccacaatctacaacggacaagtagacatacatacaagtcatctttagtctgcaaaatataatcatacc

SEQ ID NO: 3675 - DNA, 601 bp, Zea mays
  misc_feature (558)..(560): n is a, c, g, or t
  misc_feature (601)..(601): n is a, c, g, or t
  Peptide Sequence Number=SeqID_9884
  Probeset Number=SeqID_18078
gcgtgcgaatccagtgagagcggcgggaggatggctgggttggcagcgctgtacggcgccatggcggcgctctccgtctccgctcccgccgcggcgagcaccagcagcttctggggcaaccggctcgccacctactccgcagttcgacgaaggtgtgtgcgttatcctgtgactgtgagcagtgtgggggcgagcggatccagtgagagcggcgggaggatggctgggttggcagcgctgcagggcgccatggcggcgctctccgtctccgtgcccgccgcggcgagcaccagcagcttctggggcaaccggctcgccacctactccgcgccgcagcctggggccggttccttcctgctccccaattccgttctgttttgctgctatgatggtttgctaatagctgttgaggtgtaatgttctagggtggatcggagtatctggacagcgttgcaacttgcaaagcgcgttttggatgggattgtctgtatcgattggatgcaatgaaacggaaaattaacgacattttttgcgttgttattaaaaaaaaaaaaaaannnaaaaaaaaaaaaaaaaaaaaaaaacaaaaaaaaaaaaaaan

SEQ ID NO: 3676 - DNA, 620 bp, Zea mays
  misc_feature (1)..(1): n is a, c, g, or t
  misc_feature (318)..(318): n is a, c, g, or t
  misc_feature (332)..(332): n is a, c, g, or t
  misc_feature (426)..(426): n is a, c, g, or t
  misc_feature (441)..(441): n is a, c, g, or t
  misc_feature (448)..(448): n is a, c, g, or t
  misc_feature (454)..(454): n is a, c, g, or t
  misc_feature (457)..(457): n is a, c, g, or t
  misc_feature (470)..(471): n is a, c, g, or t
  misc_feature (490)..(490): n is a, c, g, or t
  misc_feature (496)..(496): n is a, c, g, or t
  misc_feature (517)..(517): n is a, c, g, or t
  misc_feature (521)..(521): n is a, c, g, or t
  misc_feature (527)..(527): n is a, c, g, or t
  misc_feature (576)..(576): n is a, c, g, or t
  misc_feature (597)..(597): n is a, c, g, or t
  Probeset Number=SeqID_18079
ngcggcgtatcgcgcagcttgaaatacgcttcctgccggccaggattgcccgccccaagagtggactgcgcgccgacttgccggaaagcgtcgctgtccacatgattgatgtccgcgaggtcaacccgccggctggcgaggcgccgatccactggcggcttctgacgacacacgcagtggtcagcgagacgaatgcttgggagatcgtcgatctttatcggcaacgctgggcaattgaacagctgttccgcgtcctgaagagcgcaggcttcgatattgaaaatgtgcagatcgaggagaaggcaccccgcgaccggntgataactgcaacnctgatcgcggctgtatgcatccagcaactggtgcacgcccgtgatggtggtccgggaacgctgcggcctctgagcgatgcattcgagcccgagnacattccactgatcnaggcctnctgcgntgncctcgaaggcaanncggagcggcagaagaaccntcatcngaaaggctcgcttgcgcgcgntgcntgggtntgcgcacgtctcggcggatggaccggctattacggcaagccgggcccgntcgtcatgcttcagggttggntcgagggcccggtacccaattcg

SEQ ID NO: 3677 - DNA, 636 bp, Zea mays
  misc_feature (601)..(636): n is a, c, g, or t
  Peptide Sequence Number=SeqID_9885
  Probeset Number=SeqID_18080
atgcaaggcaacaaatctaagcagaaaacaccaatcagacaagcttgcagcattcacgctgcgacggagcgagaaaccgagcaccgaacagcacgcaacagagctgtagaggcaagcgagctgcgagcagcggagcaggcagcacgcaagtgcagcagcacggtagcagaggcagccaggcacgcaggcagccaggcgcccagccggcagccgcctaggcctagccaggcgagcagccagcgggcaggagcgccgcagcgaccagcagccgagcgggtgagcgccgcagcggccagcagccgagcgggtgagcgccgagcagccgagcagagctgctgcgcggtgcgcactgggctggcaggagcgcagagcgctggaggcttggtcgcctggggctggaggctggctgcctggctggagcggtcgagcggcactacggcagtgtgcgacggcggcgagcgacggggcttgcgtgcctctgccaggcggccgcgctgggccctcctgccgcgtcggactgctcgtgaggaggtggtggtgtcttggaggagggggataaagttccgctcggagccgcggctgatccgagctggcagcatgnnnnnnnnnnnnnnnnnnnnnnnnnnnnnnnnnnnn

SEQ ID NO: 3678 - DNA, 438 bp, Zea mays
  Probeset Number=SeqID_18081
acgctaggaacggcggcatggcgctgtagtaggtcggcttccacgcgggcccagcggcgccggcgtcgtggggccgcgcgccgcagcggcggcaccgctcgccgggcggcagctggtggtgatctgggatttgcgggatcaatgaatcaatccacggctttcagtcgtttgttgcagctgaaacactgcatgcagtctgcagcatactagtaccgttaccgtccgtaccggctctgcacagtttgtaaatactcgagtaattattatcgtcgccgcagcagcattgtgttctgggtaaatcatgcaatcagatcagctagctcgcctgggacgtgaatgcgaaagcgaatgtgaatcccgagaaatgtattttgcgtgacctgacctgagctgactgctcccgaatgcatgatgcttatctcaaaaaaaaaaaaaaaa

SEQ ID NO: 3679 - DNA, 980 bp, Zea mays
  misc_feature (980)..(980): n is a, c, g, or t
  Peptide Sequence Number=SeqID_9886
  Probeset Number=SeqID_18082
cggacgcgtgggcggacgcgtgggcggacgcgtgggctgactcttgggcggctggcgtggtggtttctctgactgcgtatgctttctgggcgtcaaagaagggcaaggaattcgggtacctggggcctatcctgtcttccgcgcttactatcctcgtcctaactagctttcttcaggttttcttcccactgggacccgtgtcggcgggcttgttcggtgggctaggggctctggtcttctcaggcttcatcctgtacgacaccgagaacctgattaggcgccacacctacgacgagtacatctgggcgtcggttgggctgtacctcgacatcctgaacctgttcctctccatcctgaacatgctcaggagcatgcaatccgacaactagccggtcaaagcaccgcaccgcggcctcttgatatcgaacacggtatacccccgcggtcctgtgctctggttgttaagaagacgggatcgaagtgcgacatatgtattgtctattgtatgagccccctcgtggcaacacttccgggcacacaattgtgctctggtcatgtcaccttgtatgttcttcgtcactttgcaaacaactgcaagtacctcatatcgttttgtgctcgtgctattccgcctattcgcgctaaaaaaaaaaaacaaaaaagaaaaaaaaaaagcggcccgtcgggctccaggcttcagctccctgttacccgttggagttgagtggcactctgcgcgctagtcagtgatcataggctgtagcctgtgtgcatagttgaaatccgctcacagttccacacaccatacaacatccgaagcataaagcagtaaagccttgagccgcctaatgcctaatgctgacatccatcaaacagtgatgggctcactgctcccttttccagtttgcaaaacctgaaaccgccagctgccattatggatatcggacatcgcgcaacgcagaggcgagagggcggtattn

SEQ ID NO: 3680 - DNA, 942 bp, Zea mays
  misc_feature (895)..(942): n is a, c, g, or t
  Peptide Sequence Number=SeqID_9887
  Probeset Number=SeqID_18083
gaaccaaagcaacaaaggatcatagttgaagtctgaagtcctctaaaaaataattgtcagagagaaaaattttaaaataaactgccatggagtcagcatgtagttaatacaacgacatacaattctgttgtgtgttcaagaaaaacaaataggaaatttgcaacatttatgaaacagacaaggttttcttctgattggtacaaaaagctgtactgattctggtgttctcctataaatttctcttttcttccccagccaatcttatacccgaatcttgcccataatgtatcatttgaacaagtggatggcttatagttatcatgtgatatctaacaataattgagtctcctaagccttgtttgtatactagaaacaaggtttaggagtctcaattaggccaggttagttttagctttggttccggttaggtttctactgcgacagctgcggcgcagaacttcaattcgtagcatttctaaaaagtagtttctatttgatcttcctttctccgagtggagtaggtcgtttggtccatccatcaatggccgaaccggactgctggggtactccaccactgatgaggagggctgttgctggtgttggaatctggaaggcagaagacgagtctgttcgttcggccaaggaagaagagtgcaccttgcacttggactgtatgtattgggacaggtgcatgttgcgtgcacccttggttacatacatcacatggtgttgtcacccgtaacgacatgataggcctagttaggagagctgagtggtggtagcgaggtgttgaagcaagaaactatgactttagcttgctatctgtgtgattgcgatctgtgtgaggctgaggtaaaaaaatatgaatggaccaatggaacagtaaagtcagtgnnnnnnnnnnnnnnnnnnnnnnnnnnnnnnnnnnnnnnnnnnnnnnnn

SEQ ID NO: 3681 - DNA, 395 bp, Zea mays
  Probeset Number=SeqID_18084
tgtattttttttaattttgttgacaatttttttttttaatttgtttttgacttttcagttgttggtcttttaaaatgatagaaaggggaatgaggatgtgagagtttttgtgaaggttgatggaaaagagttttggattaactatcagttgacaaataccctcagtgtaaaactagtttggtattcgagaaggagttccggatcgatgggatcgaggaacgggaacgtggtacgttgttttttgctactaaaactaggatttaacactactggaacgagattgttcccacgttcccggaatggaacgaatgttcctggaacgagcaacgtgaccaagttcccagttcccggttactacatcactgtttgggtgtatccaaccacccacgcgtccg

SEQ ID NO: 3682 - DNA, 529 bp, Zea mays
  Peptide Sequence Number=SeqID_9888
  Probeset Number=SeqID_18085
gtgggaggcgtggtggctacggttatgattatggctatgcccccagaggcgggtcctattaagagcaagccgaattctatgatgagccccaggaatatgctcccccccctggccccggacgtggcaaagggaaaaggggcggcatcccttggcgtgggcgtggaggccccgggcccccgcgcggtggccgagggagctactcctaggcgcgaaaaattcgacgtgccgaatgggtgggcttattagttatctgttagcgtttgctccagtgctcttttatggagctccgcccccggcctggaattatcttgtaggcccttccagggggtactctacttcagctgctgtccctgtgcaactcgtccgggcaagttttgtggctcgctcgtggttttgtagctaggttaagcgagtgaagttcccctcggtagcccagtatttcctgcgagattgtttattcttctgttaatgtaccccccctactatttcgtttggattatggaaactgggggcacccgtttcatgtttt

SEQ ID NO: 3683 - DNA, 809 bp, Zea mays
  misc_feature (498)..(498): n is a, c, g, or t
  misc_feature (500)..(500): n is a, c, g, or t
  misc_feature (513)..(514): n is a, c, g, or t
  misc_feature (518)..(518): n is a, c, g, or t
  misc_feature (524)..(525): n is a, c, g, or t
  misc_feature (532)..(532): n is a, c, g, or t
  misc_feature (534)..(534): n is a, c, g, or t
  misc_feature (540)..(541): n is a, c, g, or t
  misc_feature (543)..(545): n is a, c, g, or t
  misc_feature (549)..(550): n is a, c, g, or t
  misc_feature (552)..(552): n is a, c, g, or t
  misc_feature (562)..(562): n is a, c, g, or t
  misc_feature (566)..(566): n is a, c, g, or t
  misc_feature (568)..(569): n is a, c, g, or t
  misc_feature (572)..(572): n is a, c, g, or t
  misc_feature (575)..(575): n is a, c, g, or t
  misc_feature (579)..(580): n is a, c, g, or t
  misc_feature (582)..(582): n is a, c, g, or t
  misc_feature (585)..(585): n is a, c, g, or t
  misc_feature (593)..(594): n is a, c, g, or t
  misc_feature (596)..(596): n is a, c, g, or t
  misc_feature (598)..(598): n is a, c, g, or t
  misc_feature (601)..(809): n is a, c, g, or t
  Probeset Number=SeqID_18086
cccgccggctggtcgtcggcgcgcgagagggagagagagagagcccactcgtcccccccccccgaatcgaaacagatcggaaaatcgtctagagagagagagagagagagagaatgtcgtatcttcttccacatctgcactccggttgggctgttgatcagtcgattctggccgaggaagagcgtctcgtcgtcattcgtttcggccatgactgggatgagacctgtatgcagatggatgaggtgcttgcgtctgttgctgagacgattaagaactttgcagtcatttatctggtggacatcactgaggttccagacttcaacaccatgtacgagctgtacgatccttctacggtcatgttcttcttcaggaacaagcacatcatgatcgatcttggaactggtaacaacccctggtgcaacgggcgctcgtgggctggcgagtgctcctttggatcactcgacctgttaccgtggcgcaccggacgggccttggttngntgattagctccannagantctccnntaaatcngngctatnntnnnactnncntacacttatnttgntnngtnaanaccnntnggngtctttanntntnctnnnnnnnnnnnnnnnnnnnnnnnnnnnnnnnnnnnnnnnnnnnnnnnnnnnnnnnnnnnnnnnnnnnnnnnnnnnnnnnnnnnnnnnnnnnnnnnnnnnnnnnnnnnnnnnnnnnnnnnnnnnnnnnnnnnnnnnnnnnnnnnnnnnnnnnnnnnnnnnnnnnnnnnnnnnnnnnnnnnnnnnnnnnnnnnnnnnnnnnnnnnnnnnnn

SEQ ID NO: 3684 - DNA, 452 bp, Zea mays
  Peptide Sequence Number=SeqID_9889
  Probeset Number=SeqID_18087
ggtacggaatcggagggtcggcccacgcatccacacacgggtgcgggcttctacagccttaggagcacatattagaacttgtacctgtattaataagaataaagcgtatactctgaaagactctaaaatatgaaacattgggctcgcaaggaaaatggaccccgggccatatggctaattgagtataggtgttgtgatgaacaacacagatccatgagctaataacgtatgctagtgactatgtgtgtagatcacatgatgcacgatttactcggactaagggattgaggaaagcaacacctcaggagaagacattaagaagatccaagaaaagtgcaagtgtgctgctgcggactgtctgtgcgagacgcacgggactgtctggtggcacaccggactgtccggtgcccacactccggaatgtccggtgcaccaaggaactctagcccaac

SEQ ID NO: 3685 - DNA, 758 bp, Zea mays
  misc_feature (1)..(18): n is a, c, g, or t
  misc_feature (30)..(30): n is a, c, g, or t
  Probeset Number=SeqID_18088
nnnnnnnnnnnnnnnnnnggcaccgcctgnccgcagacggggtgcggtcacgtgctcgccagatccagctaccgttgaccttctccttgccttccactgcaggcgccggagcagggggtagtactcctaccggcgggggcctgaagaatacggcagccgcctccgcctccacgcgacaagcgacggcggaggcgtgcagtagccacgtccaccacgcgatcgtataaaatggatcactctatccaaccttcccgacagcggctgtgtgcaagaaaaaatagggtttcggtggcagcagttgtacctccactcacgccgccgtcgcctccgagccccactccccgatccagacaaccaccccgcccagatccggatccacctagtgcagcacggtcgtggctaccggatctcacagcctccgcggatgctgcgccgccgccatcccactgaagtccgaccagcgcctcgtcgaggtattcacccccttcctcgagaagctcatacgcctacgtcgagctccgttccggcacccaggcctgagacgacccccctgcaggcgctggtgggtgagagggagctgccgagcaacgggtcgccatcggtggtggatgacgtcggcgtccaggccgcgaccgttccggacggattggcacagcaagatccgcacgacgcagggcgtccgcgaccgccggatgcggcttctcgatcggggtcacgccgagagttcttcgtgctgcaggaccgccttgggttcgaca

SEQ ID NO: 3686 - DNA, 1177 bp, Zea mays
  Peptide Sequence Number=SeqID_9890
  Probeset Number=SeqID_18089
aagcatcaagcaaggcaatcagtagcaggcttgcagctacctcctcttcttgcttcccgtcgacttcctcttcctcccccgtcgccgatcgaggacgaagatggggaggagcctgctcccgctggcgctgctcgtcgtcctctccgccgccgcggccgccccccagctcgtcggagcagcagggcgagaccattccctaggaatcatccagaaagacatcatacagacggtcaacaaccaccccaacgccggatggacggctggatacaacccctacctcgcgaattacactattgagcaatttaagcatatgctgggagtgaagccaacgcctccaggtttacgggctcgtgttcgcaccaaaactcattcaagatccgagcagctcccaaaggtgttcgatgccaggtcgaaatggtccggctgcagcacaattgggaaaatacttgatcaaggtcactgtggttcctgctgggcttttggtgccgtggagtgtctgcaagatcgtttctgcatccatcacaacatgaacattacgctttctgccaatgacctagtggcttgctgtgggtttatgtgcggcgatggttgtgatggaggatatcctatcagcgcatggcaatacttcgtccagaacggtgttgttactgacgagtgcgatccatactttgatcaggttggctgcaagcatcctggatgtgaacctgcttatcctacacctgtgtgtgaaaagaaatgcaaggtgcagaaccaagtttggggaggaaaagaaacatttcagcatcaatgcatacccaagtaaactctgatccaaatgaatagagcaatttgccgatggtctaccaaaaaaaaaaaaaaaaaaaaaaaaaaaaaaaaaaaaaaaaaaaaaaaaaaaaaaaaaaaaaaaaaaaaaaaaaaaaaaaaaaaaaaaaaaaaaaaaaaaaaaaaaaaaaaaaaaggggggggccgttttaaaggacccaagtttacatccgggggcttgcaacgtaatagtttttttttggggcccccaaaattaatttcctgggccggggtttaaaaagggggggaggggaaaaaccttggggttcccaaatttaatggctttgaaaaaaatccccttttccccagttggggaaaaacaaaaaaggccccacccgatcccctttccaaaaag

SEQ ID NO: 3687 - DNA, 1190 bp, Zea mays
  misc_feature (1)..(589): n is a, c, g, or t
  misc_feature (1032)..(1032): n is a, c, g, or t
  misc_feature (1190)..(1190): n is a, c, g, or t
  Peptide Sequence Number=SeqID_9891
  Probeset Number=SeqID_18090
nnnnnnnnnnnnnnnnnnnnnnnnnnnnnnnnnnnnnnnnnnnnnnnnnnnnnnnnnnnnnnnnnnnnnnnnnnnnnnnnnnnnnnnnnnnnnnnnnnnnnnnnnnnnnnnnnnnnnnnnnnnnnnnnnnnnnnnnnnnnnnnnnnnnnnnnnnnnnnnnnnnnnnnnnnnnnnnnnnnnnnnnnnnnnnnnnnnnnnnnnnnnnnnnnnnnnnnnnnnnnnnnnnnnnnnnnnnnnnnnnnnnnnnnnnnnnnnnnnnnnnnnnnnnnnnnnnnnnnnnnnnnnnnnnnnnnnnnnnnnnnnnnnnnnnnnnnnnnnnnnnnnnnnnnnnnnnnnnnnnnnnnnnnnnnnnnnnnnnnnnnnnnnnnnnnnnnnnnnnnnnnnnnnnnnnnnnnnnnnnnnnnnnnnnnnnnnnnnnnnnnnnnnnnnnnnnnnnnnnnnnnnnnnnnnnnnnnnnnnnnnnnnnnnnnnnnnnnnnnnnnnnnnnnnnnnnnnnnnnnnnnnnnnnnnnnnnnnnnnnnnnnnnnnnnnnnnnnnnnnnnnnnnnnnnnnnnnnnnnnnnnnnnnnnnnnnnnnnnnnnnnnnnnnntgtacctccctgcaaacatgcaacgagcaaaccagccgagtaaccgctcaagcttaaccagttgaataacggtttcagctcccatattcctataggattcccatgtgcaatgggatcaaggttgtttatgcattatgcattataggaaacgacacgcctgatgttgtatgggcagaggtgggcttgcagagagcatctcaaaattgataattgtagcttctgccaatatgtttatccttcttcgtctcttgtgctcaagagttattcacagcagtttttcaaatttgacctcaccctagcaaggttaccacaccacatgttaaccatgccacacttatttaaggtgatatttgtttaattttcataagtttgggagccaaagaagtcattgcctatttaggtcgctgccgagtagagcctagctggctggcagggacatgcgngaaaacttatttggttcattgaatcaaaaagatcaggctgagtggagcgtttgtttgtttggttgtactaggatatgttgaatcaaactgaaagaggaaacaatcactaagataatttttattttgcctgaatcgattgtataatacatattttcacn

SEQ ID NO: 3688 - DNA, 608 bp, Zea mays
  Probeset Number=SeqID_18091
caaacaaatttttggggtcaagggtccctaaaaccctaaattggaaccctaaaaggagccccccatttaaaactttacggggaaaaccggcgaaagtggcgaaaaaagaaaggaaaaaaaccaaaagaacgggcgctaaggggctggcaaaaataacggtccccctgggggtaacccccccaccccccggggttaaagggccggtaaaggggggggccatttgccaattagggtgggcaaatgttgggaaaggcgatcggggggggcctttttggtattaacccaactggggaaaaggggatttttttcaaagcgattaaattggggaaacccaaggtttttccaattccaacgttgtaaaaacccggccaattaaatttaaaaccaccccctaaaaggggaaatgggccccctaaaagcaaggtcaaacggcccccaatgtgaaggaaatttgcaaaaattgcccctaagggggttccggcccaaaggaaaaacctttttttttttttttttttttaattttttttttttttttttttttttttttttttttttttttttttttttttttttttttttttttttttttttttttttttttttttttt

SEQ ID NO: 3689 - DNA, 603 bp, Zea mays
  Peptide Sequence Number=SeqID_9892
  Probeset Number=SeqID_18092
attcggctcgaggcgagagctagagagtgagtgagagtgacgagagagtgagagacagaggagggccggcgctcgtgaggtcaactcgggccacctggcacgaaagctcagggctccttgctcctcctatgaacccaccgcacccgccttccaggctcccattttctcgcccgggagccgcaattccatcctgctgctcgagttatatactcacccaatagaacaattctatgcctgacgattgcacttctcgagggagaagatcatactgaaccagaactcgagcggtgtcgcaactctaaatggtaggcatgatgacttctttggaagccaccatgaaagttccctcatcgatggcaacctccacatcaaggaaatgcccaccctgaccaaacagactctactccccaattcggcggaacagttttattttccaagacccggtcaatctttgccacgccattcctccattcttggggcctccctcctccaaatgtatttttctaatgacaaagaacctaaatttggcaatcatgtttaaacaaaccccttccaagatacaaattgggaacccaaagccttattaaataatcttaaccttct

SEQ ID NO: 3690 - DNA, 831 bp, Zea mays
  misc_feature (799)..(831): n is a, c, g, or t
  Peptide Sequence Number=SeqID_9893
  Probeset Number=SeqID_18093
cgaccgggagggagatttagaacaccctatgcggagcatccttaagcgtgggatgtagggatggatggcctcggaccatggcgtttccttgccggtacgggtccgtcgtcgtgccgctgaggttgggcagacctgggcatgcttcgaagggctggcatgcgctgcgccgtggccggaattgttgccgccacggacttgtcttcacgaggtttctactatccaaagaatcaccctggtaactggaatctcaagtgccaggtcaagaacaagtaccacaggatgaagcgcttggaggatgctgtgatgagttcgtgagtggtctaggtcgtcgtctcccagtcaactttgggttgctggaccgttgtctccttataatttaattatttattttgtatagaattcatgttatgtagtaaagatatgacattcgatcttgtgccatgattcatcatatgtgtgagacttggtcccagcacacctggtgattatgttcacgtccgggctttagacccctaaaacccggttgtgacaaggtgggcgccaatgttggtcacttgttctcaaaggctataaatcaagaacaaggcaacacaattgttaatggttaaaggccttcgtccttcgaagcattatttcatctcggatataatgatcttcagacgaaggacatgaaggtcacaccttcatcattttatcatgtaaacatgaatataaataagaaagtaaaggaatatagaagaatactaaggagtaagggtaataattgctatatatcaataatccatttatcattatcttnnnnnnnnnnnnnnnnnnnnnnnnnnnnnnnnn

SEQ ID NO: 3691 - DNA, 849 bp, Zea mays
  misc_feature (1)..(55): n is a, c, g, or t
  misc_feature (799)..(799): n is a, c, g, or t
  misc_feature (849)..(849): n is a, c, g, or t
  Probeset Number=SeqID_18094
nnnnnnnnnnnnnnnnnnnnnnnnnnnnnnnnnnnnnnnnnnnnnnnnnnnnnnnattcactgattattgttttaaggcaaattaagatcatcttcaaaatcttctcagatctcttccaattttctagaaaaaacatgtcttgctgtggtggaagctgtggttgtggatctgcttgcaagggcggcaatgagaccgaaggctgtcaaaggtgccgttgcccccagtacgctgccgcccagactctctacttcgtcgttgcggcgggccggagcgctcccgacaagagagccgcccctaccggacccgcacagccccctcacgcttcctgcggagcttggcgcgagagcaaacccagtcttgcgaatgcagaacccctttgtcgacatggctgtaacaaccccacccttcagtgggcgccgcttaaacccaatgccgcgcagtgtccgccggtagcttagacggcttcctggcaaagaagattttgaagatgatagacgatggaagttataccaagagaagcaagcaaggatttcagaagagaagaagagactgaaaactgtcaagatttcagttgcagtaggtgatttggctgccgaagtttctagtgtgtcttctcagccagtcaaagaatcagcgacactagagagtctcctaaagaaaccacatatccactacaagcttcttgagaagcatggctttggaaatgaaacattatctagaatggagaaagactgtgtagagatcgatataaaatatgaaggtttcattgttcgccagcaaaaccaaatgcagcagatngtccaccaacaacatagacgacttccagacaatttggattactattcgan

SEQ ID NO: 3692 - DNA, 588 bp, Zea mays
  Peptide Sequence Number=SeqID_9894
  Probeset Number=SeqID_18095
ttttttttttttttttgactttgaattccaacatatatttgtttagaaracgattcgtgtgataaacatataaaaataatagcatacacatgtttcctaaattttgaagtgatctttcagttctattacatgcaaaagtataaatatacatctagcaaactaaaaatctctccatcggctgggtgatacgccaacagctagcatgcatgcgagtaatcattttttcacacttcaagcaatctgatccttgcttccagctcctcttccttggctttcgggtcgccacagggagatccgcgcggaggtgcagtatgaataggaagaagggcgtgaggcagttggggactggccgtgctcgacgaagaggatcagtagcaggatggcggccgctcgacagagggcgctggtggtgggatggtgccgctcaacggagtgccagagggcgagaccgcgcgggtcagggagcgtcggtcgatcgacagaggctacaggggtggggcacaggacgacggttgccaatttcgacggaggggaacatgcgcaggcccgacggcggcctcacttggtggcggcggcgtgtagggttta

SEQ ID NO: 3693 - DNA, 564 bp, Zea mays
  Probeset Number=SeqID_18096
atgggtgtgggcaagggacggcttgacgggtggaagtgcttattgaatgctttgcgactgttcagtgaccacggcaagagtaacaaacgcaagcgcgagccgactcctccgtcggaggacttcggcgactcggaatactcggaggaggagttctcctccgagtccgaggggtctccggctcccgtctctcccccggcgtcgtctgatgattcagacgactcccaggggattgccgcggaagtctggatgtacatccgggccgtcgagcgctccgggctcgagggctcggatgagtcggagtactcctcggatgaggaggacttggacggcggcgaggacgaggacgacgacgacggtggcgacggcgacggtgacggcagcggcagcggcgggggcagcggcggcggcgacgagagcaagggcagcaccagaggcggcagcagcaagggcagcaccagggtcggcggcggtggcagcagtagcaagggcagcaccagaggcggcagcagcaagggcagcaccagggtcggcggcggtggcagcagcagcaaggccagtggctaa

SEQ ID NO: 3694 - DNA, 678 bp, Zea mays
  misc_feature (592)..(592): n is a, c, g, or t
  misc_feature (601)..(678): n is a, c, g, or t
  Peptide Sequence Number=SeqID_9895
  Probeset Number=SeqID_18097
accggaggcgttcctccgttccaccacaaaccagcggaccttcagcttctccaccgcggctccgcctcttctttcacggctccaccacgcactaaccctaaagcttccctgcgttgccggcgatgagcagccttcgagccatctcctccctcctccatatctactccacgtccgccgccgccagacgaggagccgggcggctggggttcgcgccgtcgcccggcgggagattccgggtaccgtcgaattccggtccgcccgcgttcgtgttggacgaggtagcgagggcggccggcggggttcggaggagggcgtccacgcgcgcggcgagttgggactcggagaaatcgccgtacgagacgcttggtacgatcctatgcgctctgtagtttgtgcgactatgcatctgttttttcgtgtgtcaatcctgatgatcaacttgtatgatgctgatcagcttactatcgaattatttgatccgttgtggctccgcctgatcgaaatttggtgattggttacacaaatttgatcatttgctgttgccatgcttctatgtttcagttctatcaattattctaaaaaatgattcagntctaaagtnnnnnnnnnnnnnnnnnnnnnnnnnnnnnnnnnnnnnnnnnnnnnnnnnnnnnnnnnnnnnnnnnnnnnnnnnnnnnn

SEQ ID NO: 3695 - DNA, 596 bp, Zea mays
  Probeset Number=SeqID_18098
gattgtgcttgtgcccatacttgtttgttagtgtctccaacacagagagaatgcggagatcccaggactaccacgcccacattacaaaaattcaaagggagcctattgttctcactgatgtccctcagtacccaaatgttcatcatgccttcaagaaggagactgtttatgaggaagatgagactgagggatcctaccacaaccaccaccaccaccacaaccacaacccagagtttcgtgagaggattgaagtggtagagtatgagaaacctgctgaggttggtgaagtcgtttatgaagaggaagtggttgaaaccgatcaatatccacgaaggaacaggggtggtcttgaatcgcacaagtggaagacctacaggccatgagcttcttgttatcaagtgactattttgctaagcaggctacctaatatatcataattaccggtgtgcttgtattaaataaattcctgcttagccagctgttatgacataaattatacgtcaattattaataaagcatatctgcagtatatatttaaattagcatgcgatctgtaaagcctaaaaaaaaaaaaaaagaaaaattaaaaaaagggg

SEQ ID NO: 3696 - DNA, 850 bp, Zea mays
  misc_feature (1)..(1): n is a, c, g, or t
  misc_feature (748)..(850): n is a, c, g, or t
  Peptide Sequence Number=SeqID_9896
  Probeset Number=SeqID_18099
ncttcaggaggttgaagactggctctataagatggcgaggatgaaactaagggggtttatattgcttagctagaagaacttaaaaaagttggtgatcctattgagctgcgcttcaaggaatgggagattagaagttctgctgttagccaactggtatactgcatcaatagcttcagagaagctgcacagtcttccgaccagaagtttgaacccatagacatgtcagaaaagcgaaaggtcattaatgagtgttcggaagcagagacttggctaatagagaaaaagcagcagcaggatgctctgccaaagcatgctaatccggtactccttgctgctgaccttaagaagaaagctgaaacacttgacaggttttgcaaaccgatcatgacgaaaccgaagccagctcctaagccccagactccgcctgtggcagaaaaccaagctcctgagcctcagaccccagagcagcagcaatcaggtggcgaaagcccagccagcgagggagccgcagaggagcctcgagccgagcagatggagacagacaaaccttagggagccccagatccctcggcttagctttgccagtgatccaacatttgtgtgattgaccctgttcccctcctgttatagtcggtaggggggagtgaactaaacgaaaggttcacccacatttatttaaggaatgtgtgttgggacattcaaggtattatgtttattgtccttaacaagggaggtggttgggtgtttnnnnnnnnnnnnnnnnnnnnnnnnnnnnnnnnnnnnnnnnnnnnnnnnnnnnnnnnnnnnnnnnnnnnnnnnnnnnnnnnnnnnnnnnnnnnnnnnnnnnnnn

SEQ ID NO: 3697 - DNA, 607 bp, Zea mays
  misc_feature (601)..(607): n is a, c, g, or t
  Peptide Sequence Number=SeqID_9897
  Probeset Number=SeqID_18100
aaaacccgccaaaagggggaaaaaagaaaggaaaaaaaccaaaagaacgggggttaaggcccttgcaaaattaacggtccccctgcgggtaaccccccccccccccgcgctttaaagcccgctacaaggggggttcatttgccaatccgggtgggcaaatttttggaaaggcgattggggcgggcctttttggtattaacccaactggccaaaaggggattttcttcaaagcgatttaatttgggaaccccaaggtttttccaatccccacgtttttaaaccccggccaattaatttttaaaccactccctataaggggaatttggccctttaaaaggaaggttgaacggcccccaattttatggaaattttcaaaatttgcccttttgaaaggcccccccggcaaggacaaaatggggcggattggaaagggctaaaaggggaatttttcacaaaacttttttttttttttttttttttttttttttttttttttttttttttttttttttttttttttttttttttttttttttttttttttttttttttttttttttttttttttttttcattttttttttcaggtcattgctcacannnnnnn

SEQ ID NO: 3698 - DNA, 487 bp, Zea mays
  Peptide Sequence Number=SeqID_9898
  Probeset Number=SeqID_18101
atcagaagaagaagtatctttgttttcgctctcttcttctactttcgatctttgacgattagaaaaggaaagtgatggctgccgttaatgggtaccaaggaaacactccggcggcgtcaaagcaatctgctcctccgactaagactgttgatagccaatctgttctcaaaaggctgcaatctgaactaatgggcttgatgatgggtggtgacccgggaatatcggctttcccagaggaagacaacatattctgttggaaagggacaataacaggaagcaaagatactgtgtttgaaggaactgagtacagactctcactctctttctccaatgactatcctttcaagcctcctaagatcaagttccacactggttgcttccaccccaatgttgatctctacggcaatatctgtttggacattcttcaggataaatggtcgtctgcatacgatgtcaggacaatactactatcgattcagagcctttt

SEQ ID NO: 3699 - DNA, 742 bp, Zea mays
  Peptide Sequence Number=SeqID_9899
  Probeset Number=SeqID_18102
cttgccgccggtcttatctcccacggcagctgagcacgtcgagctgcctggttgtttctgtccgccatggtccgcccagccgaggtctcgcccagctcgcctggccgctgcgcagccccctcggcttcatctccctccttctgccctctgccggcgctccaactttcctcccatggcgcgcccagctccctctgctcggtgctctctcgcccatggcacgcagccgcgtattctcgctcggcctccagctccggcgcccggctgagttccctggcgcgcgcccctgttcttcgttcccacgcgcgcatctctcctggccgccgagctccctttcctgtggtggctgtcttcctctgagctcgcccccgacctctgctccttcctcgccgtagagtttccttgccgtgcccctgctcctctcttctctgcgcgcgcttctccttgctgcgcgcatcggtctccagctcgcggagctccctagctcgctccctcagctcgccggcgctcctccctgtttcagctcggtgcccagccccagctcccgggtccagctcgtccgcgtcgtctggcgcagtgcgcgaaacccaagcagcaagcagtccgctatccagcaagtgctcgacagaaagctcgaacaagtcgtcgatcgtcatcctcgtccacgccaagatccgagaagattaggcgcagaagaaaataaattagtacgcgaccggaggatactcgatgcggataaagatga

SEQ ID NO: 3700 - DNA, 834 bp, Zea mays
  Probeset Number=SeqID_18103
ggacaatcagacacagaccagagtccacagcacagcagagcaccaccactactaccacccccagtggcaaccctgacaaggctctagcagcttagctgaagatggccgggctactctctgtcaaggccgtcgcgctcgccgccgtgcttgctgccgcgtatgcctcttgcgccgccgccgagcagccgggggcggcggacctcgacgcctccgccgtgtcttacagctccgcgtggcttccggccagagcgacctggtacggagcgcccaacggcgccgggcccgacgacaacggcggcgcgtgcggcttcaagcacgtgaaccagtaccccttctcctccatgacctcctgcggcaaccagcccctgttcaaggacggcaagggctgcggctcctgctaccagatacggtgcagcggcgacaaatcctgctccggcaaaatcgagacggtgatgatcacggacatgaactactacccggtggcgcagtaccacttcgacctgagcggcacggccttcggcgcgctggccaagccggggctcaacgagaagctgcgccactcgggcatcatcgacatcccagttccggcgggtgccctgcaacttcccgggcctcaagaatcacttccacgtggtggacggctccaacgcggtgtacctggcggtgctgatcgagtacgaggacatggacggcgacgtgatccaggtggacatgaaggaggcaacttcccgggtcgtggacgccgatgcgcgagtcctggggctccatctggcggatggactccaaccatcgcctccagggggcccttctccatgcgcatcaccagcgactccg

SEQ ID NO: 3701 - DNA, 1210 bp, Zea mays
  misc_feature (1)..(15): n is a, c, g, or t
  misc_feature (740)..(1210): n is a, c, g, or t
  Peptide Sequence Number=SeqID_9900
  Probeset Number=SeqID_18104
nnnnnnnnnnnnnnncggcagcgaccacgccgccgccgcgccgtcccacgcattgtctgttgctcagcttctcctagcccagctcctgctagctaggctaggcctaggctgctacatactgccatcatccatggagtcgcctcctgatcaggcggcggcggcggcggcgcgccaggacccggagcagcgggactacagactcatcgcaaaagccgtggacgaagcgtaccgggcggtggagtgcgacggcggcgggtaccccttcggcgcggtcgtcgtccgcggcggcggcagcgacggcgacgacgaggtggtcagcagcagccacaactcggtccggaaggacgccgacccgtcggcgcacgccgaagtgaccgccatcagacaggtacttactacctcgcatgctcgctcgcaaccatgtcgtagtcgcgcgcgccaccagaccttattaacagtgcgtcgatcggcgttccggccaggcgtgcaagaagctggggaaaaccagcctcgccggctgcgagatctacacgtcctgcgagccgtgcccgatgtgcctggggctcattcgcctggccaagataaaggtccgttccgtccactacgtactgccgacccatcgtttaataactagactagaaacgacattgatagagcgagctgaaggtgatgattggttgcgcgcctgtgtgtaacctgtaacgacgtctgcagaaggcgggggacggcgccaagtcggnnnnnnnnnnnnnnnnnnnnnnnnnnnnnnnnnnnnnnnnnnnnnnnnnnnnnnnnnnnnnnnnnnnnnnnnnnnnnnnnnnnnnnnnnnnnnnnnnnnnnnnnnnnnnnnnnnnnnnnnnnnnnnnnnnnnnnnnnnnnnnnnnnnnnnnnnnnnnnnnnnnnnnnnnnnnnnnnnnnnnnnnnnnnnnnnnnnnnnnnnnnnnnnnnnnnnnnnnnnnnnnnnnnnnnnnnnnnnnnnnnnnnnnnnnnnnnnnnnnnnnnnnnnnnnnnnnnnnnnnnnnnnnnnnnnnnnnnnnnnnnnnnnnnnnnnnnnnnnnnnnnnnnnnnnnnnnnnnnnnnnnnnnnnnnnnnnnnnnnnnnnnnnnnnnnnnnnnnnnnnnnnnnnnnnnnnnnnnnnnnnnnnnnnnnnnnnnnnnnnnnnnnnnnnnnnnnnnnnnnnnnnnnnnnnnnnnnnnnnnnnnnnnnnnnn

SEQ ID NO: 3702 - DNA, 1182 bp, Zea mays
  misc_feature (1118)..(1118): n is a, c, g, or t
  misc_feature (1182)..(1182): n is a, c, g, or t
  Peptide Sequence Number=SeqID_9901
  Probeset Number=SeqID_18105
cctcacaacaacctctacacctatacctcacaagtatgcatttaaagaacctagaagctgcaaaagttttggcagagaacctcctggatacagtagcagcagaattcggtgcttccagaatttcttcttcaaaagtatatggtgctgttcccctcctcagcagttgttagctggtgtcgacacctcaggaacaaaatcagatgttcactatattgtagggcccaatgtgttatcgggagctcacattcctttgcatctactggagttattgctcctgttgttgctcctgcagcgacagtgcaatcaggggctccaacatattctggggttccactacccagtaacatggcctatcctattcccccagcaaacggtggggcattttacagtggtggtggggacatttatccccaagcaactccgttgcagcagctggcattcacactcaagcatgcctcatcgtcggcaactcaggctgtcccagtgacgtccacaccaacaagcatggctacaaaggggaactcaatcttggatgcggagatggataaacgatcccgaaggaaattccaggaactaccggtttcgaagggcccagcaacagaaagtcaggtacagtttttttttctggtatagcctcgactagttcttaactacaggagctacagcagcctcttcttttgtacttgttctgctgtctcctctattcacctagttttctctgtattacctctcaggcgattaatctatattccatggcaaccccttccttccctgtgctgttcactagatgcctatcctgatttgatgagatcttccatatactcacatccttgtttgttctctcctttcgtagcttagcttgtgccatctttttataccccatcaattcttaccaacacgacttccgaggcgatttcaatatcaggatttggaatttctggcatatttgcctttggttgtaaattagatgtacactgttgctggccactacactaaaaactttgtatgccagtgtgacatctattaacattaagaggttcttgcacagaaacatttgccgcttttgtttatgatggcaccatcaaacatgggaagcacttctaattatccaggagttntgatgcaacacagcacatattccacatgcaattcatgatcttatgttttatacgtgtacctgan

SEQ ID NO: 3703 - DNA, 550 bp, Zea mays
  Peptide Sequence Number=SeqID_9902
  Probeset Number=SeqID_18106
atttaaaggttgggccatctaggaacatctagtgtttgaactttgtctgtttaaccaatttaagtgcacacattgataaccttttttgacaaactggattttgtagcttccagaactagaggtgttgtgcatgcacacatgtttttgtgggagctggtgaactagcattttgagctgaaacttcactataggcattagaaggcttgaaagaccttagcatttgaattttaagaacacaaaacttatctttgtcaaacaaacaaatagataactaacctaaggacactggaatgtgtttttgggactatcctatacttgggacttttgttttctcatattgttgtttatagtgtcttcgtaaagcaccctgaatttacaatgctaactccagaatccagatgccattaatgtcgacggatgctaagagaatgttattaagtacatgtttcctttgcttgaaagttgtttagaggcattttcttaaaatatattgtgctgtattagggaagaaagaatgagttaaatgatgtaaaatcacattcctttgaaa

SEQ ID NO: 3704 - DNA, 518 bp, Zea mays
  misc_feature (448)..(448): n is a, c, g, or t
  Probeset Number=SeqID_18107
gtttcctcgcctctgattgacactgctcaagcttatctcggcgaagaagaagaagaagagagaaacagaatggcgactcaaggatccgcacagaaggaggctgacatcaagatgatgtgtgctgctgaggttcacctcggaaccaagaactgcaactaccaaatggagcgttacgtcttcaagagacgcaacgacggtatctacatcttcaaccttggcaaaacatgggagaagctgcagatggctgcacgagttatcgttgctattgagaacccacaagacatcattgtgcagtcagctaggccttacggtcagagagctgttttgaagttcgctcagtacactggagctaatgcaattgctggaagacacactcctggtacattcactaatcagatgcagacctcatttcagttagccaaggtttcaccaatcagatgcagacatnccttcagtgaaccaaggcttgttgattcttactgacccaagaacttgaccaccagcctatcaaggaaggt

SEQ ID NO: 3705 - DNA, 436 bp, Zea mays
  Peptide Sequence Number=SeqID_9903
  Probeset Number=SeqID_18108
tcggcaacaagaaagatttacctgcccatggttcattttgtcaactggtccggcagtttgcgcccccatgagctccccgaagttcgccggcggcggcggcggccccaaaactttttggccttaggtggtcgggtttagcgtggaggaccccaaaaaggttttcctcaaggccaacccggaccccgacattgtggttttgcccgtcggctccttggtgcccccggattttccccctaaccgtgtccgcatttttgttgacattttcgcccagaccccccccatcggcttataatatataagctaccccctatttcctttccttgccccagacctttaaataaatatatatccgtttaaataacccgggccccccgaataatggatgtttgaattccccccaattaagtaatgcataaattaacgtattccaatgtcc

SEQ ID NO: 3706 - DNA, 1409 bp, Zea mays
  misc_feature (1387)..(1409): n is a, c, g, or t
  Peptide Sequence Number=SeqID_9904
  Probeset Number=SeqID_18109
gctaatcagtaaatggcatgctatgagttctgtcgtgaataactctctgggagcaatggcttggttttgtggtgggcgtttgaacaaaatctttaggattaacaagactttgtaggttgaattagaccttgcaaaattatgattttgtcttagtggtgtcactaagcatttgccaatgcccagaaaattatgattttgtcttattatatcgacaccatgcatattccaatcttctgtcatgcctcaccactttggagtctctatccagtctggtatggcccttctggaacctgcgcttaatgatgtacaaaaaaggttggccaacatgtgggcgtcactactgttattacgtggctaggtccgctctctctccgtataatggttatcatgaatgaaattggaagacatgttctaccttctaccgctcttgctagatggcccattgtattataatttgatttgtatcagtttagttcattgatgagatattatgacttgttcacactgcatttttacagtttctcatgcagtgaaaaagctattgttgcatcacgagtgtaagtaaaatgaattatcctccgtaatggatcatgcagacaaataggaaattgtaccattaacacaaaacatgaactatcacccaaacagaccctatctataaggctaataatatctaacactcttgtgacattgcttatgacctttacactaatcccacttcagtttgtcagacaatgactggttggttcgagctcttcgccatcggctgcctccgagctgtggcttcttcctgctgggaaaatgcctctccgccatcgaccgcctctgaggtgcggcttcttcctggcgagaaaaatgcctcccaatccctcatggcttcatttcgttacttatatcttgctaatgtgtttcattgtgctggtaatgagcaattctcaaggggatttcgaatggactctcgtatgggcaggggctaaaggagatggacaaactgcttgttgacaatatttttcagtgatgtggcagaaacatgctaggcctgctccacaggctcctctcggtgtctagtatactattatatgctaaactgtcggccaattcatccttcgacagtactgaaagcccatcttctaatgttgggaatccgaagcttctcctcatctcccgacagacagatatctctttgctgtccgggagacagtacaaaaaatcctcttctccgctgtcgttgaacactaatgcccccttcggatatttcagcttctgtgcatagtgttgagcttctcgttcttcttctttagagagtctttttcccgaagcatgatgaatgatatattcaatactttttttaaaagcttcgggagcaggagcatcagttttctcaggnnnnnnnnnnnnnnnnnnnnnnn

SEQ ID NO: 3707 - DNA, 583 bp, Zea mays
  misc_feature (556)..(560): n is a, c, g, or t
  Peptide Sequence Number=SeqID_9905
  Probeset Number=SeqID_18110
ggataaaagcaaaaaccaaacattgtcaaaagaaagaaaagtcagaaaaaacgatgtcagggatcatccagaagattgaggagacccttcatgtggtgagggcacaagaaagaggagcacaagggggaacaccatggccaacacaaaggggagcaccatgggcatggagaacacaagggggagcatcatggtgaacacaaggagggtgttgcagacaagatcaaggacaagatccattctgacaagggtgaaaaggagaagaagaagaggaaagagaagaggaagcatgaacatggtcatgagcatggccatgacagtagcagcagtgacagtgattagatctttcactgctactctctattaagcgattgtacggtaccatagttgtggggaagccagtctctttccttatccttctcatgatgcactaaaataagagagaaattatgtgtgctcctgcttttatatttacttggtgaatgtaaaacctcatctcttttggtttggtttggatgtataatagcataacgaaataaacattttaattattagcttnnnnnaaccctggcgttaaccaatttct

SEQ ID NO: 3708 - DNA, 534 bp, Zea mays
  misc_feature (163)..(163): n is a, c, g, or t
  misc_feature (500)..(500): n is a, c, g, or t
  Probeset Number=SeqID_18111
cggagggcgcaagaaacgacgcagcgagagcggcgcacgggccccacgcccgcgcgacgagggacgaggagcacaaggaccaggaaccgaacccggagccagagcggaagcgccgccagaacccgagaaaaaagcggaggcgggggagccaccccccgagcgngcgagcggcaccgggacagcgggcagcgccaaccagcgggaaaacgacgagggcgccggcaccccgagccgcagcgcgagggcgagcgggagcaccggacaggaggcggcggcggccagccggcggcaggcgggggggaggggggcggcggccccccggccgagggggccgcggaggcacagcggggggtcgtccggcaggtcctccaggtccgtgcccggccccgccgccgccgccggtatgctccccatggtggtggtgtgatctgagactgggggttgtgcacgtcaaaggcgaggagcaggggcctcaagagatctcgatgcgtgcttgggangtacgggaatcccggccggcctcgagggtcccaa

SEQ ID NO: 3709 - DNA, 930 bp, Zea mays
  Peptide Sequence Number=SeqID_9906
  Probeset Number=SeqID_18112
taagcaaaggcgatgggcaggcagacccgcgcggccatcctcctctagaaccttccacggccccacctcctccttcgttcctccgctcaccccaaccctcctcggcgagtcggctcctccctccacgcctctcctcgtcgacgagcggacccggtccacgcccccgacccccacccccgtccccgacccctccccgccccgctccctcccgatcccagatcccgccctccgatccggccgcgaccgtggtgggttcggtctccctctcatcggggcatcagccatggatcagagccggcgggcggtggattcgtactggcgatcgcggatggtggacggtgtcacggccgacgacgacaaggtcgcgcccgtctacaagctcgaggagatctgcgagctcctgcgcgcctccgacgccagcatcgtcaaggaggtcgccgatttcgtcctcaagcgccttgacaacaagagccccctcgtcaagcagaaggctttacggttgatcaaatacgcagttggaaaatctggtactgatttcaagagggagatgcaaaggcactcagcggctatgcgccaactagttcattacaaaggccaccctgatcccttaagagggatgcccttaataaggctgttcgcgaaactgcgaatgccgctattgctgcaattccctccacacaggaccctatacctgctagcgcaaccaaaagtgttggcacgcgcatacacagctttggaaatactaattacgagccatctacagacgaaatgaagtcttttcttaacgaacttatcgaaggatactatatcagaagtgcatccatcaagcacggtttgagctacttcgctgcaccgcatgcaataatgataaatgacaacggccgcacatacaagagccctaatctacataggtctctaaccacagaatct

SEQ ID NO: 3710 - DNA, 921 bp, Zea mays
  misc_feature (901)..(921): n is a, c, g, or t
  Peptide Sequence Number=SeqID_9907
  Probeset Number=SeqID_18113
gatagcaaagcatagtcacctgcctatctatctagcgagagagagagaggaaagctagctagctagcatggagtgcggcagcaagaaggcagcaggcggtgtgttggcgctgctgcttctccagctggtgttagctccgacgacggcgacggcccgcctcctgcaggcggatacccccaccgtggttggcctggacatcatcgcgagggagtttggccatccagtgagaggcatcctctgtggtgaaacctgtgtcttcctaccatgctatacggcagccatgggttgccaatgcattggccaaatctgcatgatgtgatatctggactagcgctatttgtaatttgtgttgggagaaacacaaggacggtacggtggtgttcaacttattgcatgtgtatggtgatctaataagtaaagtataataaaaagggatatgttggatgtgtacccatcgcctgctccttacatcatttttgacatatatatactcccttcgttccagtaaaaaaaaaaaaaaaaaaaaaaaaaaaaaaaatatccgcatccgctgcctccgcctctcgagtctcgtccacccgtcgtcctcctagctcctctactcgccagtcgccatgggcaagattaagatcggaatcaacggcttcggaaggatcggcaggctcgtggccagggtcgccctccagagcgaggatgtcgagctcgtcgccgtcaacgaccccttcatcaccacggactacatgacctacatgtgggagtacgacaccgtccacggccactgggagcacagcgacatcacactcaaggactcccagaaccttctctttggggaccagccggtcaccgtctttgggctcaggaacccctgggaaattccctggggggagggtggcgcttagtnnnnnnnnnnnnnnnnnnnnn

SEQ ID NO: 3711 - DNA, 702 bp, Zea mays
  Peptide Sequence Number=SeqID_9908
  Probeset Number=SeqID_18114
cctaatcgaaaaacataacataagataacgcatagagaaaaccaagaagaaaagaagatgtcgtggcaaacttacgttgatgagcatttgatgtgtgatgtcggagacggccagggtcatcaccttactgccgccgcaatcgttggtcatgacggtagcgtttgggctcagagcgctaactttccccagttcaaggcacaagagttcactggtattatgaaagatttcgatgaaccgggtcacttagcccccacagggttatttctagcaggagccaagtacatggtcatccaaggcgagcctggcgctgtaatccgtggcaagaagggagctggaggcataaccataaagaaaactggacaatcatgtgtctttgggatatacgaagagcccgtgacaccaggacagtgcaatatggtcgttgagaggttgggtgattacctcctcgaacaggatctctaagcccccatctcctcaaacctactacaatgttccaccttccacatttttttatgcaaacttaatatatatgatttgatttctgggttctttctaagaaggtgaagcctaatttagagtctgattcttaaaaatgtaaggttttcctttttctttttcttgatttcatcagatttattttattttgcttttgttaaccatgttaaataatttgtctatttgttattaaaaaaaaaaaaaaaa

SEQ ID NO: 3712 - DNA, 1645 bp, Zea mays
  misc_feature (1645)..(1645): n is a, c, g, or t
  Peptide Sequence Number=SeqID_9909
  Probeset Number=SeqID_18115
cggcgggcggtcgattattgacatcttgtcctctacctctcctttccaacacctaattaatggcgcgcccatacgtgcctgatgctggctccaaaccccgacccttttcatccctccctccctccctcgtcgtctcctgactttgctcgccggccgccccgcccacaccctcctcctgcgctaccactgtcagcaagtgcacacccttcgaggacagctgctgtcgccgccaaggccgcaaccggccgtcgctccatgctgcggtagaatttagaaacgagaagggagatggcggccgaggcgctggggttcatggcgcggggagccaacggtgggagggcggcggagctcgtcacaagggactttctcggcgggtgcgccgccaccggcgacgccagggacgcgtccgccaggaatggcaccgtgcccgggagggtggctcagcagaagcacgcgtgcccggcaacgccgatggacctcaacctgttaacaataaaactctttcatacctctcttcattaaattggtatatcatatcatcttggtttgcttacatgtcattgtatttaatgagaatgaaatttaggtgacatacccactaagaatggtcttattcatttccagccagctaaaaaaaacaaatgtacacttaatgcaaattaacgttgtcagcttactactttgaacccaagattaaaaaatgtttttaattgacaagctaagggtccctttggttagatggaataatctttagttcctggtttttagtccagtttaatttctattttgctaaacagaagggctaatatatagactaatgacacttcgctgacattttttgatatttatgccctctttttccatttattgggtagcatttgtaatgttgtcaggaagatatctcttgtgttcttcagcttgagatacatatattgcagtcgtcaatcattgtacagtgatcaaaaaacaaaaaaaaacgcggtgcccgcggtgcgagtcccactcccggcgccggccgtgagcaagaagccgcggatcgacctcaacgtcggctacctcggcacctaatttcttgtttgccatggcgtagcgccgtagcctagagccctagacggatcggccgccgtctcgtaccgtacggacgtacgtacgtacgtcctaaattataggctcgtgtaaaataacgatccatccacgaaccgagttgggggaccatatataggagttgtcaggaaatttataccgatcagactcccactcccctcccggttgtttgccatggcgtagcatagaacatgaatgatggttgatactgctgctgctcctgagaaccaatcaatcctactaccacaatggcgaaaaaaaaaaaaaaacggccccgtgctgtgtttgaatttcctctgcctccacctctgttttccgattcggatcggatcggacccgctcgcgcggtttccttctggccgcgggtttgctccctctgtacatgatgacggctggccaagaaatcgagcgatgtgatcgatccttcatttcttgtgtagtgacaagttgtcaaattggtagcgacagatgtttgattgagttgaaagaggcaccttgacccctaggtgtttttttttaagaaaaaggaaaaacttatcgn

SEQ ID NO: 3713 - DNA, 698 bp, Zea mays
  Peptide Sequence Number=SeqID_9910
  Probeset Number=SeqID_18116
tacactcctgaagctgtagactgtacgtttgttcctccccactcactcctgcgtttcctcgccgcgcggttccttctccctgatcctcctttggcttctcggctcatggcgatgacggaggtgcgccaattaggacagctggcgccaccggctcgctcgaatcaagggccgcgcacacgcctacacggagcaaaaagatagacatggtgttctacaagggcgcacgagaatgccgacaagaaccccaacttcgtcgggtgcgtagagggtgcactcggcatccgcggatgaatcgcatgcgcacgcacatcaatactttgtcaccgatgacaaggaaggccccatctgggaactgcagaagcacattgaacacatgtatgtcctgattaccaccccattccacccagcttatgtctctgcggagaggataacgaaggcaaataatcttgagcttcttctcacgctaagaatcgcgctcccatacatatggagcttccaccatctgctgctgcgggcttaactggggatgacgccactggaagcctcactctctctgcggcagaagatgagctcttgcgcattctgactctgctcaggaacttcttgcctgcgtaccaacaggtagttcaaggcgaatgcatcgtatccggcattgctccagacagcttatgattcttgaaggtaaaacttgttttata

SEQ ID NO: 3714 - DNA, 710 bp, Zea mays
  misc_feature (1)..(1): n is a, c, g, or t
  misc_feature (3)..(3): n is a, c, g, or t
  misc_feature (521)..(521): n is a, c, g, or t
  misc_feature (557)..(557): n is a, c, g, or t
  misc_feature (574)..(574): n is a, c, g, or t
  misc_feature (612)..(612): n is a, c, g, or t
  misc_feature (624)..(624): n is a, c, g, or t
  misc_feature (632)..(632): n is a, c, g, or t
  misc_feature (644)..(644): n is a, c, g, or t
  misc_feature (681)..(681): n is a, c, g, or t
  misc_feature (684)..(685): n is a, c, g, or t
  misc_feature (688)..(688): n is a, c, g, or t
  misc_feature (690)..(690): n is a, c, g, or t
  misc_feature (700)..(702): n is a, c, g, or t
  misc_feature (704)..(705): n is a, c, g, or t
  misc_feature (710)..(710): n is a, c, g, or t
  Peptide Sequence Number=SeqID_9911
  Probeset Number=SeqID_18117
ncnttggtcccgggccccccctcgtcgagaccattgtctcgcaatgtgtcgaaacgccttcacaccaaggtattttctcgatctcgaagagttgcgtgacacaagtcacaatggtcgtggctcagcgactgaggcagcccgccgcacaagtgtccacagccgtgtcgcattgaactcctggcaacgtgattcaagtcacgcaagcggtaatgaaagaccgcgtctccgtttcgaaatgttgctggccagatacaccgcgcggaattcacaggcgctgctgaccaaaaacgaaagctctcagtttcgcaggccaaaagggtcaattaggctaagcccaatattttcgattccgatttttggggaactggttatgggctcgtttgtgaagtgggctggtggcgcgggggttgcggcggtttccaccctgctgttgggggcatcttcggccttggcgcaaaactgcgcgacgacacaaaccctccgcctatcaacaacatcggcacgctggcagtgcctacganttccgctagccttcatttcggcggcatcggaacgtnaacaccgatttcttacncacaaggcacccgttcgtgtcggttccggaaacccggnccgataacccgngggggctntggccccccccncgcggcacttaacattagttttttttcaatcttgggnttnnacncnggggggcggnnnannccccn

SEQ ID NO: 3715 - DNA, 459 bp, Zea mays
  misc_feature (257)..(257): n is a, c, g, or t
  misc_feature (260)..(260): n is a, c, g, or t
  misc_feature (387)..(387): n is a, c, g, or t
  misc_feature (389)..(389): n is a, c, g, or t
  misc_feature (408)..(408): n is a, c, g, or t
  misc_feature (410)..(410): n is a, c, g, or t
  misc_feature (412)..(412): n is a, c, g, or t
  Probeset Number=SeqID_18118
ttttttttttttttttgtcgcggggttcgattttggatacacgtatatatcgaatctctaaactcatacacgtgaatcgcatcgtctcaatattacaacaataattcacaacaatcaaaacatggtttagaaaataaattgatgttttggggttgtcttcaaccttgggtgaacggatgacggcgaacggtgtgagcacggtcgccgggtgctgcgtgggcgagcttcacggtggtgagcaggggctcgatcgaggnggngttcctagcatggtggttcgccgggatgctgcatgggcggcgagtacgaactccggcgagtctccacggactccgggatggaccgcgatggcggggacgaactccggtgacggcatggacaggcaananagtgaggagtgtgtgtganananagggagctcagggagggaggagaagagaggagctcgatgaattttat

SEQ ID NO: 3716 - DNA, 431 bp, Zea mays
  Peptide Sequence Number=SeqID_9912
  Probeset Number=SeqID_18119
ctcactttgaagctctagggatccattctatgtatttgaaatccaaggaggattgaggacgaaggaaatatgtgaaacttgttggattggtatcctgttgtgtctaggataatatggttgggtcatctagtacaacattttcatggacatcgaggaaggttggcgcagccttgaatgcatcgttgctggttgtgaggggaggaaaggatgatctttttttagaaaaaaatctcacaaaggtggtctcaaagttgaatgcaacctttttgttcaatgcttgtccgttcgaaaaatactcatcaagaagctttgaccgtgtccaacaggttacctatatagttaccaaatcactatttttgcactctagactgcattgtttgtagagtagagtttgaaataagagataaaatgggaaaaaaaaaaaaaaaaag

SEQ ID NO: 3717 - DNA, 1811 bp, Zea mays
  misc_feature (1)..(648): n is a, c, g, or t
  misc_feature (954)..(954): n is a, c, g, or t
  misc_feature (960)..(960): n is a, c, g, or t
  misc_feature (969)..(969): n is a, c, g, or t
  misc_feature (971)..(971): n is a, c, g, or t
  misc_feature (1549)..(1811): n is a, c, g, or t
  Probeset Number=SeqID_18120
nnnnnnnnnnnnnnnnnnnnnnnnnnnnnnnnnnnnnnnnnnnnnnnnnnnnnnnnnnnnnnnnnnnnnnnnnnnnnnnnnnnnnnnnnnnnnnnnnnnnnnnnnnnnnnnnnnnnnnnnnnnnnnnnnnnnnnnnnnnnnnnnnnnnnnnnnnnnnnnnnnnnnnnnnnnnnnnnnnnnnnnnnnnnnnnnnnnnnnnnnnnnnnnnnnnnnnnnnnnnnnnnnnnnnnnnnnnnnnnnnnnnnnnnnnnnnnnnnnnnnnnnnnnnnnnnnnnnnnnnnnnnnnnnnnnnnnnnnnnnnnnnnnnnnnnnnnnnnnnnnnnnnnnnnnnnnnnnnnnnnnnnnnnnnnnnnnnnnnnnnnnnnnnnnnnnnnnnnnnnnnnnnnnnnnnnnnnnnnnnnnnnnnnnnnnnnnnnnnnnnnnnnnnnnnnnnnnnnnnnnnnnnnnnnnnnnnnnnnnnnnnnnnnnnnnnnnnnnnnnnnnnnnnnnnnnnnnnnnnnnnnnnnnnnnnnnnnnnnnnnnnnnnnnnnnnnnnnnnnnnnnnnnnnnnnnnnnnnnnnnnnnnnnnnnnnnnnnnnnnnnnnnnnnnnnnnnnnnnnnnnnnnnnnnnnnnnnnnnnnnnnnnnnnnnnnnnnnnnnnnnnnnnnncgtctttagacagctgaaaagggcaaaacatgacgcctgcattatttctgtggaacagaaaaggattccctcaagccttgatccagtgcaaagaggaaagcgctaaaataggcggaaactttcatatatatgaaagaaaaaacaagcaaaggaaactttcatatatatgaatgaaaaaaaacaagcgctaaaagtaataatacgtatatgctggagatagattcaacgctgttgcaccggttgagtcggttgttgtggtggttggccgtcccccctggtgtcttctcgtgcgccgggggcgtgggngggggncctaatggncncgaccctcctagcaactgggctcggcgctggtaccaccttcggagtgacgggcatgggtctcctcatgcggctcattaagcatcctggcaaggaaggagctgcctcggctccggcagctcagccatctttcttatctctgttggaaatgccaaactttattaagagcaagatgctagaaaggttaattcatataccaggagttggaaagaaatccgaaggccgaggcgaatctaaaggtaaaaaaggtaaatctgaacatggaagaggtaaacatgaaggtgaaggtaaatccaagggtagaaaaggtaaatcaagaggtaaagataaagataagaaaaagggtaaaggttcacgtaagggttcatctgatgatgatgaaagttcataaatggaagttcatataataattgtggtaaatgcatgggtaaagataaattcatgcaaagataaacacatgtaaagataaacacatattggtccatctattacaatatttagaatacgttatgtataattcatgaattttatgccacctataagaataaaactgttaataatggcaaaaaaaaaaaaaaannnnnnnnnnnnnnnnnnnnnnnnnnnnnnnnnnnnnnnnnnnnnnnnnnnnnnnnnnnnnnnnnnnnnnnnnnnnnnnnnnnnnnnnnnnnnnnnnnnnnnnnnnnnnnnnnnnnnnnnnnnnnnnnnnnnnnnnnnnnnnnnnnnnnnnnnnnnnnnnnnnnnnnnnnnnnnnnnnnnnnnnnnnnnnnnnnnnnnnnnnnnnnnnnnnnnnnnnnnnnnnnnnnnnnnnnnnnnnnnnnnnnnnnnnnnnnnnnnnnnnn

SEQ ID NO: 3718 - DNA, 722 bp, Zea mays
  misc_feature (582)..(582): n is a, c, g, or t
  misc_feature (584)..(584): n is a, c, g, or t
  misc_feature (597)..(597): n is a, c, g, or t
  misc_feature (608)..(608): n is a, c, g, or t
  misc_feature (624)..(624): n is a, c, g, or t
  misc_feature (629)..(629): n is a, c, g, or t
  misc_feature (633)..(633): n is a, c, g, or t
  misc_feature (636)..(636): n is a, c, g, or t
  misc_feature (641)..(642): n is a, c, g, or t
  misc_feature (644)..(647): n is a, c, g, or t
  misc_feature (650)..(651): n is a, c, g, or t
  misc_feature (653)..(653): n is a, c, g, or t
  misc_feature (658)..(658): n is a, c, g, or t
  misc_feature (676)..(677): n is a, c, g, or t
  misc_feature (681)..(681): n is a, c, g, or t
  misc_feature (684)..(684): n is a, c, g, or t
  misc_feature (687)..(688): n is a, c, g, or t
  misc_feature (691)..(691): n is a, c, g, or t
  misc_feature (697)..(697): n is a, c, g, or t
  misc_feature (699)..(700): n is a, c, g, or t
  misc_feature (707)..(707): n is a, c, g, or t
  misc_feature (715)..(716): n is a, c, g, or t
  Peptide Sequence Number=SeqID_9913
  Probeset Number=SeqID_18121
tctcacgcggtggcggcgctctagaatagtggatcccccgggctgcaggaattcggcaccaggagagagagagagagagagctcactagtccccccccccccccgagcttagagctctctctcagtcgaaaacaatggcgtcttcttcagcgacgctctctctctgctctactttctctgctcattgcaatgtcaattctcgccgttctagcactatcctctgttctctctctaaaccttcgcttaatttggctaaacctctgactggatttctttctccttccactgcgtcgacgtctcgaaccgcattcaccgtcgctccgaaattcgcggaatcagtcgtcgaagctgaaccggagactaccgatatcgaagctgtggtggtttccgatgtttcggaggttactgaggaaaaagctaaacgagaagagattttcgctggtattatgggtggtggacgccaatacatagtggttccagggagatatctctacactcagaggctaaaagatgcaaatggtgatgaccacattgttctcaacaaagtggcgcttggtggcacaacccaacctcccccgcaancngtgtgacaatgcncggactgtggngggaaagtcaggtttnatganaagngtnatctnnannnnacnnanaagantccgcagaattccgtccnncgcnatncannatngttacngnncccggcngagattcnncccccc

SEQ ID NO: 3719 - DNA, 208 bp, Zea mays
  Peptide Sequence Number=SeqID_9914
  Probeset Number=SeqID_18122
gggtctatgctaggagttcggctcgagcatctcctggcctctttctatgtatctttgatcaggcggctgcaatgggaggtagcggaacgtgatctcggtgtaccccgaggagctcaccttcctgtttgagctggagaagccgtgctattgcaacctcaaggtggtgaaccacagcgagcacgacgtcgcattcaaggtcaaaacgaca

SEQ ID NO: 3720 - DNA, 416 bp, Zea mays
  Peptide Sequence Number=SeqID_9915
  Probeset Number=SeqID_18123
atcaaatcttatggatcatttgaataatactcaaaagcaaatcatcaaacaaagtgtcttctcttagaaatagaagtgttgttacatgatttagcttaaatcacgattaacacaaccaaccattgttatcatgtcagatggaagattgaagtacacttcatatcttagctttcatgagtagtatgcatctattgggatttcatatacaagattagatgcttgggcatacaacactatatcacgtatggtgtaatgacaaatgagtttgtcatactcattgcccttctctttttaatacttgtatatttgcttaactcatacttgttgtatttgcattggtcagttgggttcatagattaataatagtgttaatccaatgaacctcatgttgttctcaacattatccttaaatacca

SEQ ID NO: 3721 - DNA, 758 bp, Zea mays
  Probeset Number=SeqID_18124
gccggccgggtcgggacaccgccacacccacaccacgcggcagtgcagcacgctgccccgcccctcgtactcggagagatatatccccgccttccctcgcgaaagatctcgtagagactacgacgacgacgacgacgacggctacgcaagaaggcgaggcggcgctgcttgctaggaccgagcttctggaagcctccaacggacccggtgccggcacggcctgccccgcgccgccacagggattgattgtgatcagatctattctgtaatgtacagcggctgagggtgaaccgaagatgaccgttgtgcgattctatctcgacaatgatagctgtgttgtgctagacgcgcggcagcgcggcatcgacttgctcctcagcgatgagtccaaacgcgagacacccgccatcgatctagcttcttgagacaagcatgagcctcatcggtacggagtgagccgcgttctcacacatgaaccccaaaaactccattgtctcagatcaagcgactgctcggtcgcaagatctccgaccccgagctccagagagtatctcgcgtcctgtcccgatccgtgtcacggagtgccccgatggatttcccttgatacatgtgcgcttcctgtgtgaggtacggacgtttacccccacccagctgcttgtcatggcgctgtccaatctgaacgacattgctgacgggaaccttaagactgcggatgatgattgctgcattggcatacctgtgtacttcagcgatttgca

SEQ ID NO: 3722 - DNA, 808 bp, Zea mays
  misc_feature (1)..(64): n is a, c, g, or t
  misc_feature (353)..(353): n is a, c, g, or t
  misc_feature (379)..(379): n is a, c, g, or t
  misc_feature (384)..(384): n is a, c, g, or t
  misc_feature (390)..(390): n is a, c, g, or t
  misc_feature (394)..(396): n is a, c, g, or t
  misc_feature (399)..(400): n is a, c, g, or t
  misc_feature (402)..(402): n is a, c, g, or t
  misc_feature (409)..(409): n is a, c, g, or t
  misc_feature (414)..(414): n is a, c, g, or t
  misc_feature (422)..(423): n is a, c, g, or t
  misc_feature (429)..(429): n is a, c, g, or t
  misc_feature (436)..(436): n is a, c, g, or t
  misc_feature (442)..(442): n is a, c, g, or t
  misc_feature (444)..(444): n is a, c, g, or t
  misc_feature (448)..(448): n is a, c, g, or t
  misc_feature (450)..(453): n is a, c, g, or t
  misc_feature (461)..(461): n is a, c, g, or t
  misc_feature (465)..(465): n is a, c, g, or t
  misc_feature (467)..(467): n is a, c, g, or t
  misc_feature (476)..(476): n is a, c, g, or t
  misc_feature (478)..(478): n is a, c, g, or t
  misc_feature (481)..(482): n is a, c, g, or t
  misc_feature (492)..(492): n is a, c, g, or t
  misc_feature (500)..(500): n is a, c, g, or t
  misc_feature (504)..(504): n is a, c, g, or t
  misc_feature (506)..(506): n is a, c, g, or t
  misc_feature (508)..(509): n is a, c, g, or t
  misc_feature (514)..(514): n is a, c, g, or t
  misc_feature (520)..(520): n is a, c, g, or t
  misc_feature (523)..(523): n is a, c, g, or t
  misc_feature (525)..(525): n is a, c, g, or t
  misc_feature (533)..(533): n is a, c, g, or t
  misc_feature (535)..(536): n is a, c, g, or t
  misc_feature (541)..(542): n is a, c, g, or t
  misc_feature (546)..(546): n is a, c, g, or t
  misc_feature (550)..(550): n is a, c, g, or t
  misc_feature (556)..(556): n is a, c, g, or t
  misc_feature (558)..(558): n is a, c, g, or t
  misc_feature (568)..(568): n is a, c, g, or t
  misc_feature (570)..(570): n is a, c, g, or t
  misc_feature (573)..(573): n is a, c, g, or t
  misc_feature (577)..(577): n is a, c, g, or t
  misc_feature (580)..(580): n is a, c, g, or t
  misc_feature (586)..(586): n is a, c, g, or t
  misc_feature (590)..(590): n is a, c, g, or t
  misc_feature (597)..(598): n is a, c, g, or t
  misc_feature (601)..(603): n is a, c, g, or t
  misc_feature (606)..(606): n is a, c, g, or t
  misc_feature (608)..(610): n is a, c, g, or t
  misc_feature (617)..(618): n is a, c, g, or t
  misc_feature (624)..(624): n is a, c, g, or t
  misc_feature (630)..(631): n is a, c, g, or t
  misc_feature (634)..(634): n is a, c, g, or t
  misc_feature (641)..(642): n is a, c, g, or t
  misc_feature (646)..(646): n is a, c, g, or t
  misc_feature (649)..(652): n is a, c, g, or t
  misc_feature (654)..(654): n is a, c, g, or t
  misc_feature (663)..(665): n is a, c, g, or t
  misc_feature (667)..(667): n is a, c, g, or t
  misc_feature (678)..(680): n is a, c, g, or t
  misc_feature (688)..(689): n is a, c, g, or t
  misc_feature (691)..(691): n is a, c, g, or t
  misc_feature (695)..(695): n is a, c, g, or t
  misc_feature (700)..(702): n is a, c, g, or t
  misc_feature (704)..(704): n is a, c, g, or t
  misc_feature (706)..(707): n is a, c, g, or t
  misc_feature (710)..(710): n is a, c, g, or t
  misc_feature (713)..(715): n is a, c, g, or t
  misc_feature (719)..(719): n is a, c, g, or t
  misc_feature (724)..(724): n is a, c, g, or t
  misc_feature (733)..(734): n is a, c, g, or t
  misc_feature (740)..(740): n is a, c, g, or t
  misc_feature (745)..(745): n is a, c, g, or t
  misc_feature (748)..(749): n is a, c, g, or t
  misc_feature (751)..(751): n is a, c, g, or t
  misc_feature (754)..(755): n is a, c, g, or t
  misc_feature (762)..(762): n is a, c, g, or t
  misc_feature (764)..(764): n is a, c, g, or t
  misc_feature (766)..(766): n is a, c, g, or t
  misc_feature (768)..(768): n is a, c, g, or t
  misc_feature (770)..(770): n is a, c, g, or t
  misc_feature (777)..(777): n is a, c, g, or t
  misc_feature (780)..(780): n is a, c, g, or t
  misc_feature (782)..(783): n is a, c, g, or t
  misc_feature (788)..(788): n is a, c, g, or t
  misc_feature (790)..(791): n is a, c, g, or t
  misc_feature (797)..(797): n is a, c, g, or t
  misc_feature (799)..(799): n is a, c, g, or t
  misc_feature (801)..(802): n is a, c, g, or t
  misc_feature (805)..(805): n is a, c, g, or t
  misc_feature (807)..(807): n is a, c, g, or t
  Peptide Sequence Number=SeqID_9916
  Probeset Number=SeqID_18125
nnnnnnnnnnnnnnnnnnnnnnnnnnnnnnnnnnnnnnnnnnnnnnnnnnnnnnnnnnnnnnnncttctgcataagaacaacgaatcaaaagcttgatcagctcggtgccaacaaaacctcaacaaccaagggtcatgtctgatctcgacgtccagcttccatctgcctttgatccgtttgcttaggcaaatgctgaggactctggtgctggtcctggaacgaaggattatagtgcatgtgcgcattcaacacgcaacgggcatagtagattctgactacaatccagggtcttgaagaatgagttctcctatatcaagatcctcatggatctgaagaaggaattcagctgcantggtactgttgctctggacccagagntaggnctggtnattnnnttnntnggttatncgagnataatatnntctacnatctatntcgcgntntgantnnnngatgatgnagancnttatagtgncnttnnctaaggggcntgaatgangctngncnntattnggatgnctntnatattggngnnctttnncatntganattgcntngcattgtttnanttntatnaanttgatnaatnttgttgnngannnganannnaattatnnaggagnatgatnnatntataatnntatnaannnnangaactgttnnntnttttgtattannnattattannancgcntgtgnnntngnncgntgnnntatngattnataaaaatnnatgtanatttntcnnanganntattttntntntntnatagtgnacntnnaatgntnngggatngnannttnang

SEQ ID NO: 3723 - DNA, 1312 bp, Zea mays
  misc_feature (1)..(11): n is a, c, g, or t
  Peptide Sequence Number=SeqID_9917
  Probeset Number=SeqID_18126
nnnnnnnnnnncgcgcatcccacaaccaccgaccaacctacgtcctaatcctccgctgctcgggtataaaaatgatgatgcctctgaaggaaagccataccaggttcttgcattcctgtcagatcccactgaaacaggtctgaagagaagcgctcgacgtggtgcaggtctgtcatattctgtggtgtagttcaagcataagccattacagggaggctcgtcttcaggatgcaagccttttcattatgatgaaggcatacgagatgaaggtgtaatctaaggatgacatgaataaacgccgaagctaccgccagatcgatagcttcggctcatgatgaagatgaagtatgatggtgatgctgaccgaaggggaaaaaagactatttagtccttaataatttgtattttgatcataagtaaatattggggatataaatgtacttttacctgggcttgggctgcgtcccgtgcctataaataggtgaacggtagcaccatactgttcacactgatttgtaatctcccttgcgtcaacatcttcgaacaagccgaaggtatcaatgtaatataaattctattgatatttatgcatgtattaaagaatgcaaaaaaaaaaaaaaaaaaaaaaaaaaaaaaaaaaaaaaaataaaaaaaaaaaaaaaaaaaaaaaaaaaaaaaaaaaaaaaaaaaaaaaaaaaaaaaaaatgggggggctccttttaagggacccaagtttacgtccccggccgtccgattataaagttttttaaagagaaaacctaaatgcaatccaatggaccgcctttaaaaacaattcccctgggaaacccgtggggttccccaattaaaccgctccgatcacccccccctttaccgccaggcgaaatggcaaaaggcccccacccttaacctttacaaaaattggccaaatgaatggcaaatggcacccccccttaacccggccccaaagccgcgggggctagggggtttcacgccatagtgtcactttcccttggccggggcctaatgccccgacttataacttatttcccctctctttccgggccttcccggggagtttttcccatgagagtccaaaatcagggagttctcgtttaaggggttcccctttaaaggtcttacccaaacctctccccaaaaaaaacattttttacggtttagagggcaaaacacccgtgaccataaaacctgtaaacctgggtttatcacactttaaagcagggaacacccagttttaaaattgggattcttttaacaagacggagaacacccttagcctatatattgttaa

SEQ ID NO: 3724 - DNA, 791 bp, Zea mays
  misc_feature (1)..(190): n is a, c, g, or t
  misc_feature (791)..(791): n is a, c, g, or t
  Probeset Number=SeqID_18127
nnnnnnnnnnnnnnnnnnnnnnnnnnnnnnnnnnnnnnnnnnnnnnnnnnnnnnnnnnnnnnnnnnnnnnnnnnnnnnnnnnnnnnnnnnnnnnnnnnnnnnnnnnnnnnnnnnnnnnnnnnnnnnnnnnnnnnnnnnnnnnnnnnnnnnnnnnnnnnnnnnnnnnnnnnnnnnnnnnnnnnnnnnnnnnccgcccctaccggacatacaaagacaggtcccgacgcttctccaacaaacaaaacccaggggcggcccgtctcgagtactcagcacacgctcccttctcttcgacgacacgcactatcatataaaggagagcaagcgcaagttctggcacgaggccatacacgccgcgcgcctgggacatccacgccttcaaccactttaatcggcacgtagacctgtcgaggctcatgagagacttcaacctccacgagctcaccgcgccccgagagtacgaacagatggggctcgtgtacatgtaccactgcatccccatggaggagatcaccagcgcatccggcgccgtcggtctctgctacggggcgcactccaacctctgcatcaaccagctcgtgagtcgtcgtgactgccgctctggttgtttatggcaggcagaggacacgcgcggtaaccaaatcatttgattactcacccaagcggcaatgctacttgttgtgtgcaggtccggcacggaaacccggagcagaagctcaagtatctgcccaagctgatcagtggggagcatatcggggcactggcgatgagtgaacccaactctggctctn

SEQ ID NO: 3725 - DNA, 545 bp, Zea mays
  Peptide Sequence Number=SeqID_9918
  Probeset Number=SeqID_18128
attgggtacctcgaggccggccgggtttggctgtgaaaccatctcatttgtatttcacatatgaaatatgattcatgatctgaataatttggggggtggcaaaatgatttttaattccttttaggtgatgccactaacctgaacattattgtgatagatgactaaggcggtccggaagatactttatgcagctgatgcaaaggattcaccgctacctgaggcgaatgatataatcacaaagtcaccaagcttgttctcaaatgaaaccgagtgagatgtgcggctacatgagctaattttccatgattgatcgtcttagttctgagtctgtaaatgcgtaaaataacatttgacacaagtctttttgctgtcaaaaacagttttcctgtaagaacttgagtggggttaagtagttattacgcattcatgcttgatgtgactgtccctgtatggttcctctggagaatatagggtctgttcacttgactaatctgtaccggcttctactaaaaaaaaaaacgaaaaaaaaaaaaaaaaaagcggcc

SEQ ID NO: 3726 - DNA, 579 bp, Zea mays
  misc_feature (8)..(8): n is a, c, g, or t
  misc_feature (15)..(16): n is a, c, g, or t
  misc_feature (29)..(29): n is a, c, g, or t
  misc_feature (31)..(31): n is a, c, g, or t
  misc_feature (45)..(45): n is a, c, g, or t
  misc_feature (49)..(49): n is a, c, g, or t
  misc_feature (55)..(55): n is a, c, g, or t
  misc_feature (66)..(66): n is a, c, g, or t
  misc_feature (69)..(70): n is a, c, g, or t
  misc_feature (77)..(77): n is a, c, g, or t
  misc_feature (88)..(88): n is a, c, g, or t
  misc_feature (94)..(94): n is a, c, g, or t
  misc_feature (114)..(114): n is a, c, g, or t
  misc_feature (121)..(121): n is a, c, g, or t
  misc_feature (130)..(130): n is a, c, g, or t
  misc_feature (133)..(134): n is a, c, g, or t
  misc_feature (144)..(145): n is a, c, g, or t
  misc_feature (151)..(151): n is a, c, g, or t
  misc_feature (154)..(154): n is a, c, g, or t
  misc_feature (202)..(202): n is a, c, g, or t
  misc_feature (221)..(221): n is a, c, g, or t
  misc_feature (229)..(229): n is a, c, g, or t
  misc_feature (241)..(241): n is a, c, g, or t
  misc_feature (250)..(251): n is a, c, g, or t
  misc_feature (266)..(266): n is a, c, g, or t
  misc_feature (277)..(277): n is a, c, g, or t
  misc_feature (301)..(301): n is a, c, g, or t
  misc_feature (345)..(345): n is a, c, g, or t
  misc_feature (353)..(353): n is a, c, g, or t
  misc_feature (380)..(380): n is a, c, g, or t
  misc_feature (398)..(398): n is a, c, g, or t
  misc_feature (406)..(406): n is a, c, g, or t
  misc_feature (414)..(416): n is a, c, g, or t
  misc_feature (459)..(459): n is a, c, g, or t
  misc_feature (471)..(472): n is a, c, g, or t
  Peptide Sequence Number=SeqID_9919
  Probeset Number=SeqID_18129
ataaaaanataaaanntattatttaaacncntaaaaattcggaanaaancatatnttattaaccanaanntcgattntggtggttctngaatanacgatctcgtagcaacgcgnggaatantcttacaanganngttttcatgnntggtgnaangatatttttatgtactcctagtctatttatatgtattgctacaaatanaagtgaggtcgcgaaaatnttaaagancaagctggtgcntgggaatcnngagtctcaggcgagntgtgcccttgntcactcttatttacccaataaagntcatgttaatcactgtgacatgttcaggttaatttgatgggacntaataganttccctagtattgtttatcccaccccntgtttaccactgaacttntgggtagntttgacannnctttacctggttttgggattaatattacattatgatcatgtcncaataatatgtnngggggggggggggggggactagtgagctctctctctctctctctctctctccctgcagcccgggggatccactagttctagagcggccgccaccgcggggagctcca

SEQ ID NO: 3727 - DNA, 1005 bp, Zea mays
  misc_feature (610)..(1005): n is a, c, g, or t
  Probeset Number=SeqID_18130
aagtactctcgaggccaagcgccaacgtgtctctgcgcaggccaaggttcgccagatgatacgagacgaggagcagagggctcaggaactcaagcaagagattgcgctcatgcagcgcgaaggccaacatgatctgcagcgcggcccgcccctccaacagcgcgctccaattggagacctattcattcctctgcgtggacccttcatcccgcacgctgcagcattccaaggcgtcaactaccttgatgagcggagtcccctggctccgcaactgcaagtgtcaccatggcccaccaacttcagggcagggacctaccccaagtacaacggcagcactgacccagcacagtatatcatgagctatcaagtcgctgtcgcatcatccggaggggatgacgccacgatggccaagtcattcatcatcgccctcgaaggtccagccctcacctggtacaccaggttgcccccattgtccatcgactcctggagaagtctccgggacaaatttttgctcaacttccaagggtaccgcccagacaccgacgccttcgccgaactgtcactctgcaagcaggggtaccgagaaagaatgcgggagtactaccgcaannnnnnnnnnnnnnnnnnnnnnnnnnnnnnnnnnnnnnnnnnnnnnnnnnnnnnnnnnnnnnnnnnnnnnnnnnnnnnnnnnnnnnnnnnnnnnnnnnnnnnnnnnnnnnnnnnnnnnnnnnnnnnnnnnnnnnnnnnnnnnnnnnnnnnnnnnnnnnnnnnnnnnnnnnnnnnnnnnnnnnnnnnnnnnnnnnnnnnnnnnnnnnnnnnnnnnnnnnnnnnnnnnnnnnnnnnnnnnnnnnnnnnnnnnnnnnnnnnnnnnnnnnnnnnnnnnnnnnnnnnnnnnnnnnnnnnnnnnnnnnnnnnnnnnnnnnnnnnnnnnnnnnnnnnnnnnnnnnnnnnnnnnnnnnnnnnnnnnnnnnnnnnnnnnnnnnnnnnnnnnnnnnnnnnnnnnnn

SEQ ID NO: 3728 - DNA, 804 bp, Zea mays
  misc_feature (601)..(804): n is a, c, g, or t
  Peptide Sequence Number=SeqID_9920
  Probeset Number=SeqID_18131
agcagtggtaacaacgcagagtacgcgggcgtctacttaaattcgaacgggttttcaaagcacaaaaacgcatacatatgtctgttttcaaagcacaaagagttctagatgagattcgctggcgttactacgaggaaaccgttatgatactgaatctcatgccttatcgagcatcgtatcccatcttaaagttggtttattcggcagcagcaaatgctactcattatagggatttcgacaaaacgaatttattcatcactaaagccgaagtcagtaggagtactattatgaaaaaattcagacctcgagctcgaggacgtagttattctataaaaaaaacgatgtgtaatataacaattgtactaaatatagtaaagaaatcaaaataatctttagatcaatctaagatttcgattcccagtaaaaaaaaaaagaaatataatagaaaaatatgggacaaaaaatagggcgcattcggtttcagacttcatctgaggctgtcagctggggctggttggcaacaagacaagaagaattggctgcctctcaacaacattcacatttactacctacctggctgctttgagaattacagggcctnnnnnnnnnnnnnnnnnnnnnnnnnnnnnnnnnnnnnnnnnnnnnnnnnnnnnnnnnnnnnnnnnnnnnnnnnnnnnnnnnnnnnnnnnnnnnnnnnnnnnnnnnnnnnnnnnnnnnnnnnnnnnnnnnnnnnnnnnnnnnnnnnnnnnnnnnnnnnnnnnnnnnnnnnnnnnnnnnnnnnnnnnnnnnnnnnnnnnnnnnnnn

SEQ ID NO: 3729 - DNA, 549 bp, Zea mays
  Peptide Sequence Number=SeqID_9921
  Probeset Number=SeqID_18132
ggcccctttttttttttttttttttttttttttttgtttttttttttttttttttttttttttttttttttttttttttttttttgtttcaaggaaatctaatattcctcacattcaatagaatgacaacataaagatccgataggtctagttgtcaccggcatattcaaacatacatgtcagaatcaaattacattcacatcatctcactctgcatcctctatctctgcatcctctggaacgcctcggagatacataacgttgttgcccctgatcagaatctctcccaggttcccagagaactgcccaacaaggcccggccggccagggggaaccgcagtcctgaagtagaagtgggggcagtaaattgtgacaaaggcagtgttacggccaccttacatctttgtcagacatatatttccgcctcgaatctattagcatgtcttcagaataccaggtcatgcacacacacatgaacacgctcaacatcatcacggttaagaccacggagaagaaggccaacagtattcgccagctctcccaggtccc

SEQ ID NO: 3730 - DNA, 283 bp, Zea mays
  Probeset Number=SeqID_18133
ggccgggatatcatttcagttcagccttcttgacttgtactgtggtacgtctcgcaggtctcgtctgaagttggcaacgaccatgcctgccgtctcggccgccgcctgctgcgccgccacaacgccggcaaacgaggtggcggaggacctcctcggcttcctccgcgttctcagagacggcaccgtgctccggtcgccggcggacccagtgttctgaccggccaccttccccggcagccacccgtccgtgcagtggagagaggccgtctacgacaagcccaag

SEQ ID NO: 3731 - DNA, 625 bp, Zea mays
  misc_feature (3)..(5): n is a, c, g, or t
  misc_feature (12)..(12): n is a, c, g, or t
  misc_feature (625)..(625): n is a, c, g, or t
  Peptide Sequence Number=SeqID_9922
  Probeset Number=SeqID_18134
agnnnatatgcnttggtaccgggccccccctcgagaacgagggcgtcgaccggattttcggggttcccggcgaggaaaacctggatgtcgtggaaagcctgcgcaattcgtcgatcaagctgatcctgacacggcatgagcagggcgcggccttcatggccgcgacatacggccggctgaccggcaagcccggggtgtgcatcaccacgctcggtccgggtgcattgaacctcacgaccggtgcggcctatgcgctgctcggtgccatgccgatgatcatgctcaccggccagaagggcatcatgagcagtcggcaagcaaaattccagattgtcgatgtcgtcagcgctttcaagccgctgaccaagctctcactccagatcgtcagtacgagcagcattccgaccatcgttcgcgatgccttccggattgccatggaagagcggccgggtccggtcctgctggaattgcctgaggacatcgcgggcgaggaagcagaagacgtcgcgatggtggcgcaacacccgatcgaaattccggtcgcgcatcgtgcctcgctggaccgcgccgctgaaatgatcctcaaggccaagcggccattgatcatgctcggcgccgctgcgtn

SEQ ID NO: 3732 - DNA, 696 bp, Zea mays
  misc_feature (1)..(22): n is a, c, g, or t
  misc_feature (631)..(696): n is a, c, g, or t
  Peptide Sequence Number=SeqID_9923
  Probeset Number=SeqID_18135
nnnnnnnnnnnnnnnnnnnnnncatgcaatgcatcgagctcttgaacgcaatgggcaggtggttttactgggttctgcaccagatcatcgcatacaaggtgactttacaaatttagccagtaagctgcatggtgaataccatggccgggtgaagctatgtttaacctatgacgagccactgtcacatttgatatatgctggcgcagacttcattcttgttccttccatcttcgaaccttgtggtttaacgcagcttattgctatgcgctacggatccatcccaattgttcggaaaactggaggcctgtacgacaccgtctttgacgtcaacgatgataaggatcgggctcaagcacaaggcctcgagccaaatggattcagtttcgaaggagctgatagcagtggtgtagattatgctctcgacagagctataaccgcgttttatgatgctcgcgactggttcaactcccttagcaagagggtaatggagcaagattggtcatggaatagacctgcactagactacatggagttgtaccattctgctcgcaaaaactgatacactttaccacaagggaaaacaggctcagtttgcccagtttatgagcatcacaaactctcgggcctttgnnnnnnnnnnnnnnnnnnnnnnnnnnnnnnnnnnnnnnnnnnnnnnnnnnnnnnnnnnnnnnnnnn

SEQ ID NO: 3733 - DNA, 303 bp, Zea mays
  Peptide Sequence Number=SeqID_9924
  Probeset Number=SeqID_18136
atgatcccgttgtcccacaaccctcacccagccaccatcgccaacgcgggggtctgggggcttttctgcgatcagcacctccttataagaacgacgcgatccactgctaccccaaagaagcagcagatgaagcgtcagggccttcgtcttcacaccatcgctgagccttcgagcagcctccaggaagagcagcagaggggtgggtgggaaaaggaggagaggaggctgacgacggggagcaagggtggtggccggcgaccttggaagatagaccggcgtgaggctgtggggaggaggagctga

SEQ ID NO: 3734 - DNA, 938 bp, Zea mays
  misc_feature (801)..(806): n is a, c, g, or t
  misc_feature (840)..(842): n is a, c, g, or t
  misc_feature (859)..(859): n is a, c, g, or t
  misc_feature (902)..(904): n is a, c, g, or t
  misc_feature (910)..(911): n is a, c, g, or t
  misc_feature (915)..(917): n is a, c, g, or t
  misc_feature (920)..(923): n is a, c, g, or t
  Probeset Number=SeqID_18137
gagacctcaggtcaggcggggctacccgctgagtttaagcatatcaataagcggaggaaaagaaactaacaaggattcccttagtaacggcgagcgaaccgggaagagcccaccatgagaatcggtcgcctaaggcgttcgaattgtagtctggagaagcgtcctcagtggcggaccgggcccaagtcccctggaagggggcgccagagagggtgagagccccgtcgtgcccggaccctgtcgcatcacgaggcgctgtcggcgagtcgggttgtttgggaatgcagccctaatcgggcggtaaattccgtccaaggctaaatactggcgagagaccgatagcgaacaagtaccgcgaggaaaaaaaaaaaaaaaaaaaaaaaaaaaagacatgttggccgggggttatgatttatgtgtgagtgaaagtaaggaaggaaggaaggaccctttctttgctgagcaaagagagaataaagaaacaacaaagtttccagtgtgaatgaaaaatggctttcagggttctgggttccaagttgaggccattggcggcggttcacaaatggtggcggtttccgtattcctctgctgcggtggcggaaagcacgagggaagtgatgggtctgaaggattatgcagattatagaaggtccctttatggccaaatcactcacaaggcccttcttgttgatgctgttggcacccttgttattccttctcaacccatggctcagatatatagggagattggggagaagtatggggtgaagtactcagaggatgagatattgtgtagatatnnnnnngcttatggtcagccttggggtaaatctcgtctcnnntatgttaatgatggtangcccttctggcaattcatagttagttattctactgggtgttcnnnttctcnntacnnngannnnctttataaatactat

SEQ ID NO: 3735 - DNA, 373 bp, Zea mays
  misc_feature (13)..(13): n is a, c, g, or t
  misc_feature (26)..(27): n is a, c, g, or t
  misc_feature (84)..(84): n is a, c, g, or t
  misc_feature (91)..(91): n is a, c, g, or t
  misc_feature (99)..(100): n is a, c, g, or t
  misc_feature (110)..(110): n is a, c, g, or t
  misc_feature (122)..(122): n is a, c, g, or t
  misc_feature (125)..(126): n is a, c, g, or t
  misc_feature (129)..(129): n is a, c, g, or t
  misc_feature (152)..(152): n is a, c, g, or t
  misc_feature (155)..(155): n is a, c, g, or t
  misc_feature (161)..(161): n is a, c, g, or t
  misc_feature (164)..(164): n is a, c, g, or t
  misc_feature (168)..(168): n is a, c, g, or t
  misc_feature (170)..(170): n is a, c, g, or t
  misc_feature (178)..(178): n is a, c, g, or t
  misc_feature (188)..(188): n is a, c, g, or t
  misc_feature (223)..(223): n is a, c, g, or t
  misc_feature (235)..(235): n is a, c, g, or t
  misc_feature (247)..(247): n is a, c, g, or t
  misc_feature (255)..(255): n is a, c, g, or t
  misc_feature (263)..(263): n is a, c, g, or t
  misc_feature (265)..(265): n is a, c, g, or t
  misc_feature (269)..(269): n is a, c, g, or t
  misc_feature (304)..(304): n is a, c, g, or t
  misc_feature (310)..(310): n is a, c, g, or t
  Peptide Sequence Number=SeqID_9925
  Probeset Number=SeqID_18138
ttgtctgttctcncccgccttcgccnnctccgtgtctggatacttcctccgcccgcacggtggtggcgcctccggcatctccangattagnagatgctnnttctgagccnggtgagcgttgnttnnacncgagatataggattctgtagctntgngagaangangagncnttggttanttttatttangcttttctgaataatgaagaagactatcctgatgntgacaatcttcngcgttatatatnatacaaangaagaggntngcantgaaaagttaaaaaggggacttttctccaatacanggaatnatcttgacagaatataaaacttttcttctaaacatagcatacaatgggtttagctgattattg

SEQ ID NO: 3736 - DNA, 626 bp, Zea mays
  misc_feature (7)..(7): n is a, c, g, or t
  misc_feature (615)..(615): n is a, c, g, or t
  misc_feature (619)..(619): n is a, c, g, or t
  misc_feature (622)..(624): n is a, c, g, or t
  Probeset Number=SeqID_18139
cgggctntacacatctggctattgtcgtgcagcacctcgaaacacttccagaatggcagctagagaagaatagccgggctgaccatcccaatcagctttagcgcacggcacgatttcaatgtagttagatgtcggcctgcatccagaaatgctaggctcatccgcgaggggtgatgtcgaccgaggacaggagcacaccgacggcggagctccgttgctgggcaaccggctgcttgcaacgtccaatcacaggtaagctcccacccaacatccaaaatacgccaaccgtcgtgctcttccacaccccggcatcaccgtgtctaaagcccgtctacgcgcctgatggaccttttttgaggcattgtctgcttgaattgcattctgtgtccgccagacacgctcatcgcctttaatctactcacttttcgcaattcgaaacctgttctctgtcactgaccacctgtactcaaccgcgtgcgtgtagcaccgaaccttcgatcaaaggttgtacattctcccgatttcaagcatgttggcatcaccaacacccgcgccagctggccctgttcgccgaacttcacaacgccaggctttgagggggggcccggtaccaangcanatnnnct

SEQ ID NO: 3737 - DNA, 629 bp, Zea mays
  misc_feature (629)..(629): n is a, c, g, or t
  Peptide Sequence Number=SeqID_9926
  Probeset Number=SeqID_18140
gcgcccacaaccaccgccgcgcccacccccactcccgatgtgtccgccccaacgccgatagtcctcgcccctcccctccccgttgcgcccatccatgccccctccgcgcccgcgcctcccctcaaccaccgcaccgagatcgccgccgatctgagctcccctccccgttgcgcccacccatggtcgccgcttcgacttgctgttgctgctgctcctgcacgacgaccactgtcagctacttgcttttgtttcgtagcttcgtagtttttgaagttgtgatacatgggtgtgcaacaagcaattcctattatttcctaccttgaaggaagggaacgacgtggtctgcgcgggcatggtgggcgcgtggaaggagaagtcgttgaaggcgccgccgaccgcagctcggctgtcgtcttgctgtcgtcttgctgagactgagatgcgatcaggtcggcggcctgcttccagtcgaacctctgcgccgggatggcgccggtggtgggcgacgcgaagaagttcgaggaagagtggagcgggacgggcgagtccagcagctcggcggggctgagcccgggcgggatggagaagtaggaggagggcgacatcggcggcggcgagatgggcaggcn

SEQ ID NO: 3738 - DNA, 628 bp, Zea mays
  misc_feature (1)..(1): n is a, c, g, or t
  misc_feature (40)..(40): n is a, c, g, or t
  misc_feature (622)..(622): n is a, c, g, or t
  misc_feature (626)..(626): n is a, c, g, or t
  Peptide Sequence Number=SeqID_9927
  Probeset Number=SeqID_18141
nccacctccgagacggccgtcctcgccggcgggctgtttntggggcgtgcagggcgtcttccagcatgtcgacggcgtcaccagcgcggtgtccggctacgccggcggcgacaagtcgaccgcggactacgagacggtgagctcgggcacgacgggccacgcggaatcggtgcgggtcacgttcgatccgcgcaggatctcctacggccgcatcctgcaggtgtatttctcggtcgcgcacaatccgaccgagctgaaccgtcaaggccccgattcaggcactcagtaccgctcggcgatcttccccaccagcgccgagcaggcgcgcgtcgccaaggcctacatcgcccagctcaaccaggcgagggttttcgacgccgccatcgtcaccaaggcggagccgggcagggagttctacccggctgagggataccaccaggactacctgacgctgcatccctcgaacccctacatcgccatcaacgacatgcccaagctcgacgagctgaagcggctgttccccgcgctctaccggcccgagccggtactggtgagcgcgtcgcgctcgacaaactgaggcgatcggcttcacttacggctcgagggggggcccggtaccaangcanat

SEQ ID NO: 3739 - DNA, 696 bp, Zea mays
  misc_feature (1)..(152): n is a, c, g, or t
  misc_feature (154)..(160): n is a, c, g, or t
  misc_feature (162)..(188): n is a, c, g, or t
  misc_feature (190)..(202): n is a, c, g, or t
  misc_feature (204)..(208): n is a, c, g, or t
  misc_feature (210)..(214): n is a, c, g, or t
  misc_feature (216)..(217): n is a, c, g, or t
  misc_feature (219)..(219): n is a, c, g, or t
  misc_feature (222)..(223): n is a, c, g, or t
  misc_feature (226)..(226): n is a, c, g, or t
  misc_feature (228)..(229): n is a, c, g, or t
  misc_feature (232)..(234): n is a, c, g, or t
  misc_feature (236)..(238): n is a, c, g, or t
  misc_feature (241)..(244): n is a, c, g, or t
  misc_feature (246)..(246): n is a, c, g, or t
  misc_feature (249)..(250): n is a, c, g, or t
  misc_feature (256)..(256): n is a, c, g, or t
  misc_feature (260)..(260): n is a, c, g, or t
  misc_feature (262)..(262): n is a, c, g, or t
  misc_feature (277)..(277): n is a, c, g, or t
  misc_feature (282)..(282): n is a, c, g, or t
  Peptide Sequence Number=SeqID_9928
  Probeset Number=SeqID_18142
nnnnnnnnnnnnnnnnnnnnnnnnnnnnnnnnnnnnnnnnnnnnnnnnnnnnnnnnnnnnnnnnnnnnnnnnnnnnnnnnnnnnnnnnnnnnnnnnnnnnnnnnnnnnnnnnnnnnnnnnnnnnnnnnnnnnnnnnnnnnnnnnnnnnnnnntnnnnnnntnnnnnnnnnnnnnnnnnnnnnnnnnnncnnnnnnnnnnnnntnnnnntnnnnncnntnagnnggntnnatnnngnnnagnnnncnagnnccatcngcancngcccttcaccacctngtccntgcagcaggaggcgtcccggaagctcgggatggcgcccgcgcagaccatgcgtgtcgcccagaagctctacgagggcgtcgacatcggcggcgagacggtcggcatcatcacctacatgcgaaccgacggcgtcgacatggcgccggaggcgatccaggacgcccgccgggtcatcggccgcgagttcggggacgactacgtccccaacgtgccgcgcaaatactcggtgaaggccaagaacgcgcaggaggcccacgaggccgtgcgcccgaccgatatgggccgcctgccgaagcagatcgcccgctacctcgaaccggagcaggccaagctctacgagctgatctggacgcgcaccgtggcgagccagatggaatcggccgagctcgagggggggcccggtacccaattgt

SEQ ID NO: 3740 - DNA, 478 bp, Zea mays
  Peptide Sequence Number=SeqID_9929
  Probeset Number=SeqID_18143
ggctccccccccccgggctgctccctgatgggttcccacacgctcggtgtcggagttaaaaacaatgtggccccaagtgatctgtcagtggattcgagcccccggtatgagatcatctcggcagggcatctcggggaggcccctgtttcggacccgtgctggctccagtacataagggagtggggcccgcccctcccgtacagctcccgttcaaaaataaacccggcgttgagcttcctcccgttctttttcccggtttcccaccagaggcaatattccccccccttccgggggaactgtacgaggaggaaggtcctccggggcccaaggagaagaccccctgggaaggcgccgagaaatgctaggctttgtccccccccttgtttacccctgtccccttaatctgtcccccaaagctgttttgtcctttatgaaaaagattgatcctgtttgtgataagaataacccgtttcggccc

SEQ ID NO: 3741 - DNA, 870 bp, Zea mays
  Peptide Sequence Number=SeqID_9930
  Probeset Number=SeqID_18144
tggggaggagttgagcggtaaagccttaggtatcgatcccacacggggggggtagatgggatttaggggctgggaggggccgtctgagcgccagacgggggcactacgggggtttcggccggggggagctttaacactctatggcgagacgtaggaaaatcaggggggggattttaccgcggtgtatctgggtggggcggtgacacatagtggcactaccaagatcattcacaccaagggggaggttttcaaggtgggacgttcggacggtggggtacgttattgcttgtgcacgacaaacgagacaggccgtggccagcgcggtgggcggttttccgtcgcgctcggacacgggctagatcgctgcaagggcctgatgccccgtccttcgggctgcgccatccagggggcgctgctccgtgcgccaggtgcccaacggcgactgccgcaacgtccagggagatgaaaatcatttactgcaagccgcacgtgtgatgcgatgcggacatggggtcgtcgcgccatctcgcggcctgtgttgtgctttctttcatgtcgccgtctccgtcgtgtgtcataccgccattgtcgttaggttgttgttgagtaaccgtttgcttcgctcagtagccttgctgtccagggtattatcactcgcatcgcatgcatgtgatgtgagccactgcacgcgtgagtgtcacatgagtcgtcgtcctgtctcgtctcatgtgtttgaaattgtaggcagcagaggatcgagatgcgtgtctgctttggtggtgttcactgctgtcagtctgtcaccgagttcaataatttaactttgtttcatcgggaaaaaaaaaaaaaaaaaaaaactcgagggagggc

SEQ ID NO: 3742 - DNA, 248 bp, Zea mays
  Probeset Number=SeqID_18145
tgcaggataatagcttgtctgctttaatgacacgatgaccatctcattcgccatgttgtgaagttcaacttgctgaaaccaataattgatgtctttgttgacaatggggagagatataacatgctacattcaggagtactcgaattgttggaatacatacggaaggtacgtcttcagttgccactttgaattctggcatttactttgccaccatggattctgccttatgcactggatacttacctgca

SEQ ID NO: 3743 - DNA, 673 bp, Zea mays
  misc_feature (601)..(673): n is a, c, g, or t
  Peptide Sequence Number=SeqID_9931
  Probeset Number=SeqID_18146
ccggccggggtgaagggacctaagggccgtttaagtacctacctggacaagtgagagcattaggaatggtagctggaggatcaggcattactccaatgttccaagtcacaagggcaattcttgagaacccaaaggacaacacgaaagtacacttaatctatgcaagcgtccacgcgtcctgaggatattcttctgaaggaagaacttgacggcatggccaaaaactatcctgatcgtttcaagatctactatgtcttgaatcagcctcctgaagtctgggacggtggcgtcgggttcgtgtcgaaggaaatgatccagactcattgcccagcgcctgccgccgacattcagttttccgttttcaggtattgcgatgtgggcctcctcccatgaacaaagccatggccgcgcacctggacgagccttggctacacgaaggagatgcagttccagttctaagcgtagctgttacattctctctaccagtaccagaataaacggcggtggaacaagtttcgtcgcctctttgagcagacgaagcctgaccctgtcgccatatagctccaaacagacgcggtttgccactctcatcagtcacagnnnnnnnnnnnnnnnnnnnnnnnnnnnnnnnnnnnnnnnnnnnnnnnnnnnnnnnnnnnnnnnnnnnnnnnnn

SEQ ID NO: 3744 - DNA, 1065 bp, Zea mays
  misc_feature (1)..(3): n is a, c, g, or t
  misc_feature (1049)..(1049): n is a, c, g, or t
  misc_feature (1065)..(1065): n is a, c, g, or t
  Peptide Sequence Number=SeqID_9932
  Probeset Number=SeqID_18147
nnnctctctctcgccgtctgctcgctcgctcgtcccccaaatccctactccccctccccgaccgaaccccggcggcgtcgccggcgatggagtgcgtcatcggcgtggtcggcagcgacttcgcggtcgtggcggcggacacgtccgccgtgcagagcatcctcgtccacaagacggacgaggacaagatcatgctcctcgactcccacaagctcatgggcgcctccggcgagcccggcgaccgcgtgcagttcaccgagttcatccagaagaacctccacctctaccagttccgcaacaacatgccgctcagcaccgccgccaccgccaacttcacccgcggcgagctcgccaccgccctccgcaagaatccctactctgtaaacatcatacttgcagggtttgataaagacgctggtgcatcgatgtactacattgactacatcgcgacgctccacaagatcgacaagggagcattcgggtatgggtcgtacttctgtttgtcgctgatggacaagttgtaccgccctgacatgactgttgaggaagcggtggaccttgttgacaagtgcatcaaggagatcagactccggctggtcgtcgcgccccagaatttcgccatcaagatcgtggacaaggaggtgcccaggggctatgctacacgtgttctgtttgtcacagtcctgccaagttcaccgacccaatcatgactgttgaggaagcagtagatcttgttgacaagtgcatcaaggagattcggctgcgattggtcgtcgcgcctcagaactttgttatcaagattgtcgacaaggacggggcgagggagtacgccaggcgtgatctcgtcggtgacaatgcacctgctgaagctgcaaccgcagttgttgctgcctgaggcatgaactcgtttgaggttgaaatgtgttagttgtttctcagcgatgctacttatgcgatcacaggatactggtgggggtcccacaactgttttaacaattttagcccagactctgctgagtacaagtagtgttctcacgcttgaacaaaancccccctgttgctgtn

SEQ ID NO: 3745 - DNA, 501 bp, Zea mays
  Peptide Sequence Number=SeqID_9933
  Probeset Number=SeqID_18148
aatctagctgcctactatgaaggaccacactatcttgcatcaaagcatgtatctacactggctcctggtgatcaaccagcaggatcatgtataaccattcagcctgtttgatactgactactctcatcaataacacctactatcatcaaagcaacctgccgctctgaaccccgatcgatctatttaccagtaaaacatgttactaccagctcaactcagcttgactcgaacgaactgcctgtgcattccttcctagacgagcacgaactgaagctggctgcttaccagcagctggcggttaacctacgcatccatcctgactagttcaacaatggcgggccttcgtccagccagatttgccgaagctgcctttctactaccaacaacgcagcatacgccggcgaccctcttacagatagatcattagttgcccttcagtcatctagctttggggatgctgccagcctcctaccaacaacacatcattggtggtgccctctg

SEQ ID NO: 3746 - DNA, 218 bp, Zea mays
  Probeset Number=SeqID_18149
gccaccacctacgccatgttagagacaaacacttgtaaagggcgacctcatgctctgatgcatcctcaatcgagcattggtgaacaagctttccccacttgggaatgtcccttttagttcacagaattctacatgttgggtgtgttaggcttgcaatagtagaaggtgtattgttgcccaatacatggattatagagcactttcataagttttatcct

SEQ ID NO: 3747 - DNA, 1006 bp, Zea mays
  misc_feature (1)..(405): n is a, c, g, or t
  misc_feature (960)..(960): n is a, c, g, or t
  misc_feature (985)..(985): n is a, c, g, or t
  misc_feature (1006)..(1006): n is a, c, g, or t
  Peptide Sequence Number=SeqID_9934
  Probeset Number=SeqID_18150
nnnnnnnnnnnnnnnnnnnnnnnnnnnnnnnnnnnnnnnnnnnnnnnnnnnnnnnnnnnnnnnnnnnnnnnnnnnnnnnnnnnnnnnnnnnnnnnnnnnnnnnnnnnnnnnnnnnnnnnnnnnnnnnnnnnnnnnnnnnnnnnnnnnnnnnnnnnnnnnnnnnnnnnnnnnnnnnnnnnnnnnnnnnnnnnnnnnnnnnnnnnnnnnnnnnnnnnnnnnnnnnnnnnnnnnnnnnnnnnnnnnnnnnnnnnnnnnnnnnnnnnnnnnnnnnnnnnnnnnnnnnnnnnnnnnnnnnnnnnnnnnnnnnnnnnnnnnnnnnnnnnnnnnnnnnnnnnnnnnnnnnnnnnnnnnnnnnnnnnnnnnnnnnnnnnnnnnnnnnnnnnnnnnnnnnnnnnnnnnnnnnnncgcctcgtcgcgcgttacggcccggtcgtgtccctgcgggcagggccgagcctgtcggtcttcatcgctgaccgccgcgtcgcgcacgcggccctggtcgagagcggggccgcgctcgccgaccgccccgccctcccttcgcgcgctcctgggggagagcggcaacaccatctcgcggtccagctacgggcccgtgtggcgcctcctgcgccgcaacctcgtctccgagacgctgcacccgtcgcgggtgaagctgttcgcgccggcgcgcgcgtgggtgcgccgcgtgctcgctgagaagctcgggcgggaggccgaggaggcgcaggcgagggcccaggcgccgccccccgcgatggaggcgttccggtacgccatgttctgtctcctcgtgctcatgtgcttcggtgagcggctcgacgaggccacggtccgcgcgatcgctgccgcccagcgcgagccgctcatctacaggtcgaggaagatggccgtcttcgccttcctgccgtcggtgaccaagcacctctaccgcgaccgcctccagacactgcacgncatgcagcggcggaagaagacctgntcgtgccgctgatcacgctcn

SEQ ID NO: 3748 - DNA, 903 bp, Zea mays
  misc_feature (1)..(137): n is a, c, g, or t
  misc_feature (808)..(903): n is a, c, g, or t
  Peptide Sequence Number=SeqID_9935
  Probeset Number=SeqID_18151
nnnnnnnnnnnnnnnnnnnnnnnnnnnnnnnnnnnnnnnnnnnnnnnnnnnnnnnnnnnnnnnnnnnnnnnnnnnnnnnnnnnnnnnnnnnnnnnnnnnnnnnnnnnnnnnnnnnnnnnnnnnnnnnnnnnnnnnnnttcaaaggaaaaatgcaaagaatagataggtccagcgggcaacaaccaaaccataccatcacgggtgcaaacgaaacgagaagctgggtacagagacgacttatgatgagggttcaggcacacgattagccctgaaatctaggcgcagcttacgggcccacgcgggacgggaggtttgggtacacatgaaatgacaacggctgttcacgattcagaaaatggatgcggcgacagtggtgtggggggtgatagcttgggtgagcgacatcagttgccaccaatcagagtataccagggaagagccatctccaggagcagcgtgagcattggtcgaaggacggtccctaaggtagttcacgagtgttggtggggcgtcgagcccatgtgattatgttagttgcgttcagtactgtgtatactgcgcaagcacgacacatactgacatagtgtcctcagttcatgcactgttagcatgcatgcgctggtttactacaatcagagtggagtcacgctactagcaagcacgagtggacactaattgacaggatgcgtgcgtggacacctgctcgatttgtgggcacatctccgctcacaaagagatatcccagagaacttagcgcaccagacgcgctgactagcacggctcaccttgattggggaaagagaaacgnnnnnnnnnnnnnnnnnnnnnnnnnnnnnnnnnnnnnnnnnnnnnnnnnnnnnnnnnnnnnnnnnnnnnnnnnnnnnnnnnnnnnnnnnnnnnnnn

SEQ ID NO: 3749 - DNA, 401 bp, Zea mays
  Probeset Number=SeqID_18152
catgctcggagcaagcccatctcgactgatgttgatttggaagcacttggtcgtcgggccgagcgcaacaatctcactggggccgacctagcatccctggtcaatgaagcagccatggcagcactggaagagagactggaattccgtgacaaggggacatcctccctgagttcgtgaggcctgattgagaagccgcccttcgaacgtgctccaacgaagatcaagcccccaggatctgaacagcaaatcaagaattatggggggttggcaatgagaaccccggcaaactgacccccccccagctggccccatgttaagtggggaccccaggacaccctagtgaaaaaaatgcaacctttcgtatgcctcgcgcccaaggaaacccgaatgagttgttattg

SEQ ID NO: 3750 - DNA, 818 bp, Zea mays
  misc_feature (548)..(548): n is a, c, g, or t
  misc_feature (592)..(592): n is a, c, g, or t
  misc_feature (631)..(631): n is a, c, g, or t
  misc_feature (638)..(638): n is a, c, g, or t
  misc_feature (649)..(649): n is a, c, g, or t
  misc_feature (665)..(665): n is a, c, g, or t
  misc_feature (673)..(673): n is a, c, g, or t
  misc_feature (688)..(688): n is a, c, g, or t
  misc_feature (697)..(697): n is a, c, g, or t
  misc_feature (706)..(706): n is a, c, g, or t
  misc_feature (716)..(716): n is a, c, g, or t
  misc_feature (728)..(728): n is a, c, g, or t
  misc_feature (741)..(741): n is a, c, g, or t
  misc_feature (746)..(746): n is a, c, g, or t
  misc_feature (750)..(750): n is a, c, g, or t
  misc_feature (753)..(753): n is a, c, g, or t
  misc_feature (759)..(759): n is a, c, g, or t
  misc_feature (764)..(764): n is a, c, g, or t
  misc_feature (768)..(768): n is a, c, g, or t
  misc_feature (775)..(777): n is a, c, g, or t
  misc_feature (779)..(779): n is a, c, g, or t
  misc_feature (795)..(795): n is a, c, g, or t
  misc_feature (803)..(803): n is a, c, g, or t
  misc_feature (808)..(808): n is a, c, g, or t
  misc_feature (815)..(815): n is a, c, g, or t
  Peptide Sequence Number=SeqID_9936
  Probeset Number=SeqID_18153
cttggccgggcccccctcgagagcctgtcggcagaaacatatttacgtatgtggacgacatcgtcgtcgccagcagaagcaaggaggaccatctggctgacctcgccaaaacgtttgcgaacatgcgggacacatgacttcgcctaaaccccgaaaagtgcgtcttcgacgttcgccaggggaaaatattgggctacctggtgtcgcaccgcgggattgaagccaattcaaccaaaatccaggccatcatcaacatgacgcccccgcagtcagccagagatgtccaacgactgacaggcagattggccaccctcaacagattcatctccaagtccgcagagcgaagcctccctttcctcaaaacactccgtggcgcaaaagacttcgcatggggaccagagcaggcggcggccttcgcttcattaaagcagtacctgtcagagttggcgattcttacaagccccgaccccttgctacccctgttgtctacatcgcagcttcgccgcatgcggtcagcacaacactggttcaagatccgggtcacctanacaggggactcggagaatgttagaaatccggagcatcagtccanatggcaatggcagccgactattggttccacatacattcnaccaganagccataatcnaagtctggcaacttgngtgatggnttggcataaaagccnaccgtcganaaagggggnaatcttgaangcatgggcttcngggcggccttatnttttnccanggnagaaanctaancctnttttttnnngnaagccatttgggggtntgttttanaaacncagggcncgg

SEQ ID NO: 3751 - DNA, 1476 bp, Zea mays
  misc_feature (1)..(59): n is a, c, g, or t
  misc_feature (1413)..(1476): n is a, c, g, or t
  Peptide Sequence Number=SeqID_9937
  Probeset Number=SeqID_18154
nnnnnnnnnnnnnnnnnnnnnnnnnnnnnnnnnnnnnnnnnnnnnnnnnnnnnnnnnnnaaaaaattgtcccaacggattagcaatccgccgctttagtccactcagccatctctccccgttccaaatcgaaaggttttcatgatatggcagaggcaagaaataacgattgtcaaaaatccttcctttttctttcatttcaaaagtgcataaaaattatattgccaattccattttaattatattcttttttcttaatgttaataaaaaaaagaagaaaattctggttttttctttccaaaattcgatataggctgaaagacaatcagatcttttttctcttcagcgggcagttccatatagaatttgttagaataaaacaagcgggttaaaaaaaaaaactctttttttttatttatccacaaagcaaaaaaggttcttatcaaacccacaataaaatgggaaagaaagataaagtaagtagacctgaccccttgaataatgcctctatctgctattctgatatataaattcgatgtggatgaaattggtgtataagcgcatttttgtatttccttagacttagatcgcgcaaggcaagaatttttcgctatttacgatttcatattcttgttactagacgttctataggaataagaagaaatcgcaactcttttccgttacacataataaataaagggtttcaaaagtcaatttttcttttcaatatctttcctttttttttcagaattccatttttgttcttccacccatgcaatagagagcgaatgagaaaagaggggttttcccttaaaaaatgggctttgaaatagaaatcatggaataatgctgaattcaaatgtttatttctttatttcttttctatagtataagaaaaatgaattaaatgaaatttgtggatttagcacgacctgggttgtgaccccatagataaaaatgcaaaatttctatcttcgagacgactgaaaaagggcattgaacgagaaagaaatcgtccacagataatcaaccgcccttttgcccgggatgtaatatgaggtgctcgaaaaacctgaagatatcttggtaggaggcaccaatctaccgcagccgtgcacagagttgctccagcagcatcctccctccatgactggtggaatccctggcctacgacagcagctcggcgtccttctccgaccggacctgcgagaagtccagcgcctcggtgatgcttccgaacagggactgcttgtcgccctcctcgtctcccttcgcataagctctcactgatctggggccgccaccgctcggcctggtttggtgagctccaaacgaggagctcctggaaggggtcagcggaagcgctctcatggccattgcttttgcttcaggagttcaggtgaaagtggttttnnnnnnnnnnnnnnnnnnnnnnnnnnnnnnnnnnnnnnnnnnnnnnnnnnnnnnnnnnnnnnnn

SEQ ID NO: 3752 - DNA, 585 bp, Zea mays
  misc_feature (373)..(373): n is a, c, g, or t
  misc_feature (397)..(397): n is a, c, g, or t
  misc_feature (403)..(403): n is a, c, g, or t
  misc_feature (434)..(437): n is a, c, g, or t
  misc_feature (440)..(445): n is a, c, g, or t
  misc_feature (458)..(459): n is a, c, g, or t
  misc_feature (461)..(461): n is a, c, g, or t
  misc_feature (463)..(469): n is a, c, g, or t
  misc_feature (471)..(473): n is a, c, g, or t
  misc_feature (478)..(478): n is a, c, g, or t
  misc_feature (481)..(481): n is a, c, g, or t
  misc_feature (484)..(484): n is a, c, g, or t
  misc_feature (486)..(487): n is a, c, g, or t
  misc_feature (489)..(489): n is a, c, g, or t
  misc_feature (493)..(493): n is a, c, g, or t
  misc_feature (498)..(498): n is a, c, g, or t
  misc_feature (500)..(500): n is a, c, g, or t
  misc_feature (503)..(503): n is a, c, g, or t
  misc_feature (505)..(505): n is a, c, g, or t
  misc_feature (509)..(511): n is a, c, g, or t
  misc_feature (516)..(520): n is a, c, g, or t
  misc_feature (524)..(525): n is a, c, g, or t
  misc_feature (530)..(531): n is a, c, g, or t
  misc_feature (533)..(534): n is a, c, g, or t
  misc_feature (536)..(536): n is a, c, g, or t
  misc_feature (545)..(547): n is a, c, g, or t
  misc_feature (550)..(552): n is a, c, g, or t
  misc_feature (555)..(555): n is a, c, g, or t
  misc_feature (559)..(559): n is a, c, g, or t
  misc_feature (562)..(564): n is a, c, g, or t
  misc_feature (568)..(568): n is a, c, g, or t
  misc_feature (581)..(581): n is a, c, g, or t
  Peptide Sequence Number=SeqID_9938
  Probeset Number=SeqID_18155
tggagctccccgcggtggcggccgctctagaacagtggatcccccgggctgcaggaattcggcacgagagagctcactagtcccccccccccccccgctcgcgggtagatgcgcccgttgctgcgggggtggtgtcgggtgctggacggaggactgccgagggctcggggcaggtgtctttttcttcggacgaggggccggtacggtttttggagatggctgtgtcggtgaaggacggtattgagcggcagcagcgtgttgctgggaatgaggcatgtgttgagcgcttggtgaggccatggcctggtgtgatggagggaccggcaccatttgactcgggaatcgaggtgaaggggaggctgagggagatggntggtggtggaactgcgcatgatgntgttgntgctgctgctgtggcgccggccgttggggtnnnnccnnnnnnccccccctcgcgnncncnnnnnnngnnnatctngtntgntnncnccgnctagncnacntntaannnaaccnnnnngtcnncccanntnncncgtaccggnnnttnnnccnttcncannncacncccccctcgcccncccc

SEQ ID NO: 3753 - DNA, 538 bp, Zea mays
  Probeset Number=SeqID_18156
gctaaatccaccgtacacctttgttatcctatccctgtctcgtctgggggaaccagcctttgaagtcaacgcagacccagcgatccttgtcgcgcgttcttcactcctgctcggaattcggctcgagccccccccccacggagggaaggatggcggcgcccaaagcggcggccggcaggaagacgggggtgggcccgtacgaggtcggcaagaccatcggcgagggcagatggaccaaggtcaaccacgcccacgactcctgcacgggcgccgtccgcgccatcaaggtgctcgactcgcagccacgttctacgccacaagatgggcgagcagatcaagcgggagatttcgactatgaagctaattcaaacatcccaacgcggttcagctgcatgaggatatggcgagtaggacgaagatatacatggcttcttgaatttgctgaaggaggccagttatatggtaggatcgtaaatctcggacggctaggagaggaggaagctcggatatactttcatcaacttataaatgcgggaga

SEQ ID NO: 3754 - DNA, 1021 bp, Zea mays
  misc_feature (936)..(941): n is a, c, g, or t
  misc_feature (985)..(989): n is a, c, g, or t
  misc_feature (1001)..(1003): n is a, c, g, or t
  misc_feature (1017)..(1018): n is a, c, g, or t
  Peptide Sequence Number=SeqID_9939
  Probeset Number=SeqID_18157
ggcagtttcattttaatcaaatcagattcatctcctctcgcattccttatctcttcaagatgcaaatcttcgtcaagaccctcaccggaaagaccatcactctcgaggtcgagagttccgacaccatcgacaacgtcgaggctaagacccaggataaggaaggatttttcccggaccagcagcgtctcatcttcgcaggaaagcaacttgaggacggtcgcaccctcgccgactacaacattcagaaggaatcaacccttcacctcgtccttcgtcttcgcgggggcatgcagatcttcgtcaagaccctcaccggaaagaccatcacccttgaggtcgagagttccgacaccattgacaacgtaaaggccaagatccaagacaaggagggaatcccaccagaccagcagaggcttatcttcgcaggaaagcagctcgaggatggccgtaccctcgccgactacaacatccagaaggagtcaaccctccacctcgtcctccgtcttcgtggtggcatgcagatcttcgttaagaccctcacaggcaagactattaccctagaggttgaaagctctgacacaatcgataacgttaaggccaagatccaagacaaggagggaatcccaccagaccagcagaggctgatcttcgctggaaagcagcttgaggatggccgcactttggctgactataacatccagaaggagtcgactctccaccttgtcttacgtcttcgtggtggtatgcaaatcttcgtgaagactcttaccggcaagactattactctagaggttgagagctctgacaattgataatgttaaggccaagatccaggataaggagggtattcccccagaccagcagaggttgatttttgctgggaagcagcttgaagatggaaggaccttggctgattacaatattcagaaggagtcnnnnnntcaccttgtcctccgtctcaggggaggcatgcagatttttgtgnnnnncttgactgggannnccattaccctgganntgg

SEQ ID NO: 3755 - DNA, 645 bp, Zea mays
  misc_feature (1)..(44): n is a, c, g, or t
  misc_feature (645)..(645): n is a, c, g, or t
  Peptide Sequence Number=SeqID_9940
  Probeset Number=SeqID_18158
nnnnnnnnnnnnnnnnnnnnnnnnnnnnnnnnnnnnnnnnnnnncaagttacaagctgggtagttcaccctccaggggacatgcatcatgccttgaatatgctaatgcacaatcagtcgacctaccatgtgcctggaggaggtcgaggtggagagccttattcaggtggcactcctctgcacgcagggctcccccctggaccgtccaaagatgtcggaggtggtgaggatgctcgaaggtgacgggctggcagagcgttgggacgaatggcagaaagtagaggtggtgaggcaggaggctgagtcggcaccgctccgcaatgactggatcgtcgattccacgtacaaccttcgtgccgtggagctgtccggcccaaggtagccactccacgactccgatgaaagaaaacactgaattggccaagattcagtctaattgctgcttgtgtatatgaaaggtagcttttggaattgttagcgacaatttgaaaggatcttctttttttttttggattccccgctagctcaaatgttggttacccttaggttgtgttaaggtgaaaattcgtacatctaagggtgaatttctaaaaaaaaaaaaaacaaaaaacaaaaaaaaaaaaaaaaaaaagggcggccgcaccgn

SEQ ID NO: 3756 - DNA, 736 bp, Zea mays
  misc_feature (636)..(637): n is a, c, g, or t
  misc_feature (654)..(656): n is a, c, g, or t
  misc_feature (711)..(712): n is a, c, g, or t
  Peptide Sequence Number=SeqID_9941
  Probeset Number=SeqID_18159
ggtgcctcacgcttctataaaacaacaaaacccaccacttccccttcgcctttgttctagatacttccttttcttcttactcgacggggtgccctgagatcacactgaacaatggtgaaggctgtggcagttcttggcaacagtgagaatgtcggtggaactatttacttcaatcaggagggaaatggcccaaccaccgtgactggaagtcttagtggtcttaagcctggcctccatggcttccatgtccatgcaatgggggacaccacaaatggttgcatgtcaactggagcacatttcaatcctcatggcaaggagcatggtgcccctgaggatcagaatcgtcatgctggtgatctaggaaatgttaatgtcggtgatgatggaaccgtcagcttcactattactgacagtcagatccctctgactggaccaaactccatcataggaagggctgttgttgtccatgctgatcctgatgatcttgggaaaggtggacatgagcttagcaaaactactggaaatgctggtggcagagtagcttgtggtattattggcttgcaaggttaaacctccacgctcaacctgcggggtacatgaagtaacatgcgtgatcatatattgaggaagctttannattgtggaataaactcnnncatctcatcttttgtttggttagcttcgatctgtacttttgatttgtgttttgcnngtatcgggtttgacttgatggctt

SEQ ID NO: 3757 - DNA, 714 bp, Zea mays
  Peptide Sequence Number=SeqID_9942
  Probeset Number=SeqID_18160
ttgttttttttttttttttttttttttttttttttttttttttttttttttttttttgaacgcgggcgcataaacaatttttttttaaaggggacttgggttgttcccaaaaaaaaacaaaaacagcagcaaattcctttgttccaatcaagcgggggcagcctttttcagggcggggccgcgggatcaatccaacataagcatgctgcaaacggggaaggcactcgcattcaacaatgctatagcagggctcgctttatggggggggctgagcatgagcatacatcagccaagatattgcgtggaaaatcccgcggaggaaatacgataaaggggctgcctggaaccatgggacaaacggccgtcggggcacattctcgtctaactcggtagcagtaactcgggcccacgttctcattatgtgcagatttctttccatgctctcgttgctgttcatgcggtgaagggggctccagtcgtgggacctgtccatgcactggcagaagaggagacgtgcttgaaggtcaagcagaagctaggtgttgcagcagcaccatgttgttcgagctctccggtatatctggatggatgcctagtatcagctgatgtcctgtcgagtagtcgagattggggatcatgcgggggttgaggggtcttgcgatcacggagcgcgagattatgttttggcctcatgaggagttatatcccggccgg

SEQ ID NO: 3758 - DNA, 597 bp, Zea mays
  misc_feature (376)..(376): n is a, c, g, or t
  Probeset Number=SeqID_18161
aaaagctggagctccaccgcggtggcggccgctctagaactagtggatcccccgggctgcaggaattcggcacgagggagagagagagagagagagagagagagctcactagtccccccccccccccccgatcatcatcaccatctcttacaacaaatctcaggcggctcaacactatcctcttctacattttccaacgatggcctcaaacgcactctcgtctttcaccgccgctaatcccgctctgtctcctaagccactactccctcacggctctgcttctccgtcggtttctctcggcttctccaggaaagttggcggagcagagcagtggtcgttggagcggctacgggggacacaaacaaaatgccgatgnaccggagtcgtggtccagcctttcgaaaaggtgaagaaaggcgatctgggcattccaatcacatctcatggctctctcgtcggccagaaggttgccgacgtaagcgaggcagtcattaatgagcaaatcaatgtgggaatacaacgtctcctatgggtaccatttcaatggtacgcatactttgacagagacaacgttggctatgaagggactagccaaat

SEQ ID NO: 3759 - DNA, 1139 bp, Zea mays
  misc_feature (1139)..(1139): n is a, c, g, or t
  Peptide Sequence Number=SeqID_9943
  Probeset Number=SeqID_18162
cccacgcgtccgcctttgtgggctgcttcagccgtgttgatgcacaggtgggaggagacgcggcgaccgaagccaagcctgtggctccagacaccgtgggctcaacagcggtggttgcgcttgtctgctcatcgcatgtcatcgttgccaactgtggcgctttccgtggaccataaaccaaacacggaagatgagtatgcaaggattgaggcccacggtggcaacgtcatcaattgggaatggctatcgagtcccccgtgttctcgccatgtcccggtcaattggggacagatacctgaagccatatattatcccagtccctgaggtcacaattgtcgcccgtgcaaaagatgatgagtgcctaattattgcaagtgatggcctctgggatgtgatgtcaaacgaggaggtatgtgatgctgctcgcaagcgcatactgctgtggcacaagaagaattcagatgcctcatcgtcagcccaaagaagcggtgattcgccagatgaagcggctcaagcagctgctgagtatttatcgaagctggctctccataaggggagcaaggacaacataaccgttcggctcgtcgacctcaagtcacataggaagatcaagagcagagcataaccgtggattcggtaagacttggacagtagaaatggttgttactaccctaggacgctagaaaggtggagaaaaggctcctgttcagtctgctgcacatgtacactggttggcccaacactagtctttttccacaaccatataggctgccacgtttgttcagggactcatacacagatctaatctggttagaaattgggctgacgaggtaaggtaaatctgaaatatatatatatataatatacatatgtagattccaaatagctattactgactgggtttggggcatcgtttctgtttctaacaggtaaaggtacaatagaaaccgccagcattaaactgtacctgtgctacttgtgttttggtatattgatgtctaggagtagcagattagcagtgcaaagaatactacgataccccaagttgtttctgcaacaaatgttatgtgcatgtatatcataaaataagaccatctgtaatatgaattcaattcttggcatccgacgttattaattcn

SEQ ID NO: 3760 - DNA, 773 bp, Zea mays
  misc_feature (769)..(773): n is a, c, g, or t
  Peptide Sequence Number=SeqID_9944
  Probeset Number=SeqID_18163
cattgggtacctcgaggccggccggagtcgcgggatttgggtggaagtggaaaccgcgccgcgggggtcttttaagcgcgtgggggcgcggcgtgctcacacgaggcccgcgctcacgagccagagaagaagggagaggagaggctaaccaccgcggcagctgcgaaaaaaaaaaaaaaaaacctgcgaccgcgaggagtggcgcacgacgaccagcgcggaggaggtggagcctgcggcggggagatttgctcgcccggctggggttgcggtgggaagagggtaggaggcagagacaaccagcgatggcggcgtccgcgaggcccggggagagggcgaccagcttcgccgtcgcgtgcagcctcctcagccgcttcgtccgacagaacggcgccgcgcccgcccagctaggcctcgggatcaaaggcgaggacgagcagcaaaggacgccggcgacaattaacttgctccccggagcggacggcgaggagaccgagaggaggaaggagaccatggagcttttcccgcagagcgccgggttcggtgtcaaggatcccgctgctgcccctagagagcaagaaaataaagagaagcctaaacagctcacaatcttctatggcgggaaggtgctggtgtttgacgatttccctgccgacaaggcaaaggacctgatgcagctggcgagcaagggcagcccctgtggtacagaacgtttgtttttgcctcaccctcctgcacttgttgctgctgtcccgaccagggccgtgcnnnnn

SEQ ID NO: 3761 - DNA, 478 bp, Zea mays
  Peptide Sequence Number=SeqID_9945
  Probeset Number=SeqID_18164
acacgcaaacaaaaaaatggctcacctcttcagagagctgtctctgggtcactccaagcgagagacgacgccgccgccaccgtcgatggcatccacgattccctccgatctaccaccgtctccactcggacaactcgccgtccagttctccgaatccgacctccgcctcatttcctacgagatcttcgtcgccgcatgccgtagcgccaccgggaagcctctctcatccgccgtctcgtcactctccgttgctaatccggactctccgagcaacggcgcctctcccgcttctccagctgcccagcgttctctgaccgcagccgccgcgagcaagatgaagaaggccttggggatgaagtcgttgtcatccttatcgcctggatctaccaagagccctggctcgggctctggttcgggctctggctcgggtggtaagtcgaagcgccccactactgtcggtgagctgatgcggatccaa

SEQ ID NO: 3762 - DNA, 1129 bp, Zea mays
  misc_feature (47)..(47): n is a, c, g, or t
  misc_feature (107)..(108): n is a, c, g, or t
  misc_feature (118)..(119): n is a, c, g, or t
  misc_feature (130)..(132): n is a, c, g, or t
  misc_feature (151)..(151): n is a, c, g, or t
  misc_feature (153)..(154): n is a, c, g, or t
  misc_feature (164)..(164): n is a, c, g, or t
  misc_feature (197)..(198): n is a, c, g, or t
  misc_feature (205)..(206): n is a, c, g, or t
  misc_feature (223)..(224): n is a, c, g, or t
  misc_feature (251)..(251): n is a, c, g, or t
  misc_feature (263)..(264): n is a, c, g, or t
  misc_feature (282)..(283): n is a, c, g, or t
  misc_feature (293)..(293): n is a, c, g, or t
  misc_feature (298)..(298): n is a, c, g, or t
  misc_feature (300)..(301): n is a, c, g, or t
  misc_feature (318)..(319): n is a, c, g, or t
  misc_feature (332)..(334): n is a, c, g, or t
  misc_feature (352)..(352): n is a, c, g, or t
  misc_feature (355)..(355): n is a, c, g, or t
  misc_feature (357)..(358): n is a, c, g, or t
  misc_feature (373)..(374): n is a, c, g, or t
  misc_feature (381)..(382): n is a, c, g, or t
  misc_feature (389)..(391): n is a, c, g, or t
  misc_feature (412)..(413): n is a, c, g, or t
  misc_feature (453)..(454): n is a, c, g, or t
  misc_feature (473)..(473): n is a, c, g, or t
  Peptide Sequence Number=SeqID_9946
  Probeset Number=SeqID_18165
cgggttcgacccacgccgtccgttgtttgggctcggcttcgcgcggncgccgtgcctgctgccagctctctaccgcacccgaacacagcacggcgccccgcaccccnngctctctctnnctcctgcgttnnncccatctgccccatctgcngnngcggcggggnagtgggagcacccattgagggggacggtctacnntcctcgnnttcgcgtgcccggttcnngtcccgagccgatgccgggcggaggangtgaagcatctnntcaagaaagaagggtcgnnaccccaaagnaggcntnnctcaggaccccagcaannacgtgaaatgggnnnggtcgccacgcccggggnagntnntgagaagagagaatnntggttcnncctgcannnatggaggagaaaaaaggctgnngttgcagagaataaagaagaactgccaagaactggaaatnngaggctgcaaccaaaatanttagctcggcaacccttgtcaggctgaggcaacaaatcctcaatttgcaaggcacacgggcacagattcgtggagtagctactcacacacaggcaatgtatgctggcacttcaatctctgctggaatgaaaggtgcaagcaaagctatgtcagcaatgaacaagcaaatggaaccggcaaaacagataaaggtcatgaaagaattccagaaacaatcaacacagttggacatgccgcttgagatgatgtctgatgctattgatgaaacccttgccaaatatgaggtggaggagtaaccagaatagctcccaaaccaggtccttgttgagattggcgacgatgtgggttctcagctctctccggttcttaaagggcgcatcgacgctactaacaagaaagtcgataacggtcaagcacgtcgtgcaaggaacgtggcggctctggtcttttagaaccctctgtctgttaagtttgaggttctggacaggcgaatggcatctctgcgcccgtatctgagtgtgagttgttgaagaaagaacgtgtttgtaatgtgaatacaaaacagagccatctgcccatgatacgtgttgccctgctcttatgtataatttaatttgaaagttgactccacaaaaaaaaaaaaaaaaagggcgagg

SEQ ID NO: 3763 - DNA, 477 bp, Zea mays
  Peptide Sequence Number=SeqID_9947
  Probeset Number=SeqID_18166
tcgagtcagctacgtaggccccccccccagtcccggaagcgacaacgacgatcatgatggcgacaatgacaagaagaggcagccaggcgtcaagcgtgcctgtaatgaatgccgtcaacaaaaggcaagtctgtctacgtcgctcacattatttctagttccttgcctacgtttagttcgaagagttactaacgccattttctgaaacagcttcgctgcgatgtcgttcaagaaccttttcaaagctgctctcgttgcaatcgcctgaagttggactgcaagatcgaatccaacttcaaaaggataggcaagcgctcgaagcatgccgaaatggaaaaggagatagaacgtttgcgacgaagcgtgaaccgcgcgcagcttcagggctttgtacctgacgaagaggaagatttacaatcgcctctggcgcagagcacaccatacactcacacccgcaatccctccctcatgggctcc

SEQ ID NO: 3764 - DNA, 212 bp, Zea mays
  Peptide Sequence Number=SeqID_9948
  Probeset Number=SeqID_18167
atcggtcgaggggggctgacatcccgtctgccgatgccagaatcggtcccgggaggcaacgccacgagcagaagcccccggcccacatgggcacgcgggcgccggaggatcggcgcgcgcggcgagccgcgcgcggcagcccgtgcgcgagacggagccggatctcgtcctgtgctctctccgtcgagcgatttcgagctcgtacgctaatc

SEQ ID NO: 3765 - DNA, 1040 bp, Zea mays
  misc_feature (1)..(81): n is a, c, g, or t
  misc_feature (936)..(1040): n is a, c, g, or t
  Probeset Number=SeqID_18168
nnnnnnnnnnnnnnnnnnnnnnnnnnnnnnnnnnnnnnnnnnnnnnnnnnnnnnnnnnnnnnnnnnnnnnnnnnnnnnnnngaggaaagctggaccgacgtcgacttctgccgtcgcgtcaagatgaccggatggatgtacttcgtgtctaaaaccctggcggagaaggcggccctggcgtacgcggcggagcacggcctggacctggtcaccatcatcccgacgctcgtggtcggcccgttcatcagcgcgtccatgccgcccagcctcatcaccgcgctggcgctcatcacggggaacgcgccgcactactcgatcctcaagcaggtgcagctcatccacctcgacgacctctgcgacgccgagatcttcctcttcgagaacccggccgcggccgggcgctacgtctgctcctcgcacgacgtcaccatccacggcctcgccgccatgctcagggataggtaccccgagttcgacgtcccgcagaggttccccgggatccagggcgacctccagccggtgcgcttctcgtccaagaagctccaggacctcgggttccccttcagggacaagaccctggaggacatgttcgacccccccatccggacttgccaggagaagggcctcatccccctcgcccctgccgccggagggggcggctttgcctcggtgcgcgcccccggcgagacggaggcgacgattggcgcttaaagcaacaatcacccggctctccccgtcggatgatgctatcagctatctatcttcttcgagcgtcccctgccaatacggaactttcttccatgctcaacgaattggtttatcccctggattacggattgtttttatgttttataccccaacaacgaatgtttttcagtttttttctccagcaagcccctatagtaaagatttttttatatgaataagctatctgtnnnnnnnnnnnnnnnnnnnnnnnnnnnnnnnnnnnnnnnnnnnnnnnnnnnnnnnnnnnnnnnnnnnnnnnnnnnnnnnnnnnnnnnnnnnnnnnnnnnnnnnnn

SEQ ID NO: 3766 - DNA, 519 bp, Zea mays
  Peptide Sequence Number=SeqID_9949
  Probeset Number=SeqID_18169
tcgagtcagctacgtaggcccccccccccaactgcttcatcatcatcgacgcctgcgaagacgacgcccgcgaagacgacgcccgcgaagaaagctaccgtggagcgcaccgtcatcggacagctctactattcccgcccgcacgaccaagcgtacccccacgggtccatgtacacgcatacctgggacttaatcgagcttttggcgaaacttcaggagaaagaccctgttgtcatgggcgaagaccaggcagttggaaagctcctccagaacgcaggggagcaagttcacctcgtcaatatgaatgccaccgagaaattcgactacgacgacgccgatgcgcgaaccgctgactcaccatgggcacgtaccgctacacatccgatggccatgttacacgccctgtacggccgcgatgagctcgccgtgcaccagctcaaggatcgtaacctcttcatgaagattgccaatgcgttcgactcgaagggtatcaaggccccaccacgattcgacggaccc

SEQ ID NO: 3767 - DNA, 274 bp, Zea mays
  Probeset Number=SeqID_18170
gccgttggactgataaattaccatgcttgagttgaaggtgaggaatagtaagccaagctcctgtgatccagtagaagtctttcattactgcagccgaaagatatctctgctgtccgaaacatgtcagtttctttaatccctcgccctatcagcaacgaaagccaacaccccggcgaggacggcggcgaccagcgctacgcctcccgtgcccatgtcgagcgaagaagcaaactgcaaccacaactgcgctgtgcgctgtgagttcgtcgtcgtc

SEQ ID NO: 3768 - DNA, 897 bp, Zea mays
  misc_feature (1)..(297): n is a, c, g, or t
  Peptide Sequence Number=SeqID_9950
  Probeset Number=SeqID_18171
nnnnnnnnnnnnnnnnnnnnnnnnnnnnnnnnnnnnnnnnnnnnnnnnnnnnnnnnnnnnnnnnnnnnnnnnnnnnnnnnnnnnnnnnnnnnnnnnnnnnnnnnnnnnnnnnnnnnnnnnnnnnnnnnnnnnnnnnnnnnnnnnnnnnnnnnnnnnnnnnnnnnnnnnnnnnnnnnnnnnnnnnnnnnnnnnnnnnnnnnnnnnnnnnnnnnnnnnnnnnnnnnnnnnnnnnnnnnnnnnnnnnnnnnnnnnnnnnnnnnnnnnnnnnnnnnnnnnnnnnnnnnnnnnnnnnnnnnngcttcacggtgtcactttctgttgtgtgtgtttttttttttttgcttcttctttgcatcacttgtactcagccgaaaaaaaaaccttggtgctcatggccacttctggttacacttatactcagatccaaactcatgtattcggtccctctcttcttatgaatgtatgtatgagatgtgtcttgttgtaatctatgggatcgagtacggaggtctaaaacgtgggtctggttccttttgcgtttttgtctgtgatttacgcgtggatctagtcactggattaaactaacagtgctctgtgcacttcgaccgatccggattttagggttaatttagttagggctcaaccctaactggatctgcgtttctgttacttgactctgtttcttggccgtggatcgttggatcctgagccctgtgcaccgtctctgttgatggtgtgccgattagggttaggtcgtaaaccctaaccctaaacagttgtgcagtgctctccctggtttgaggccgagacacactgcgtctcttacattggccaaacctaaatcttagggtaagagaaaaccctaacccgagagcatggactctttctatccccgcg

SEQ ID NO: 3769 - DNA, 541 bp, Zea mays
  Probeset Number=SeqID_18172
gcattttcgcggcgcacactacaccacaacactgtctcttcagttccgatcccacgcgccgccatcatggtgaacgttccaaagacaaagaagacatactgcaagagcaaggaatgcaggaagcacacactgcacaaggttacccaatacaaaaagggtaaagattgcattgctgctcaaggaaagcgtcgttatgaccgcaaacaatctggttatggtggacagaccaagcctgtcttccataagaaggcaaaaaccaccaagaaaattgtcctgaggctgcaatgtcagggttgcaagcatgtttcccaacatgctattaagaggtgcaagcactttgagattggtggtgacaagaagggcaagggaacctctctgttctaggttcagaattaggatttgcagtttttctgtttttgctatattggaatgttttgtttctctatgaatttatggtagctatattttatatttgcaacatcttttgtgattgagaagtgaaaactattgccaatatcagtgactagttgttttcatccct

SEQ ID NO: 3770 - DNA, 626 bp, Zea mays
  misc_feature (3)..(4): n is a, c, g, or t
  misc_feature (10)..(10): n is a, c, g, or t
  misc_feature (12)..(12): n is a, c, g, or t
  Peptide Sequence Number=SeqID_9962
  Probeset Number=SeqID_18173
agnnatatgncnattgggtaccgggccccccctcgagggcatgcgccttctgctcactgcaatgaagccgtgcctcaaaattcaacttgaccagcacaaacgacaatgttgcactgcactatgttgcatcgcgtcaaccgtgtcgaggttgtcatgaatgaaattgttgatcgagttttgcaaaactatcagctcaataacccactagacgctgcgagcgtggtcgaatcgagagagaaagtttcccagtatgtcgcaaagcttgcgtcggcagggcagaatgatcgtcgtcggctcatcgtttttgcgagggcttatttgaaagagctacatcaggggccggatcgacggtttaccggctgttgaaggagttcggcttcgccggcggcttgtcccgttcacccaaacctccgttcggcgcgttagaattaggtcagtcgtattaacttagcggtgctgtggcattgtttcgcgcgagtgaaacgtcgcattctcagacgttcgctcggcgttgtaggatcaacgattattggcgatggtaggtttggattgccgccgcaaatgccggaccctgctttgtcagttgtgattgaacgttgttcaaggagctagccatgcgcgttcat

SEQ ID NO: 3771 - DNA, 726 bp, Zea mays
  misc_feature (703)..(703): n is a, c, g, or t
  Probeset Number=SeqID_18174
cattgggtacctcgaggccggccgggactgcttttccctcccggccccccgcgcgtccgcccacgcctccgagttgcgggtggcctcggcctcctcttctccgtcgcggctcagatctctgcgtgcgtcgatggcgtccttctcggaggctccccccgggaacccgaatgccggcgagaagatctttaacaccatagtgcgcgcagtgctcacacggtcgacaagggcgccggccacaagcaaggtccaaacttgaacggtctttttgggacgcagtcgggtaccactgcaggctactcctactctgcgtcaaaccataaacaaggctgcagtctgttaataagacactttgtatgattacctgcttaaccctaagaagtacattcctggaaccaagatggtcttccctgggctgaagaagccgcaggagcgtgctgatctcatcgcgtacctgaaggagataactgtgtagttcattgtacatgacttttgccatgaagagaaaaattgttttgctgcttaataaaaaacattttacactgtttgtgtcaccctgcttgaacagggtgcaaccacgtctcattattttcgttcttatggtgcccgtatgaaatgcctaagtgtttagctgtgcacgaataacaggtagactttgacgactactatttctactgctgcacaagagacagtgccctatttttgncccaatggagcggatacacgcgg

SEQ ID NO: 3772 - DNA, 878 bp, Zea mays
  misc_feature (3)..(6): n is a, c, g, or t
  misc_feature (12)..(15): n is a, c, g, or t
  misc_feature (17)..(17): n is a, c, g, or t
  misc_feature (609)..(609): n is a, c, g, or t
  misc_feature (649)..(649): n is a, c, g, or t
  misc_feature (670)..(671): n is a, c, g, or t
  misc_feature (683)..(683): n is a, c, g, or t
  misc_feature (691)..(692): n is a, c, g, or t
  misc_feature (697)..(697): n is a, c, g, or t
  misc_feature (702)..(702): n is a, c, g, or t
  misc_feature (719)..(719): n is a, c, g, or t
  misc_feature (725)..(725): n is a, c, g, or t
  misc_feature (730)..(738): n is a, c, g, or t
  misc_feature (741)..(786): n is a, c, g, or t
  misc_feature (791)..(806): n is a, c, g, or t
  misc_feature (808)..(845): n is a, c, g, or t
  misc_feature (847)..(877): n is a, c, g, or t
  Peptide Sequence Number=SeqID_9963
  Probeset Number=SeqID_18175
tgnnnnatgtgnnnncnattgggtccgggccccccctcgagaagcgcatggtggacgcttccgatgggcgacgacacaaccgcgagatgacgggaaatgaagttggcccgggagcgacgatcaatccaggggacatcagcggaaacacgttcaacatccatctgccccaacggccggcggcttcgcgatccacggccagggtcatcccttatccccacaaccccgacttcgtccgccggccggacctggccgataagcttgacgagctactgccgctcggcgagcactacaaatccgtggcgctgtggggcctcggagggtcagggtatggactttgcattgtgacatcgcgacatcacgttgagcttccgctgatccttgcagcaaaacccagattacgcttgagtacgcgtacggacggttccagcccaacgtgtgcggcgtgttctaggtgcaagccgacagcgaagccacgtttacgcacgactataagtcgatcgcggccaagctgagggtcgacacaaggcttgagggtgaagacctgtttgaggcggtgcgcgctgcgatcgaatcccaccatcgtgggtcctagttctcgcaacgcggacnactgaggctgttcggctagcaatcacggaggaaacaaaanctttaaaatcctgccaaggannaatggacatttntgaaaccnnatggnggttnccacttttggacccccntctttnggggnnnnnnnnnccnnnnnnnnnnnnnnnnnnnnnnnnnnnnnnnnnnnnnnnnnnnnnnggggnnnnnnnnnnnnnnnntnnnnnnnnnnnnnnnnnnnnnnnnnnnnnnnnnnnnnntnnnnnnnnnnnnnnnnnnnnnnnnnnnnnnnt

SEQ ID NO: 3773 - DNA, 1432 bp, Zea mays
  misc_feature (753)..(753): n is a, c, g, or t
  Peptide Sequence Number=SeqID_9964
  Probeset Number=SeqID_18176
cacgaaaactgcgggacgacgccttgtttggtccacgacgaggttttgcttccaaagggtttttccccagtttcttcattctctgattgatgatgatgaatcacctcctccgtaaaagttccgccaccgccatgagatccgttggttacctccggcaatcttcctccgccgtatcaaccgtccgccagttcacctccgccggctatccttccaacagctttcagttaactccgccggtgaactggggagtccggattgtaccggagaagaaggcctttgtgattgagcgattcgggaaattcgccaagacattgccgtcggggattcacttcttgattccatttgtggatcgaattgcttatgttcattcgctcaaggaagaagcgatccctattcctaatcagactgcgattactaaagataacgtcagtatccatatcgacggcgttctctatgtcaagatagtggatcctaagttagcgtcttatggcgttgagagtcctatctatgctgttgttcagctggctcagaccaccatgcgtagtgagcttggtaagatcacgcttgataagacctttgaggaacgagatactctcaacgagaagattgtggaagccatcaatgttgctgcaagagactggggtcttcagtgtcttcgttatgagataagggatattatgccccctcatggcgtgagggttgctatggagatgccagctgaagctgaacgtaaaaagagagcccagattctgnagtctgaaggagaaaggcaagcccatatcaatattgctgatggtaagaaaagttctgtaatcttggcatctgaagctgcaaagatggaccaagtgaatcgagcacaaggtgaggctgaagcaatactcgctagagcagaagcaactgctagaggccttgccatgttatctcagtctctcaaagaaactgggggagtagaggctgcgagtttgagagttgcagagcaatacattcaagccttcagtaacattgccaaggagggtacgacaatgttgcttccaagtacagcttcaaatcctgcaagcatgattgctcaagctttaacaatgtacaaaagccttgtcaaccaaggtccaaagagtgaacaccaagaaacatcagcaatggaaggtgactgggaagacataggtgagaaagagatatcagaaggctccaaaaaccaatcaggctcaacaacattcgaaacagagaaaccaggtcacaccggtggaccagtattttctcttcagagtcgcactgaggagccatagtagccagccaaacaaagaatgagagatttctatgtgtgtgcctgagagaacagaaaattcatcttttccagtttaaaaaaaatgagacactgtcgtcgtccccgtttgaagggcttgaatatcatattatgacaaaaaaaaaaaaaaaa

SEQ ID NO: 3774 - DNA, 808 bp, Zea mays
  misc_feature (541)..(541): n is a, c, g, or t
  misc_feature (648)..(648): n is a, c, g, or t
  misc_feature (666)..(666): n is a, c, g, or t
  misc_feature (704)..(704): n is a, c, g, or t
  misc_feature (720)..(720): n is a, c, g, or t
  misc_feature (730)..(730): n is a, c, g, or t
  misc_feature (771)..(772): n is a, c, g, or t
  misc_feature (790)..(790): n is a, c, g, or t
  misc_feature (793)..(793): n is a, c, g, or t
  misc_feature (801)..(801): n is a, c, g, or t
  misc_feature (803)..(805): n is a, c, g, or t
  Peptide Sequence Number=SeqID_9965
  Probeset Number=SeqID_18177
gaggagcaattattccccagtgtgctagtccaagccatgagtcttgagaagctggttatagccccagaccttgcaattattagaaaacatatcgatgatggagtaaacggacttctttttccaagaaagaatgttggcatgttacctcaagttcttcttcaagcagtgtcgaacggtaaagtgtctatttcagggcaaaaaattgcttcagctgggaaggcccatgccaagaatcttatggcttctgagaccattgaaggctatgctgtgctattggaaaatgttgtcaagttccccactgatgcattacaccctttaactgttgatgagatacctttagctctgaaaaaggagtggaaatggcacctatttgaggatgtgaagcatttacaccatatgaatacgagtttgtctagctacaagatactcaagaaactagagcaggagtggcataaaaaccaaatggagaacttttctttgagtacaacaaagatagttgacaccattctctgcaattgcctgggaagaacagaagagcaantggaggttatggacatcaaaagaaaaatggaggaagaccaatttgaaggccaggaatgaccaacctcatggaaaatggggaaggaggggtccaaaaatgtgaaaaanggtagggggggccccggnccccatttcgcccctatagtggagcgtattacaattcnctggccgtcgttttanaaccgtcgtngactgggaaaaccctggcgttacccactttaatccgcttgnngcacattccctttcgcangtnggcgtaanannnaat

SEQ ID NO: 3775 - DNA, 624 bp, Zea mays
  misc_feature (46)..(46): n is a, c, g, or t
  misc_feature (583)..(583): n is a, c, g, or t
  Peptide Sequence Number=SeqID_9966
  Probeset Number=SeqID_18178
acgaattgggtaccgggccccccctcgagccgctcgcggacagctnctccggtttcaacctgctgttggccgaccgcgagtcgttgtggtacctatccaaccgcgcccccgagttcgctcgctcactgcggcccggtatttatgggctttccaacgagctgctggatacgccgtggccgaaacttcaacgtgtccggcgccgcttcgacccgctggtgaaacagcctgacaacatttccagcgacgctttgttcgagatcctggccgaccctacccaggccggagtcgatgacgtgctgccggataccggattgtcacgggagtgggagcagcttctgtcgtcccccttcatcagcaataaagactatggaacccgctgttccaccgtcctgctgctggaaacctccggtgcggtttcgctcacggagcgccgtttcggcccccagggcattccgctcagcgatacccgtttcgacctcgccgccaacgaatggccgtgaggctgcgcgccggcccagctagaatctaagtcatcttttgtgaccgcacacgttatatcgcaccgttttgatggcgcagcgcncttccttcccgcaggcccgggccgcattgcttttgttgtgc

SEQ ID NO: 3776 - DNA, 1090 bp, Zea mays
  Peptide Sequence Number=SeqID_9967
  Probeset Number=SeqID_18179
attgggtacctcgaggccggccggtgaaaagcttttacacctacagacattgagtcttgagcgtgcagagttagtgaagttcccacaagggttttcaaacctgaaaaaattgagacatcttatggtttcacggttgcgagatgtaacttataggagtttaaaaagttgggaagctctggagccatttaaaggcttgtggggtttgactgaactgcaaactctgtttgccattactgcaagtgaagtattagttgcaatccttggaaatttatcccagctgaggagccttgaaatttgtgatgtaaggagtaacttatgtgcacatttatgtggctctttgtcaaagatgtgccagctgtcacgattaacgataagagcatgcaatgaagatgaagtgctacagctggatgatttgacatttccaaatcctcttcaaacccttagtttagatggacgactgtcagaaggaactttcacgtctccctttttcttaaatcacgggaatgggcttctttgtctaatgttgtggtacagtcagctttcagaaaatccagtaccacgtctctctaaattatcaaacttgactaggttatctcttataaaggcatacaccggccaagaattatacttccaagcaggttggttccctgaatttgaaggaactttacatgaaggatttgccccatctcaatcaaatacacatacagggagggagctttgccccagccttgaaacttatagcaatttttcacctcccagatctacggcaggctccaatcggcttcagatttctcaagtccctagaaacaacatttttttatgatatgcatcctacttttgaaagcaacattgaagaaagaaatttagagcgtattgcatacatattcgggacaatggcataagtatggtttgattgtgtgtctacgggtaaccttatgccctccaccgaaaatagggcgggttgcattggcgaaaggtccgtgatgggtgttttgagcttgggcaattacagtgaagaggaaatgcagcactaggatcaaaactttcgagcagaaagcaccaaagaggaagcgtagccgacaggcgacat

SEQ ID NO: 3777 - DNA, 564 bp, Zea mays
  misc_feature (531)..(536): n is a, c, g, or t
  misc_feature (539)..(541): n is a, c, g, or t
  misc_feature (547)..(549): n is a, c, g, or t
  misc_feature (556)..(559): n is a, c, g, or t
  Peptide Sequence Number=SeqID_9968
  Probeset Number=SeqID_18180
gcaacaatcacaatcctcaaactcaaactcaaagctacttttcacattccaaacactctcaaaccaaactctttccatccaaacctcaatcaacatgtctgccccaaacgttgacaagcctaatgagggcatcgtcggtcaagtcggcaactccatcagcaacgctgccaactacgtctccgagagcctccaaggcaacgccaaggaagccagcaaggaggccaacaagcaacaagccaagggcaatgctggtgacacctctctcaccggccgtgccagcggtgctctcgatgccgccggcgacaagctcgaccagtcaaagcacgatagtgctgcgaaagccaacaaggaatccatttgaggttctccacggttcgatcatcatgaagtgacggcttctctacacgacgttgatggatccttgacgagatgatcatcactgttcgggatgttgggtcaagacgagatatcctgatggcattgtaatcgtcagatagctttgttaagctagcaataacatcaatatacccnnnnnnaannnaaaaannnagagaannnnaaaac

SEQ ID NO: 3778 - DNA, 1436 bp, Zea mays
  misc_feature (1)..(786): n is a, c, g, or t
  misc_feature (1436)..(1436): n is a, c, g, or t
  Peptide Sequence Number=SeqID_9969
  Probeset Number=SeqID_18181
nnnnnnnnnnnnnnnnnnnnnnnnnnnnnnnnnnnnnnnnnnnnnnnnnnnnnnnnnnnnnnnnnnnnnnnnnnnnnnnnnnnnnnnnnnnnnnnnnnnnnnnnnnnnnnnnnnnnnnnnnnnnnnnnnnnnnnnnnnnnnnnnnnnnnnnnnnnnnnnnnnnnnnnnnnnnnnnnnnnnnnnnnnnnnnnnnnnnnnnnnnnnnnnnnnnnnnnnnnnnnnnnnnnnnnnnnnnnnnnnnnnnnnnnnnnnnnnnnnnnnnnnnnnnnnnnnnnnnnnnnnnnnnnnnnnnnnnnnnnnnnnnnnnnnnnnnnnnnnnnnnnnnnnnnnnnnnnnnnnnnnnnnnnnnnnnnnnnnnnnnnnnnnnnnnnnnnnnnnnnnnnnnnnnnnnnnnnnnnnnnnnnnnnnnnnnnnnnnnnnnnnnnnnnnnnnnnnnnnnnnnnnnnnnnnnnnnnnnnnnnnnnnnnnnnnnnnnnnnnnnnnnnnnnnnnnnnnnnnnnnnnnnnnnnnnnnnnnnnnnnnnnnnnnnnnnnnnnnnnnnnnnnnnnnnnnnnnnnnnnnnnnnnnnnnnnnnnnnnnnnnnnnnnnnnnnnnnnnnnnnnnnnnnnnnnnnnnnnnnnnnnnnnnnnnnnnnnnnnnnnnnnnnnnnnnnnnnnnnnnnnnnnnnnnnnnnnnnnnnnnnnnnnnnnnnnnnnnnnnnnnnnnnnnnnnnnnnnnnnnnnnnnnnnnnnnnnnnnnnnnnnnnnnnnnnnnnnnnnnnnnnnnnnnnnnnnnnnnnnnnnnnnngtatctgaggtccttagtgtctcaaagaaaaattatacagagctggagaaggtattatatgccgttttaatggcatccaggaagcttcggcattattttcaggcatacaatatcattgttccttcttcgcagccgttgaaggatataatgagaaatagaccaggggctcaggaggatgaaacaaataaagaagccgaagaatggatagtgttttgtgatgggtcttggggaaccttcggggcaggagcagctgctgtgttggtttccccctccaaggtaaaaacttgttatgcggcaacacttgattttagttagacaaataaaatttccgagtacgaagccctgcttatcggtcttcggaagctaaaagcaatgggaatcagaagggccatgctaaaaactggttctgaggttggactttatctgggcatcataaaaagagttgcaaggttcaaaatccgaagcttgggccttcggaaattaaaggcaatgggaatcagaagggcaattcttaaaactgattcccaggtggtttcgggtcatgttgacaaaagttgcaaggctaaagatccgaagcttgaaaaatacctagatacggtccgaaggatcgaagcatccttcgaaggattctctgtcaagaatatccctcn

SEQ ID NO: 3779 - DNA, 430 bp, Zea mays
  Peptide Sequence Number=SeqID_9970
  Probeset Number=SeqID_18182
gcaatgtgtagacattggtgtacgtcatctaaacatattggtgagcccccgatctcatcataactgaagcactgtacttttaccattgtaaaatctgtcttttttgggccaattatataaattacaaaattgcatttttggattttatggacattatgatttgatcaactcccagttaattgagacacttgctatctgctgacaaaatattgttgatgtccactgggccccccccaattgcagcctttgtttcctggtgaaagtggtgttgatcaactggtggaaatcataaagattttgggtactccaacaagagaggaaatcaggtgcatgaatccaaattattctgaattcaagttccctcagataaaagcccatccatggcacaaggttagggatctctaatctctgtggtgttttttcatttcag

SEQ ID NO: 3780 - DNA, 550 bp, Zea mays
  misc_feature (378)..(379): n is a, c, g, or t
  misc_feature (382)..(382): n is a, c, g, or t
  misc_feature (419)..(419): n is a, c, g, or t
  misc_feature (513)..(513): n is a, c, g, or t
  Peptide Sequence Number=SeqID_9971
  Probeset Number=SeqID_18183
aaacagacccactctgctccctcggcgtcgtctgtcgtctgaggtctcctcgcgcgcgtcctgacgtcctccgctgcccgactccggcgtcctccccaccgacccatccacagctcaagccaacattcacccgtatcccgcgcgcgcttgattcgccgcatctgagcgtcacggccgcgactgcgcgccctgcgtcgcctcccgccgccgccgcacggccgcgacggatgctcggccaccgcttccccgccgcgctcggcctcccgcgcggtctgctgctggggaggagcgtcacccgccgcagtctgtccgccatggccggtggcgaggcggggggcccgctcgggggtttcttcgattacatggagcggctgcgcnnctncgagcgctcgggcgtgccgcgcggcgccggcaccgantccgacgacggattcgacctcgggcgcatgcgccgactccttcgtcggctcggcgatccccacaccgacttcccggctgtgcatatcgccggcnccaaggggaaaggttctactgctgcattgctgtccaa

SEQ ID NO: 3781 - DNA, 937 bp, Zea mays
  misc_feature (2)..(4): n is a, c, g, or t
  misc_feature (7)..(7): n is a, c, g, or t
  misc_feature (9)..(21): n is a, c, g, or t
  misc_feature (23)..(25): n is a, c, g, or t
  misc_feature (27)..(31): n is a, c, g, or t
  misc_feature (34)..(34): n is a, c, g, or t
  misc_feature (36)..(36): n is a, c, g, or t
  misc_feature (38)..(52): n is a, c, g, or t
  misc_feature (54)..(60): n is a, c, g, or t
  misc_feature (62)..(67): n is a, c, g, or t
  misc_feature (69)..(86): n is a, c, g, or t
  misc_feature (88)..(104): n is a, c, g, or t
  misc_feature (106)..(109): n is a, c, g, or t
  misc_feature (111)..(134): n is a, c, g, or t
  misc_feature (136)..(138): n is a, c, g, or t
  misc_feature (140)..(195): n is a, c, g, or t
  misc_feature (197)..(250): n is a, c, g, or t
  misc_feature (252)..(269): n is a, c, g, or t
  misc_feature (271)..(275): n is a, c, g, or t
  misc_feature (277)..(277): n is a, c, g, or t
  misc_feature (279)..(282): n is a, c, g, or t
  misc_feature (284)..(526): n is a, c, g, or t
  misc_feature (529)..(542): n is a, c, g, or t
  misc_feature (545)..(547): n is a, c, g, or t
  misc_feature (549)..(551): n is a, c, g, or t
  misc_feature (553)..(553): n is a, c, g, or t
  misc_feature (556)..(557): n is a, c, g, or t
  misc_feature (561)..(562): n is a, c, g, or t
  misc_feature (570)..(570): n is a, c, g, or t
  misc_feature (578)..(578): n is a, c, g, or t
  misc_feature (587)..(587): n is a, c, g, or t
  Peptide Sequence Number=SeqID_9972
  Probeset Number=SeqID_18184
cnnnccncnnnnnnnnnnnnncnnncnnnnnccncncnnnnnnnnnnnnnnncnnnnnnncnnnnnncnnnnnnnnnnnnnnnnnncnnnnnnnnnnnnnnnnncnnnncnnnnnnnnnnnnnnnnnnnnnnnncnnncnnnnnnnnnnnnnnnnnnnnnnnnnnnnnnnnnnnnnnnnnnnnnnnnnnnnnnnncnnnnnnnnnnnnnnnnnnnnnnnnnnnnnnnnnnnnnnnnnnnnnnnnnnnnnncnnnnnnnnnnnnnnnnnncnnnnncncnnnncnnnnnnnnnnnnnnnnnnnnnnnnnnnnnnnnnnnnnnnnnnnnnnnnnnnnnnnnnnnnnnnnnnnnnnnnnnnnnnnnnnnnnnnnnnnnnnnnnnnnnnnnnnnnnnnnnnnnnnnnnnnnnnnnnnnnnnnnnnnnnnnnnnnnnnnnnnnnnnnnnnnnnnnnnnnnnnnnnnnnnnnnnnnnnnnnnnnnnnnnnnnnnnnnnnnnnnnnnnnnnnnnnnnnnnnnnnnnnnnnnnngtnnnnnnnnnnnnnnatnnngnnngncanntggnnagttcatngtcctctnatcaagcanaatcgaacgcggggctcttcggtgcagaaaagttgaacgagggcaggctttggtgcaaagacgattgacctaagggcagcgtgtgggaggttattctgcgtctgtcatcggcgtctctcatgttctctttggcgcgattggcgcagcgcaacgagtcgtcgtttccggtcgggtcgtcagagagagaaagagagcagatccgataataagatgagattgcaggtatggactaaaggcgaggtagggaagaggatgggatttcgtgggtcccgtcacgcgatgagcggaaaatgggaccgcggggtcgtgaatgccgatcacacgactcgagggggggcccggtacccaat

SEQ ID NO: 3782 - DNA, 685 bp, Zea mays
  misc_feature (7)..(9): n is a, c, g, or t
  misc_feature (25)..(26): n is a, c, g, or t
  misc_feature (616)..(617): n is a, c, g, or t
  Probeset Number=SeqID_18185
gaggaannnagagagggagataacnnaaacccatttggaccgtttcgtctctgatctctttcgatctctctctctctctctctccgattctgagttgtattaatcaaagcgatggcagcagcaccagcaagagctcgtgccgattacgattacctcatcaagctttttcttattggcgacagcggtgtcgggaagagttgtctgcttttgagattttctgatggttccttcacaaccagttttatcaccaccattggtatcgatttcaagataagaaccattgaacttgatggtaaacgcatcaaattacaaatctgggatactgctggtcaggagcgatttagaactattacaacagcttattaccgcggtgccatgggcatcttgctggtttatgatgttactgttgaagcatctctcaacaatattaggaattggattcgcaacattgaacaacatgcttctgacaatgtatacaagatactcgtgggcaacaaggctgatatggatgaaagtaaaagggctgtgcccacctccaaaggtcaagcccttgctgatgagtatggcatcaagttctttgaaactagtgcaaaaacaaacatgaacgtggaggagnntttcttttcaatagcaagagatatcaagcaaaggccttgcagacacagattctaaagctgagcctcag

SEQ ID NO: 3783 - DNA, 597 bp, Zea mays
  Peptide Sequence Number=SeqID_9973
  Probeset Number=SeqID_18186
atggacatccgagatccaacggccaagacggtcagggtagctggtcctaagtgcggcggcgccgctcgacctcacagtgagatctcgatggagatgagggaaacagccacggcagggctctggggacttggggaaggactcgggcgtgttcagggcgacatggcgaacatgatcatgggcacaacaccggcgcgggggcaccagagggcgcagaacgcggtggggtggcccaacggcggcgcggatctactccgggacgcctcgggtcaaccgtggcggagctccgatagcacgacgagaactccggtgagcgcggactgggtgaaccgaggggtgtccgaggctgctgacgacgagatggaactcaccgaggtagcggacacggtggaggctcaacggcgaccacagatcgggcacgagaccacggtgagcggcggcggaacttcctggggctcaggcacgggggtcgtggccgagaaacacacggtcgtgggcacgtccacgacggagggcgcgagcgggaggttagggaagaggaaggggctgacgggcggggtctacctatcaagcgtggtgggcgcgtggggctgggcctga

SEQ ID NO: 3784 - DNA, 934 bp, Zea mays
  misc_feature (4)..(6): n is a, c, g, or t
  misc_feature (13)..(13): n is a, c, g, or t
  misc_feature (82)..(83): n is a, c, g, or t
  misc_feature (111)..(112): n is a, c, g, or t
  misc_feature (122)..(123): n is a, c, g, or t
  misc_feature (160)..(161): n is a, c, g, or t
  misc_feature (179)..(180): n is a, c, g, or t
  misc_feature (186)..(187): n is a, c, g, or t
  misc_feature (195)..(196): n is a, c, g, or t
  misc_feature (203)..(203): n is a, c, g, or t
  misc_feature (205)..(206): n is a, c, g, or t
  misc_feature (222)..(223): n is a, c, g, or t
  misc_feature (232)..(233): n is a, c, g, or t
  misc_feature (241)..(242): n is a, c, g, or t
  misc_feature (260)..(261): n is a, c, g, or t
  misc_feature (270)..(271): n is a, c, g, or t
  misc_feature (285)..(286): n is a, c, g, or t
  misc_feature (304)..(305): n is a, c, g, or t
  misc_feature (337)..(337): n is a, c, g, or t
  misc_feature (346)..(346): n is a, c, g, or t
  misc_feature (365)..(365): n is a, c, g, or t
  misc_feature (394)..(395): n is a, c, g, or t
  misc_feature (426)..(426): n is a, c, g, or t
  misc_feature (444)..(444): n is a, c, g, or t
  misc_feature (463)..(464): n is a, c, g, or t
  misc_feature (519)..(520): n is a, c, g, or t
  misc_feature (529)..(530): n is a, c, g, or t
  misc_feature (541)..(542): n is a, c, g, or t
  misc_feature (550)..(551): n is a, c, g, or t
  misc_feature (578)..(578): n is a, c, g, or t
  misc_feature (580)..(581): n is a, c, g, or t
  misc_feature (594)..(596): n is a, c, g, or t
  misc_feature (604)..(605): n is a, c, g, or t
  misc_feature (614)..(615): n is a, c, g, or t
  misc_feature (646)..(647): n is a, c, g, or t
  misc_feature (665)..(666): n is a, c, g, or t
  misc_feature (678)..(678): n is a, c, g, or t
  misc_feature (701)..(702): n is a, c, g, or t
  misc_feature (726)..(727): n is a, c, g, or t
  misc_feature (734)..(735): n is a, c, g, or t
  misc_feature (744)..(745): n is a, c, g, or t
  misc_feature (754)..(755): n is a, c, g, or t
  misc_feature (771)..(773): n is a, c, g, or t
  misc_feature (792)..(793): n is a, c, g, or t
  misc_feature (805)..(806): n is a, c, g, or t
  misc_feature (831)..(833): n is a, c, g, or t
  misc_feature (868)..(869): n is a, c, g, or t
  misc_feature (881)..(882): n is a, c, g, or t
  Probeset Number=SeqID_18187
gaannncccgggntcgaccccacgcccgtccggcaacccatagaaaggcacccaatattgtactcaataatcggcacgccannaaatattttgccctcatgtatgcctccnnttggtctttnnctgcaagtgccctgctacccggcgaggcccattttcnnccgcaatggcttcaacannagctcnnctatagcnnttccctntnncttcccccaatacccnntctcaccanngcgatgtnncttcacgtatcgtgaaannatccaattnncttccgccctacgnncgtcccgccaaccaggcnnaatcgcgagctggcctgcttaacctttttcancacccttgnttcctcccaccaatcatcncagcccttattacccgcagttaccctttnnggtgcatttattgggcaccaaaacatcaggngcacaacaactaccaacncaactcgtgctagcaaacnncttgctgcctactctcagcaacagcgagttaccttcttccatttcaacccaactnnaggttcatnntgaactctgcnnttcttatnnttgcaacaaccaacccaactaccattncnnagccagctacccnnngctgcctnnacccccagnncaatttctttccattttcaacctaactagcnnagcattgaacctctcctnngcttatttacgnagcagcaacccaactacctaccnnattcagcccagctttagctggtgnntgagccnnctgctaccnnttcttgacnnacaaccacagttgttnnngccgttcttacccagcacnngttgcgccttannacgctggcaccctctcttaccaacnnngcaacaattgctttgccattcaaaccaactttgcnntttgacaaaccnncagcagtgttctacccaaccaacccattcatttggtgggtgcccttcttttt

SEQ ID NO: 3785 - DNA, 412 bp, Zea mays
  misc_feature (405)..(405): n is a, c, g, or t
  Peptide Sequence Number=SeqID_9974
  Probeset Number=SeqID_18188
atgtcgggtttctccacctaaggcgaaacgttctcctcgtcgtctccttcacctccatctctgttggtcccttttccctcacaaccggcttcgtctccgtcaccagcgtgacttgactgtctccgccatcctccacgataactcaccttcgtctcttcctactcgacaaacccgaaatcgttttcacctcaatcacatccggcttcaactacaagttactctaatctggtctgatgatatacgtacgtgatattggcaagataatagtaacagttccacgacaacttttatggaaagaaaaacaactatttcttggtgaaacagttcggcagaggcaatgctaatgtttaatttagcaaagagagcaacaacctctacaaactcaactgttataggtttagcgtnccagaag

SEQ ID NO: 3786 - DNA, 3001 bp, Zea mays
  misc_feature (2960)..(2960): n is a, c, g, or t
  misc_feature (2964)..(2964): n is a, c, g, or t
  Peptide Sequence Number=SeqID_9975
  Probeset Number=SeqID_18189
cttctgggtgggcaaatttgtggtgagtggggtttgggggcgttctgtgttggtttcccccaatgttgggggcgtgcggtttccttccacttgctacatgggcagcagccagagccttttttggctatttaagtgccgtccacttccagagcctacggctttttaggttccgtccgaaagagtttagtaaagcaaatgtaccgggccccccctcgaggtggacgtgggcgcggggatcctcgccgtcgacggcctctcgctgctgctgctgctcgccgtcgaggtcgccttgtcaaattgctctgtagaatatttttgcgtatctacgtagatggggtgacctcttttgggcttattcagttgctacgtgatgtgagatcgagctcatttaagttaatatcgtgtctgccatcaagaggttttcgacttactaaattatcgcgaaagatcatttgtgttatgttcttgaccaaaaggggtgttttagtgtcaacttataatgtgtgtttatgaattattaagtcattagtgatttttttttttgaagtcattccacgaacttgagtcggagagagtggtactagttgattcctccaacttaaattgtagcaaactatgacctttaatagatgtaaaaaaatatagttagtaaggttaattaacattttgtgatggtaaccactagtctctgttatgcgaggaaacctaccactcaatgcatgagcagcagccagatccattttattttattaaagtagcgtttggttccagagcctacggctttttaggttccgtccgaaagattttagtaaatcaaataatgattcagcagttaagtataactttttttttaatttttagaatcactgtgttctatatggaatcaatctaccgcctacctacaggtcgtgagttgtgacgatcgaccgcacgcacgcgcggcgcgacacagcccgtgctcttcgtgcctcgctcatcatgcacgtgcgggtagcgcgcgtcccggcccaacgtttaaaagacggggcggccgatgtagatggctaaacggcacgcggggttcattcattcatatgcatggcatggcacgcatcaagcatacgacacgccactgaccgaccaaacgagtcaggccggaggagacagggaccaggcagccgcagccgccccggcacatggtctcgtacatggcctggacactggaggggatgggatgggtccgttgctgcaattcaattatgcgataacatcatcatcgcattaccattgtctaaaaaagccggcgctcgtcagaaaggaaatggcgtgacagcagcgggtgacagggtagatctggcagcgcagcgagcgacctcgatccgcccgtgcttcccatctacgacaactgcttcatcgaccgcgggctagcttcgatccaagcctgttgttgcttcaccaacaactcaactgatctggcatcatccacgcctcggattaatcgtggcattcttcatccattctgtcattcttcagctcacccttttagctacagtaccttccactgtttacaagtcgtccgattaattgttcaagtcggtttaaaccaatcacaattagtcgtccaagtcggtcagccgccagaatggtagcttctcaatatccactcccgttctatattccaaattgcaattgaaaggaaaacaacacaaaccatgctgagattaaaacagcgtccaccatccattaacctattctctcagagcgaaactacaaaatgacagttttcccccaacagcaaatggagtttacagacatcttcctcccccttcgtttcacttttccccctcactagcttcccatgtctccaaaaaccgagcacaaccgggggggaggggagataagtacgtggaggcagagaacaacataccagaaggatttgatgcagtggcttcaagagacaccaaagagctgctgactacaggacccttttatgtaatgcgcccacctgataatcgccatgtatccacgtcaaaataacacgtgtcaggttttctgttaaatcgtgatgtctccagatttgatgcagaaaaaaggcctctgacctccaggatggccgtgcttatttttgatgaataagcatgaccctattcccttcctacagctttgccatgctgccatggcgggagttcagatgcaatcacatgtgggtgagaacattgatcatttgttgtatgcagatacgacatagaaaggctgcatattttcttttacaaaaggtgtatgtgtattttctttctttttttttttgggggggggggggggggggccgccccccccccgcttccccctccttataagcgcccacccccgccccgccccccccgatctcttcccctttatcgccgggtctttccctggcttggtctaccagggcccaacctttgtccccaacccgttttccctcgccgccacctcctttccccattcccacccctctcccaaaccctccacagccccacccccccctcgcccctaacctcaaccccaacacccgtccctcgccgtctcacccccgttccttccgccccggccaaactcccccccccttctccctgtgttccattctcgtccaccccccccgtcagaacgcactcccgccctctccaatcccctctccccccctccccaccccacccccacccctcccccccccttcctccccccccacaatataccaccccccccccccatcacgacgccgtctctccgccaacccctccccatctccccggctcagcgccacaaggccttcccaccacgcagtctgtttccacccccccccataaacccctcacgggacccagattatcacccctcagtccaaatcaccacccccccccccgcaggctctcccacgttgccccccccccccccccccacccataatagcctcttctttacacccccaacccccagcgggntccncctaaaaaaaaacacccccccctcctttctttcttgt

SEQ ID NO: 3787 - DNA, 840 bp, Zea mays
  misc_feature (396)..(396): n is a, c, g, or t
  misc_feature (580)..(580): n is a, c, g, or t
  misc_feature (617)..(617): n is a, c, g, or t
  misc_feature (620)..(620): n is a, c, g, or t
  misc_feature (672)..(672): n is a, c, g, or t
  misc_feature (677)..(677): n is a, c, g, or t
  misc_feature (686)..(686): n is a, c, g, or t
  misc_feature (705)..(705): n is a, c, g, or t
  misc_feature (709)..(710): n is a, c, g, or t
  misc_feature (713)..(713): n is a, c, g, or t
  misc_feature (729)..(729): n is a, c, g, or t
  misc_feature (737)..(738): n is a, c, g, or t
  misc_feature (742)..(742): n is a, c, g, or t
  misc_feature (744)..(745): n is a, c, g, or t
  misc_feature (748)..(748): n is a, c, g, or t
  misc_feature (750)..(750): n is a, c, g, or t
  misc_feature (753)..(755): n is a, c, g, or t
  misc_feature (758)..(758): n is a, c, g, or t
  misc_feature (760)..(760): n is a, c, g, or t
  misc_feature (771)..(771): n is a, c, g, or t
  misc_feature (773)..(773): n is a, c, g, or t
  misc_feature (778)..(778): n is a, c, g, or t
  misc_feature (780)..(780): n is a, c, g, or t
  misc_feature (782)..(782): n is a, c, g, or t
  misc_feature (787)..(788): n is a, c, g, or t
  misc_feature (794)..(795): n is a, c, g, or t
  misc_feature (799)..(799): n is a, c, g, or t
  misc_feature (805)..(805): n is a, c, g, or t
  misc_feature (807)..(808): n is a, c, g, or t
  misc_feature (811)..(811): n is a, c, g, or t
  misc_feature (813)..(815): n is a, c, g, or t
  misc_feature (819)..(819): n is a, c, g, or t
  misc_feature (823)..(824): n is a, c, g, or t
  misc_feature (826)..(826): n is a, c, g, or t
  misc_feature (828)..(828): n is a, c, g, or t
  misc_feature (836)..(836): n is a, c, g, or t
  Probeset Number=SeqID_18190
gaagaaaattgaaaggagcttaataaacagaagccgttctccttcactttcgttcctctcacttccatacaacatttgaaacctcagctatgcctaaatcaaagcgagatagaccagtgactttgtctaagacgaagaagaaaggaagagagcataaggagtgtattgtgaatggaattagggaggctgttgaaaaatattcctctgtctatgttttctcttttgaaaacatgagaaatatcaaattcaaggagtttaggcagcagtttaggcacaatggaaagttcttcctaggttcgaacaaagtgatgcaggttgctcttggtcgttctgcagaagatgaactccgttctggtatctacaaagtctccaagctgcttcgttggtgatactggncttcttgttactgatatgccaaaggaagaagtccaaagcttatttaaccgcttatgaggattccgacttttcaagggaccggaagcatttgcagtacaaacggttgaactgaaggaggggccctctatacagttcacacatgagatggaccccttctttggaagcttgaaatgccttggccgantcgactaaggcaccgggcattgggcccgcggcctttngtntttcggcggggactgcatgacgacgtcctctcccttagcccccctctttgtnctctnggcgagatntggtggcttccctccgccncacnncgntggcatagcgaccccnccgccctnncccntnnttngncgnnncgncncctatggagancnctccncncncgttnnatgggnnttgnccctancnnctntnnntctncganntntntgtggtgngtcg

SEQ ID NO: 3788 - DNA, 641 bp, Zea mays
  misc_feature (29)..(29): n is a, c, g, or t
  misc_feature (44)..(44): n is a, c, g, or t
  misc_feature (123)..(123): n is a, c, g, or t
  misc_feature (146)..(146): n is a, c, g, or t
  misc_feature (148)..(149): n is a, c, g, or t
  misc_feature (151)..(152): n is a, c, g, or t
  misc_feature (157)..(158): n is a, c, g, or t
  misc_feature (601)..(641): n is a, c, g, or t
  Peptide Sequence Number=SeqID_9976
  Probeset Number=SeqID_18191
acaaggaggagcgaggggagtgccagggnatagaaagccagggnaaaagataaggagcaggatggatccaaatccaagaagccaaaatttgctgaacactccaagcccatatggtaccaatcnccctcaacgggggggggggatantnnannagttnnttgaggtgattgataaagagccaaacaagaatttcgtggttgagaagggacaggggactcctctgaaggatataccaagtgtggcacacagaatatcaaggaagaagccttctgatcttaaatttcttcacttgattcattttgggaggccaggcaaaacgggagcttttttagtgcatatactccacttctctggaactgtttggcatccttgggatttaaaccttccaagccaacattttaaaggaagatgttgtgtcaaagctcttggactttattgctgaacctcactctgcagccgaatcttggggctctgatgaccacggatcaaattctaaaaaacgcaagagaggaggtgaaagtgcaagttatacgcctgatgacacacctattaagtctaggaagaaatttgtcgatgaccgtacttttagtaaaaggcagannnnnnnnnnnnnnnnnnnnnnnnnnnnnnnnnnnnnnnnn

SEQ ID NO: 3789 - DNA, 786 bp, Zea mays
  misc_feature (7)..(7): n is a, c, g, or t
  misc_feature (10)..(10): n is a, c, g, or t
  misc_feature (26)..(27): n is a, c, g, or t
  misc_feature (35)..(36): n is a, c, g, or t
  misc_feature (50)..(52): n is a, c, g, or t
  misc_feature (67)..(67): n is a, c, g, or t
  misc_feature (70)..(71): n is a, c, g, or t
  misc_feature (82)..(82): n is a, c, g, or t
  misc_feature (88)..(89): n is a, c, g, or t
  misc_feature (100)..(101): n is a, c, g, or t
  misc_feature (109)..(109): n is a, c, g, or t
  misc_feature (112)..(112): n is a, c, g, or t
  misc_feature (117)..(118): n is a, c, g, or t
  misc_feature (125)..(125): n is a, c, g, or t
  misc_feature (136)..(138): n is a, c, g, or t
  misc_feature (146)..(147): n is a, c, g, or t
  misc_feature (153)..(154): n is a, c, g, or t
  misc_feature (160)..(160): n is a, c, g, or t
  misc_feature (163)..(163): n is a, c, g, or t
  misc_feature (169)..(169): n is a, c, g, or t
  misc_feature (172)..(173): n is a, c, g, or t
  misc_feature (178)..(180): n is a, c, g, or t
  misc_feature (187)..(187): n is a, c, g, or t
  misc_feature (199)..(199): n is a, c, g, or t
  misc_feature (201)..(202): n is a, c, g, or t
  misc_feature (220)..(221): n is a, c, g, or t
  misc_feature (226)..(227): n is a, c, g, or t
  misc_feature (235)..(237): n is a, c, g, or t
  misc_feature (243)..(243): n is a, c, g, or t
  misc_feature (250)..(250): n is a, c, g, or t
  misc_feature (252)..(253): n is a, c, g, or t
  misc_feature (261)..(262): n is a, c, g, or t
  misc_feature (276)..(277): n is a, c, g, or t
  misc_feature (288)..(289): n is a, c, g, or t
  misc_feature (299)..(300): n is a, c, g, or t
  misc_feature (310)..(311): n is a, c, g, or t
  misc_feature (323)..(324): n is a, c, g, or t
  misc_feature (334)..(335): n is a, c, g, or t
  misc_feature (350)..(350): n is a, c, g, or t
  misc_feature (353)..(354): n is a, c, g, or t
  misc_feature (433)..(433): n is a, c, g, or t
  misc_feature (467)..(468): n is a, c, g, or t
  misc_feature (477)..(478): n is a, c, g, or t
  Peptide Sequence Number=SeqID_9977
  Probeset Number=SeqID_18192
tcttggnagncgaccaacctttacgnngcttaacnnaacgatgattatgnnnagcgggttcaacagnatnntcctgtcaagnaagggnnagcctaacttnnccgcgacnctnaaagnnggcgtgnagggggttggnnnagcaaacnnaatatnntgttgnagntggggnatnnccagnnnaaatcgnagccccgtgtgnannaactttgcatgcgtgggnnaaacnncactggtnnntcctgnactatgncnnaatgtcannttcatcaaggggcnnaaatcactcannagccgtttgnnggcgcctgtnnggtgggacgagnnacagttcctnnacagttgtaaccagnagnncagagcctttcacaaccaggttattaattcattccgacttcaagggggtcctcactttatccggggagaaaacgcaagnggttacaggggcttttccccgatttacttaccgnnattgtttgnngcccgatcaagggagaaagtacattccagtcgggggcgcacgcgctgtccctgttgcccgggcactgggctactgtctggggcaagcctacctgggtgaatctgaggggagtgaccctctgtaccagctgcctccaagtttcacctctgttggaggacgcactgcggggcaggcgagggcctctcctgttggcacccctgcaggggaggtgcaacatccagcggcaggagcatttctggttcggttcgattcgggctcgtgcaacatccagcggcaggagcatttctggttcggttcgattcgggctc

SEQ ID NO: 3790 - DNA, 471 bp, Zea mays
  misc_feature (237)..(237): n is a, c, g, or t
  Peptide Sequence Number=SeqID_9978
  Probeset Number=SeqID_18193
aacgcgccgccccttttttttttttttttttttttttttcccccccccttttttttttttttttttttttttttttttttttttttccaccaccacactctagatggtaatgtacaaagggtggattacaagagttccattccatgcgagcgcgattgagttcgtccatccaacaaactagcgcagttattcatgctacacacagctcgcgtcccatgcgttcagaattttcagatnccagacgctggcacacccctcgatcaaaagagagaagagggcaggcaagaaaggttcagggtcgccagagctggcagagttaaggagccgtctgccggggtcgtcgtagtcttctccgctgaagagaagtcctgctcctcgtcgacctccacgtccaccgccgcctccacgtccgagagactggtgcagttgctgagcaagtatccttgaagaagccatttgcctagctggaat

SEQ ID NO: 3791 - DNA, 365 bp, Zea mays
  Probeset Number=SeqID_18194
gtgaaatgttaatgagattcagttagagtgtcccccccccccacaaaagaatgatctacagcatctaaaactttacgcagagtttcagggatacctcatagttattatcattattgtaacgaacacgcgagaatattgcgagcccacgtcagagctgcgtcattctggatttgcacgaggctacagggcggatgctggggcttgcacgtcgcgccgactcactcttttttttttaaccctggtagctagtactggtcgccgtagcagcacttgcagaaataccaaggagcataaggaggcaaaatattctggctgccattgttggtacactattgtgcattctatgttgctagcccacgcgtccg

SEQ ID NO: 3792 - DNA, 1474 bp, Zea mays
  misc_feature (1)..(873): n is a, c, g, or t
  misc_feature (1474)..(1474): n is a, c, g, or t
  Peptide Sequence Number=SeqID_9979
  Probeset Number=SeqID_18195
nnnnnnnnnnnnnnnnnnnnnnnnnnnnnnnnnnnnnnnnnnnnnnnnnnnnnnnnnnnnnnnnnnnnnnnnnnnnnnnnnnnnnnnnnnnnnnnnnnnnnnnnnnnnnnnnnnnnnnnnnnnnnnnnnnnnnnnnnnnnnnnnnnnnnnnnnnnnnnnnnnnnnnnnnnnnnnnnnnnnnnnnnnnnnnnnnnnnnnnnnnnnnnnnnnnnnnnnnnnnnnnnnnnnnnnnnnnnnnnnnnnnnnnnnnnnnnnnnnnnnnnnnnnnnnnnnnnnnnnnnnnnnnnnnnnnnnnnnnnnnnnnnnnnnnnnnnnnnnnnnnnnnnnnnnnnnnnnnnnnnnnnnnnnnnnnnnnnnnnnnnnnnnnnnnnnnnnnnnnnnnnnnnnnnnnnnnnnnnnnnnnnnnnnnnnnnnnnnnnnnnnnnnnnnnnnnnnnnnnnnnnnnnnnnnnnnnnnnnnnnnnnnnnnnnnnnnnnnnnnnnnnnnnnnnnnnnnnnnnnnnnnnnnnnnnnnnnnnnnnnnnnnnnnnnnnnnnnnnnnnnnnnnnnnnnnnnnnnnnnnnnnnnnnnnnnnnnnnnnnnnnnnnnnnnnnnnnnnnnnnnnnnnnnnnnnnnnnnnnnnnnnnnnnnnnnnnnnnnnnnnnnnnnnnnnnnnnnnnnnnnnnnnnnnnnnnnnnnnnnnnnnnnnnnnnnnnnnnnnnnnnnnnnnnnnnnnnnnnnnnnnnnnnnnnnnnnnnnnnnnnnnnnnnnnnnnnnnnnnnnnnnnnnnnnnnnnnnnnnnnnnnnnnnnnnnnnnnnnnnnnnnnnnnnnnnnnnnnnnnnnnnnnnnnnnnnnnnnnnnnnnnnnnnnnnnnnnnnnnnnnnnnnnnnnnnnggcacccccacccgcgcgccgtcggcggcggcggcctccttcccggaccgccggctacggccgtggggtcaagaggcgggggcgatcagtgtggcagcggcgtgctcatggaccttggacgcggcggacgctccacgtacaacagggagaacaggcctgctgcagatgtggtcgacagtcatacctgcgagtgagccatatagctagcgggctgcttcctctcgctagacgggactcatggctgtgccaaggcagagaccttcgatctcgtgagctgagttttactatactgttagttggtgatctctttgtgcagatcggtgcgtctctgcatgcgctgcactcgtaagtgtagttaatctttacatatcagtagtgctagttgtggatctgatgtgtttaatttaaattactggatttggtcgtcgttaggatgtgggtgagctgttgtgactaatgtacatacttgaaaagtttggaaccccttttctcttcttgcttttttacatatcagtatacgttattgttacctgttgtaactatatgtataagagactttcttgagaaatatactccctctgtcctaaaaaaaaaaaaaaan

SEQ ID NO: 3793 - DNA, 1433 bp, Zea mays
  misc_feature (1283)..(1284): n is a, c, g, or t
  Probeset Number=SeqID_18196
cattgggtacctcgaggccggccggggtcttgttctaccaggagtcgttaggcattccaatctgaactgtacttcctaaaacaaccagacactacaaactaccgcaaccatgggtaaggagaagtctcacatcaacgtcgtcgttatcggccacgtcgactccggcaagtcgaccaccaccggtcacttgatctacaagtgcggtggtatcgacaagcgtaccatcgagaagttcgagaaggaagccgccgaactcggcaagggttccttcaagtacgcatgggttcttgacaagctgaagtccgagcgtgagcgcggtatcaccatcgatatcgctctctggaagttcgagactcccaagtacaacgtcactgttatcgacgcccccggtcaccgtgatttcatcaagaacatgatcactggtacctcccaggctgactgcgccattctcatcattgccgccggtactggtgagttcgaggctggtatctccaaggatggccagacccgtgagcacgcccttctcgcctacaccctcggtgtgaagcagctcatcgtcgccatcaacaagatggacaccaccaagtggtccgaggcccgttaccaggagatcatcaaggagacctccggtttcatcaagaaggtcggcttcaaccccaagcacgttcccttcgtccccatctccggcttcaacggtgacaacatgatcgacgtctccaccaactgcccctggtaccagggctgggagcgggagaccaggtctggcaaggccaccggacagaccctcctcgaggccatcgacgccatcggcgccccccaagcgtcccaacgacaagccccctccgacttcccctccaggatgtctacaagattggcgggtattggaacggttcctgtcggccggatcgaaaatggtattattaagcccgggatggccggttacctttcgttcttccaaagttcccccttggaaggccaaggccgtttggaaggggccccacggaggcagtttttccttaaggggaaaacacccccgggggaaaaaacgttgtggtttttcccccccgggaaaaaaaaaaagttttttcccctccaaagagagaaccctcccccaacgggggggggaaaaaaaacccccccccccgggggggggggcccctcccccaaaaaaaaagaaccccccccccccccacgggagggggggggggcgggtttttttttttttttcccccccccccccgaaggtattatatttttttttttaaaaaaaacacacccccccnnaaaaaaaaaaaggggaggggtggtttataaaaacccccccccccccccccccacttttggtgtgacaacaggtgcggccccccatttttgttgggggggaaaaatcccccccccccggaacttcagaaaaaagaaaaaaaacccgcccc

SEQ ID NO: 3794 - DNA, 3567 bp, Zea mays
  misc_feature (1)..(26): n is a, c, g, or t
  misc_feature (3535)..(3567): n is a, c, g, or t
  Peptide Sequence Number=SeqID_9980
  Probeset Number=SeqID_18197
nnnnnnnnnnnnnnnnnnnnnnnnnnttgaggaatccgcctttgatataaagaacacgctcccgaatccctccccgccccctgtcgctcgctctccctgtctcccgcacgccgacccgcagccgccgccgttcgccatgggtttcctcgacgcgctctaccgtgtggtgatgcgccgcaacgccgtctacgttaccttcgtcgtcgccggcgctttcgcgggcgagcgggcggtggactacggcgttcacaagatctgggagatgaacaacctcgggaaaaggtacgaagacatatcggttttggggcagaggccagctgaggaatgataaattttggtcaccagtttgcttcggtttgaccgtttcattttggcacagtaataaacgatgtaaagcttacgctgctcctatgacctccttctcattcgtttactctgaaaatgcttttgtggggaaaaaaaaaaaaaaaaaatgcacttaaagacgatacaatgttaaaggtccctggttatgccaatcctgtacagtttggtgtattgatatcttttgcctatccgctcgaggaaggacttggtgagattgttgtagcaaccaccagaatagaaacaatgctgggtgatacagcaatagccgttcaccctgaggatgaaaggtataaacatctgcatggaagatacgctgtccaccccttcaatggccgaagactcaaaataatctgtgatgctgagttagttgatcccacttttggtactggggctgtcaagattacccctgcccatgatccaaatgactttgaagttggaaagcggcataaccttgaattcatcaatatcttcacagacgatggaaaaataaatagcaatggaggtgcaaaatttgatggaatgccaaggttcaccgctcgagttgctgttattgaggcgctgaaggaaaaggggttgtataaggacacaaagaagaatgaaatgagcttgggtgtttgttcaagaactaatgatgtagtggaacctatgataaaaccacagtggtttgttaattgcaaccacatggccaaggcgggccttgacgctgtaaggtcgaaaaagattgaaattattccccagcagtatgagcaagactggtacagatggcttgaaaatatacgtgattggtgtgtctcaaggcaactttggtggggacatcgtgtacctgcatggtatgtgacactagaggatgacctggataaaaaccttggttctgcaaatgatcgctggatagtcgcaagaaacgaaagcgatgcaaaccttgaagcgcagaaaaagtatgcaggaaagaaattacgtctagatcaagaccctgatgtgctggatacttggttttcatctggtcttttccccttaacagtactttggttgggcatctgataccgctgacctccgtgctttctaccctacatcggtactagaaactggacttgatattctcttcttttgggtagcaaggatggtgatgatgggaatgcaacttggtggtgatgtgccatttcagaaggtttatttacatcctatgattcgggatgcacatggccgaaagatgtcaaaatcacttggtaacgttgttgatcctcttgaggtgataaatggcatgtcgctggatggtcttctgaaacgtttggaagaaggcaatctggatccaaatgaattaaacattgcaagagatgggaagaagaaggattttcctgatggcatagcagaatgtggtaccgatgctctacgctttgcactgatatcgtacacttcccagtctgacaggataaatcttgatattaagagggtggttggatacagacagtggtgcaacaaattatggaatgccatccgttttgcgatgggcaaactgggtgaccattacattccgccggcaactgttgatgtgtctcttatgccaccaatctgcaagtggatactctcggtgcttagcaaggccgttgggaaaaccgtttcctctttagaagcatataagttgtctgacgcaacatctgctatatactcatggtggcagtatcagctatgtgatgtatttatagaagctatcaaaccttacttcttcaacgattctcaagagcttgaatcagcaagagctgcctccagagataccctgtggatttgcctggatactgggctgcgcttgctccacccattcatgccctttgtaacagaagagctctggcagcgtcttccacagcccaaagattcttgtaggaaaggttcgattatgatttcacagtatccatctcttgttgaggaatggagtaatggcagacttgaaaatgaaatggacatcgtcttggatgctgtgaacaaaataaggtctctgaagccaccaacagattcaaatgaaagacgtcctgcttttgcactttgccgaggccaagagatcgctgccacaatccagtgctatcaatctctaatcgtgtatctttcttccatatcacatctcaagatcctgacagagaatgatgaaactccagccgattgtgcaactgctgttgtcaacaaagacttgtctgtgtaccttcagctccaaggagctttaaatgcagacgctgaacgtgaaaagctaaagaagaaaaaagatgagattcaaaagctacagaatgcactggcgcagaaaatggacgcctctggctatcgcgagaaggctccacagagcgtacaggaggaggacatgaggaagctcaccgctttgttggagcaactagaggtcatcagtgaagctgagaagaaattagacgcgaactgagtttgacctctgtttcgaagaggccttgcttgtaccgaagctgaccccatatttttcttgtttgcaaaaaagctcagttatgtgcctgtacgctcgggctcaggtttacagttgatggttcaaatggaagccacatttttgcagcttgtcaagggtgcactggctaatacagaagcatatttattttgtcaagtgaggaacttttgatgatgaatgatgatgcatatggattaggttttcaattgatggttcagatggaagccacacttttgcagcgtgtaagaatattcactggctgtacagaaccatatttttgggtgttcgattttttcaagttagaaacttctgatgatgcatatgggaagtctgtcagaatatgcagcagccgaaatctgttaatcaaatttattagaaaaaaaaaaaaaataaactcgcgccgggggcgccgcgtgcccgagagctgcttcccattcatgtgcggcgctcgatgcggccagggaatttcgtggtgcatggctgaaatctgttatatagagcatatgcaaatacgtctagaggattcctctctctgcccagttcgacattatccgtgcacgtatcctgccctttcaaaatgacaaaggtttctacggactaatttttagcctttctgttttagtccttaaattattaaatacagtgactaaaagagagattatctctattttagtccttatgtttggcaatttagagactaaggtgtcgtttgattcnnnnnnnnnnnnnnnnnnnnnnnnnnnnnnnnn

SEQ ID NO: 3795 - DNA, 544 bp, Zea mays
  misc_feature (273)..(273): n is a, c, g, or t
  Peptide Sequence Number=SeqID_9981
  Probeset Number=SeqID_18198
ccgatttaggcccgccgctactgttatttcgagagaatttttgggctagcggggtgtgaacagaaacttggtgccccgctgctctgccttttgtcgtccactgtttcgcgtcaattctcgcgcgaaaagggatgggcactggagaggggtcgccgccggcgaggcggggcatcagcggtaggcgccgtcgatggccggacggagaggacgacgacgagtatgtgctggatgaggaagaaggagagggataccaaacgcagatgtattcaccgngtcgtcccggcaccaccggtggcggtccatggatcggccgcgtgaggcttacgaaggccccggagtacgccgcggggttgccgatgatgtgccggctgtcggagccccaggagtgcagcatcttctccggcggcgaccaggggggggtaccatggttaatgcgagtcggggcgcggtgcaggactcagcatgtgtactgtgcgcttgcttgtccggtgttttgtagctgtgtggttgggtaaaccttggggttccctattttaatgggttt

SEQ ID NO: 3796 - DNA, 906 bp, Zea mays
  misc_feature (814)..(906): n is a, c, g, or t
  Peptide Sequence Number=SeqID_9982
  Probeset Number=SeqID_18199
tgcagcaaagctactcgtatacgatttcgttgagctgggcagcttggactgctaccttcatggagatggacaagaggaccagccgttgaactggaacgcgcgtatgaagatcgcccttggctcggctcgaggcctggcatatctgcaccatgattgctcgcctgggatcgtgcacagggacatcaaggccagcaatatcctgctggacagaagcttggagcctcgtgtctctgattttggacttgcaaagctgcttgtagacaatgccgccgcccatgttaccactgttgtggcgggcacctttggatacctagcaccagagtacttgcaaaacgggcatgctactgagaaatcagacgtgtatagctttggagtgcttttgctggagctagtgacgggaaagaggccaaccgattcatgcttcatcaagaagggactgaacattgttggctgggtaagcagtgttctttctttctttcttttttttacctttttttaccccctttacctcgtcatgttggctgggttttctgcagctcaacaccctaactggggagcaccggctggaggatatcatcgatgagcgatgcggcgatgtggaggtggaaaccgtggaaaccatcctgggcatcgcaaccatgtgccccgacgcagacccggggcagcggccatcgatgagcgctgtcctcaagatgctggaggaggagatcttgtccccctgcatgagcgagctgtgctacgagcagcacctggagctctgagctgaggaggaagatggtgctggctgcgtgcgtgaagcgtcatggatgagacnnnnnnnnnnnnnnnnnnnnnnnnnnnnnnnnnnnnnnnnnnnnnnnnnnnnnnnnnnnnnnnnnnnnnnnnnnnnnnnnnnnnnnnnnnnnn

SEQ ID NO: 3797 - DNA, 1462 bp, Zea mays
  misc_feature (1113)..(1462): n is a, c, g, or t
  Peptide Sequence Number=SeqID_9983
  Probeset Number=SeqID_18200
ccggccgggccgggagagcaaagcatagtcacctgcctatctatctagcgagagagagagaggaaagctagctagctagcatggagtgcggcagcaagaaggcagcaggcggtgtgttggcgctgctgcttctccagctggtgttagctccgacgacggcgacggcccgcctcctgcaggcggatacctccaccgtggttggcctggacatcatcgcgagggagtttggccatccagtgagaggcatcctctgtggtgaaacctgtgtcttcctaccatgctatacggcagccatgggttgccaatgcattggccaaatctgcatgatgtgatatctggactagcgctatttgtaatttgtgttgggagaaacacaaggacggtacggtggtgttcaacttattgcatgtgtatggtgatctaataagtaaagtataataaaaagggatatgttggatgtgtaaaaaaaaaaaaaaaaaaaaaaaaaaaaaaaaaaaaaaaaaaaaaaaaaaaaaaaggccccttcgtcctcctcttggtgtcgtccgtcgccgctttcgccgccgccgaccacggcctcacgcacatccacctgtacgtgcacgagacgtacaccggggcgaacgccacggccgccgccgtgctgcagtccccgctgggcgccaactcgtcgttcgggagcatgggcgtggtggacgacgagatacgcgtgggcccggaccggtcgtcgcagctcgtcggccggtaccagggcgtcttcttcggcacgagcgtgcagctgggcgccggctacctgtcgtccatcacgctggtgttcaccgccggcgagtacaacgggagcaccctgtccgtgcaggggcccctgctcgggttcacgggcaccatcgagcgcgccgtggtcggcggcaccggcaagttcaggctggcgcgcgggtacatgctttcatgagccgacgcggagacggacgtcaacgagatctgtcgtgcttggcaagtactagcgcacacaccttgcggcgagtacaacgggagcaccctgtccgtgcaggggcccctgctcgggttcactggcaccatcgagcgcgccgtggtcggcggcaccggcaagttcannnnnnnnnnnnnnnnnnnnnnnnnnnnnnnnnnnnnnnnnnnnnnnnnnnnnnnnnnnnnnnnnnnnnnnnnnnnnnnnnnnnnnnnnnnnnnnnnnnnnnnnnnnnnnnnnnnnnnnnnnnnnnnnnnnnnnnnnnnnnnnnnnnnnnnnnnnnnnnnnnnnnnnnnnnnnnnnnnnnnnnnnnnnnnnnnnnnnnnnnnnnnnnnnnnnnnnnnnnnnnnnnnnnnnnnnnnnnnnnnnnnnnnnnnnnnnnnnnnnnnnnnnnnnnnnnnnnnnnnnnnnnnnnnnnnnnnnnnnnnnnnnnnnnnnnnnnnnnnnnnnnnnnnnnnnnnnnnnnnnnnnnnnnnn

SEQ ID NO: 3798 - DNA, 818 bp, Zea mays
  misc_feature (432)..(432): n is a, c, g, or t
  misc_feature (581)..(581): n is a, c, g, or t
  misc_feature (587)..(587): n is a, c, g, or t
  misc_feature (595)..(595): n is a, c, g, or t
  misc_feature (599)..(599): n is a, c, g, or t
  misc_feature (601)..(818): n is a, c, g, or t
  Peptide Sequence Number=SeqID_9984
  Probeset Number=SeqID_18201
taaaataaggccgcccgggggaattcggcccgaggagggagggagggagagagcgcgagagggcccaaggccccccccccccccagaagatgaagcttatgcttcaactgtacgaagagatgattggagagtctcccaaacgtgagaaaacagctaagagcgactctttatccaacggaaaggcgactactactactactactacatactagtgtactgagatcatctgaaactgagaagcacagctctgatggagatggcgacaaggtggttggagggtcggcatttggctggaacttcataacctctggagggccaggcactgaacctgtttattctggaatgtcaaaggaagaataccagaagctctcacccaattatgcaagtggaggcagagcttgagttgcccaacacattgtaaggtttgttagnggagttgggataataatattcactttgcgtatccgttcatccccatgtttaataagtataaaatgaaagaatggattaggttctacccatgaagccttaattagcaaaagcaaaaaaaaaaaaactcggggggggccggagcggggggnccggtncccaattntgcncnnnnnnnnnnnnnnnnnnnnnnnnnnnnnnnnnnnnnnnnnnnnnnnnnnnnnnnnnnnnnnnnnnnnnnnnnnnnnnnnnnnnnnnnnnnnnnnnnnnnnnnnnnnnnnnnnnnnnnnnnnnnnnnnnnnnnnnnnnnnnnnnnnnnnnnnnnnnnnnnnnnnnnnnnnnnnnnnnnnnnnnnnnnnnnnnnnnnnnnnnnnnnnnnnnnnnnnnnn

SEQ ID NO: 3799 - DNA, 1917 bp, Zea mays
  misc_feature (1917)..(1917): n is a, c, g, or t
  Peptide Sequence Number=SeqID_9985
  Probeset Number=SeqID_18202
ttccactgctttgacggcgagaacgtggagagtgctcctcctcctatgaagaaggactacaaactggctaatcttctatgctgggaggaggaagcggatgccatggaggagaaggcgggagtgcttgatgagtaagacgggcttctggggtcgatttgcttctgagttgtttattttatatcgtcgcaatttcgtggttgtcgtttggttattctgtgaagcagccaagccaagctattgttatgaaaatttgtcgtctgtaagcatgtgaacttccgacgttgccacatgctggatcagtgctcgggccgggacatccgccatccgccgcttcgtcccaaatcccttttggcgggagacgagcagcaggctgcctccacttcccgcgcaaagcagtaaatcggagtaaccatggacggcggatcctccacaccggcgagccccccaccgacggtatccgcgtcggcggcgaatatggaggagtaccggaactggaagaagaacgcggcggtgctttacgacctcgtcatctcccacccgctcgagtggccatcgctcaccgtgcagtggctcccatcggagtcctcggcccgcagccaccggctcgtcgtgggtacgcacacctccgacgaggcccccaacaacctcatggtcttggacgcggtgctaccgctcccacctcgcctcgctgcagccgtcgctgcctcgggcggcgccgtcccgttcccatccgtatccgtctcgcgcgtggcgccacaccgtggcgaggtcaaccgcgcgcgctgcatgccgcagcgtccctatacggtggccaccaaaacgtgcgtcgacgaggtgcacgtgtaccatctcggcgatgacgacggcagcgggaagagcggcgcccgaagttgtgctcaaggggcatgaggcggagggttatggcttgtcatggagcccgatgaaggaggggtggctgctgagcggctcgtatgataagaagatttgcttgtgggacatctcctctgggagtggcgctcctgttctggatgcacaacaggtgtttgtggctcatgaggatctcgttgaagatgttgcttggcacctgaaggatgaacatatatttggatctgttggggatgactgtaagttgatgatgtgggacttgcgtacaaacaaaccagaacaatctattcttgcacatcgaaaggaggtcaactctttgtcattcaatccattcaatgaatggatattggctacagcatctggagacacaactatcaacctatttgacatgcgaaaactatcgagaagcttgcatacttttgacagtcatgaggcggaggtgtttcaggttgaatggaatccaaatttggccactgtattagcttcatctgccgcagacaagagagtgatgatatgggatattaataggattggcgatgagcagtcagaggaagacgcagacgacggaccaccggagctgctgttcgttcatggaggccacacagacaagatatcagagctgtcgtggaatcctagcgagaaatgggccattgccagcgtgtctgaagacaacatcctgcagatatgggagatggcagaaagcatatactgtgatgacctctccatgcaggttaactgactcgtgcctcgaagcataaaggtgagttacctgaagcatctcctatcatagtgggcatctataagaactctttaaatccgtgacatgcattaggctatctccagcagatctcctatcacatcctttatgttatcccctattttcaaacttctctctgcaaagagtcagttattgacttgagtaatcttgatagtctgaatctgattgagcctttaggcataaatgtaactttgaaattgtagggtcagggttgacttcttttccagtttggaacttactactccctgcagttn

SEQ ID NO: 3800 - DNA, 705 bp, Zea mays
  misc_feature (445)..(445): n is a, c, g, or t
  misc_feature (463)..(463): n is a, c, g, or t
  misc_feature (497)..(498): n is a, c, g, or t
  misc_feature (507)..(507): n is a, c, g, or t
  misc_feature (517)..(517): n is a, c, g, or t
  misc_feature (523)..(523): n is a, c, g, or t
  misc_feature (525)..(525): n is a, c, g, or t
  misc_feature (535)..(535): n is a, c, g, or t
  misc_feature (539)..(539): n is a, c, g, or t
  misc_feature (541)..(542): n is a, c, g, or t
  misc_feature (544)..(545): n is a, c, g, or t
  misc_feature (547)..(547): n is a, c, g, or t
  misc_feature (549)..(549): n is a, c, g, or t
  misc_feature (551)..(552): n is a, c, g, or t
  misc_feature (554)..(555): n is a, c, g, or t
  misc_feature (558)..(559): n is a, c, g, or t
  misc_feature (562)..(562): n is a, c, g, or t
  misc_feature (567)..(567): n is a, c, g, or t
  misc_feature (570)..(571): n is a, c, g, or t
  misc_feature (573)..(573): n is a, c, g, or t
  misc_feature (575)..(578): n is a, c, g, or t
  misc_feature (580)..(581): n is a, c, g, or t
  misc_feature (585)..(586): n is a, c, g, or t
  misc_feature (588)..(592): n is a, c, g, or t
  misc_feature (594)..(594): n is a, c, g, or t
  misc_feature (597)..(598): n is a, c, g, or t
  misc_feature (601)..(602): n is a, c, g, or t
  misc_feature (604)..(604): n is a, c, g, or t
  misc_feature (607)..(607): n is a, c, g, or t
  misc_feature (610)..(610): n is a, c, g, or t
  misc_feature (612)..(613): n is a, c, g, or t
  misc_feature (615)..(622): n is a, c, g, or t
  misc_feature (624)..(704): n is a, c, g, or t
  Peptide Sequence Number=SeqID_9986
  Probeset Number=SeqID_18203
acaattggtaccgggccccccctcgagtcgcgcggcttcgccgtggatcgcgcgttcgccggtgtagccactgcgctgcgtgcgcgcgccggaaagacgggcggtccgcgcgtcgcgatcttggcggagtacgacgcgctcccggagatcggccacgcgtgcggtcacaatctgatcgcggcagcgggggtcggcgcgttcctcgcggcggcgtccgtcgcagcagaggcgggcggcgaggtcgtgctcttcggtacgcccgccgaggagggcggcggcggcaagatcaagctcatcgaggccggcgcgttcgaaggcatcgacgccgcgatgatgttccacccgttcgatcgcgacatcctcgcgcatcccgcactcgcgtcttactggtactcgttcacgttccacggcaagcccgcgcacgcggcagcggcgccacacgcangaacagcgcgctcactgnatgcatggacacgctgccctcatcgacggacagnnatgcacatnccccatggantgcgcntncatggaatgnaaananngnngncngnngnnaanntantcccnaanntncnnnngnnaggnnannnnncnccnnaanngnaanaantnnannnnnnnncnnnnnnnnnnnnnnnnnnnnnnnnnnnnnnnnnnnnnnnnnnnnnnnnnnnnnnnnnnnnnnnnnnnnnnnnnnnnnnnnnt

SEQ ID NO: 3801 - DNA, 453 bp, Zea mays
  Peptide Sequence Number=SeqID_9987
  Probeset Number=SeqID_18204
aaaaataatggcaacgactgcatctccaatggcgagccagctaagattaagcttctgttctgctactaatgtgaggcgtctcgctgttcctaagggcgtatccggggctcctttcggcgtttcaccgaccaagaaaacgttttctttcaccgtccgagctctccagtcagacaagccaacattccaagtggtccaaccaatcaacggagatccattcatcggaagtttagaaaccccagtgacgtcaagcccattgatcgcgtggtatctctccaacctcccggcttaccgcacggccgtcaaccctctcctccgtggtgtcgaagtgggtttggctcatggtttcctcttagtgggtccgtttgtcaaagcaggtccattaaggaacactgcttacgctggctccgccggctctttggccgctgctgggcttgtagtcatcctcagcatgtg

SEQ ID NO: 3802 - DNA, 617 bp, Zea mays
  Peptide Sequence Number=SeqID_9988
  Probeset Number=SeqID_18205
atcgatctatctatatccgtgtatcgtcgttgaagctgtgcggctgtggtccggtggaagccagctgcctagcggaaggtcggcggctgcctgcctcgctgatcgcgatggagcggcggggcagcagcggcgcggggagctgcctggggctgctggcggtcgccgtggtgtcgacgagcgtcatcctcgtctcctaccgcctccaccgccgcctggaggcggacctcagggtcatgatactcggcgaaggcgacggagccgcggaccagggccggcgccgcacgaagaagaacaagaaggtgcgcttcgcggccgacgtggcggagccgtcgtccagccgagaggagtaccggcggcggcgggcgtcgacggcggcggcggtcacccgagcaagatagcacgccgccgccgcgcgtcagcctgacttgtggtgcatggctgtgtagcttgcgtgacgtggcggcatgcacgttcagctgccgtacgtaagccgttgcggtttccgtgggctgtgtgcgccggtgtgctgccttgttcagtgcgaatcgacgcgtgtgctttgcatgccgtatgagacatacaactcggaacaaaccaactcgatcttttcaggcccc

SEQ ID NO: 3803 - DNA, 1261 bp, Zea mays
  misc_feature (1261)..(1261): n is a, c, g, or t
  Probeset Number=SeqID_18206
agggctgtccatggcggcgagccgccgcctcctccatctcccggcgcggctggagctgtgcctgcggtcccgtgcccttagcatcccctcgtcttcgcgggcacaggggatggctcgttgcccgcgcgagcttgcgtgcccgaagcttgtgagctgccgacaaggtgtttttgaggaggggaatgcagccagggataaggccttgccgagtccagataaagtgctccgtcattgcaactacgccaatggcagggccctagacctagagcccattgaaaagaacttcgccaacgagtctatgcaattttctttcgaagaggaaagggacgatatggtgggcgtaatgagcgaaagcgtggcgagggaggttgagaaagctgcaaatgcattgcgcgctgcgagaggtttcactgtctcgaatctttggaagaaactacgaagtaagaagctgactttaggtagaattgatgtagtgaaagctaggttcgagataaggggtatgctgaaattgggtttttatgctcaagcattttcgctgtctcggtggttaacatcaaaatggggcccaagacgaataaaactgacactacaccagaagggagtgcgaataacacaggcagttcaccaaaaaagtatcgttttggcggaggttgatcagcccgcgaccggtggcttccaggaacatggcgaccatggcaaggaaagcaggttcggcaagacaaaagcatccaggcagcgcgagtagagttagacgctggagaagtgtcgggggaggatgctgaggtcgctacagagccgacgttcgagctgggcgaggttgcttggggttatcaggatgctcagggctcagaacactgcacccttgcgcaaccgacgagctcagaggccacaaacgtgtcaatttcgaactgacaagtggacgcggatgctgcctggtcttaggtagatgtgctctctttttttagggagcctgctatactaactgtctgcgttcttaggtaaagggcaggtaaaagtgggggggaccacgcggatggtccatacacgcaggggctttggctaacggtgagtaacataaacagagtaaaaaaatcatgtagaacattgttatgctaacatatcaaaacaggatatgaaaagttgagtgttaagaaccaattagattagagttagtagtctcagctgacaaagtaggaactaggcattagaactaactgtctgtttaatcatatatgcataaatgtgcaagatcgatcaatgn

SEQ ID NO: 3804 - DNA, 380 bp, Zea mays
  Peptide Sequence Number=SeqID_9989
  Probeset Number=SeqID_18207
ttagtggcacatcaccagagtagacataagctcatctgaaaactttctacaaagaggcaggaagcctctgtctctcagtagagcattctgctggtcatgccttgcatagtctttagtcaatggacaacttcaaagctctgcatatggctctagggaagattgaagaatcaaatacactggcactgctaaccttcgagccggcactaacaaaattcccatgctaactgttgcctgaggattgccgaatgtaggagtgcattatgagacgtggaacactgatgttgataggcctgttgtgcttcataagctggactgaaagccacgagaccttacttggcagactagagcctatcaagtcagccgagtgctacttgagctac

SEQ ID NO: 3805 - DNA, 717 bp, Zea mays
  misc_feature (1)..(47): n is a, c, g, or t
  misc_feature (648)..(717): n is a, c, g, or t
  Peptide Sequence Number=SeqID_9990
  Probeset Number=SeqID_18208
nnnnnnnnnnnnnnnnnnnnnnnnnnnnnnnnnnnnnnnnnnnnnnncacgtgtcctgtcgtgtcttttttttttattcgatcagttcgttcatcgccttttatttcggccattttgtgctgtgtgtgcgactgtgcgctgtaccagctcgaaggaatggcccaacccggtgtcgaaaaactgctacggcgagacggcaccggcgaccgggctcaactcgaccggccaggcctcgggccaggaccaggtgatccaggccgtgctgcggggcatgaagagccccgtccgtctcctcgacatcacggcgctgtcggcgatgcggaaggacgcgcacccgtcggcatacagcggcgacttctcgccggcgcagcgcgcgcgccatcgaccgtccggggcaccgtcccgcgcccagatccggcggcgaacgccgcgcccaggcgcggagattgaggagcgaggagaacccgcgagtacgggcacgaaggcagcggcgacaaaagggagcacgacgcggggccgcgggagcgttaaaaaggggaaggatcgcgagcgggcagcggcggtggcggcaagcgggggacagacggaagaggggagggggtggtgactggtgagggcctcggcaccggcgcgggcggctcggcaccnnnnnnnnnnnnnnnnnnnnnnnnnnnnnnnnnnnnnnnnnnnnnnnnnnnnnnnnnnnnnnnnnnnnnn

SEQ ID NO: 3806 - DNA, 1302 bp, Zea mays
  misc_feature (1)..(561): n is a, c, g, or t
  misc_feature (1287)..(1302): n is a, c, g, or t
  Peptide Sequence Number=SeqID_9991
  Probeset Number=SeqID_18209
nnnnnnnnnnnnnnnnnnnnnnnnnnnnnnnnnnnnnnnnnnnnnnnnnnnnnnnnnnnnnnnnnnnnnnnnnnnnnnnnnnnnnnnnnnnnnnnnnnnnnnnnnnnnnnnnnnnnnnnnnnnnnnnnnnnnnnnnnnnnnnnnnnnnnnnnnnnnnnnnnnnnnnnnnnnnnnnnnnnnnnnnnnnnnnnnnnnnnnnnnnnnnnnnnnnnnnnnnnnnnnnnnnnnnnnnnnnnnnnnnnnnnnnnnnnnnnnnnnnnnnnnnnnnnnnnnnnnnnnnnnnnnnnnnnnnnnnnnnnnnnnnnnnnnnnnnnnnnnnnnnnnnnnnnnnnnnnnnnnnnnnnnnnnnnnnnnnnnnnnnnnnnnnnnnnnnnnnnnnnnnnnnnnnnnnnnnnnnnnnnnnnnnnnnnnnnnnnnnnnnnnnnnnnnnnnnnnnnnnnnnnnnnnnnnnnnnnnnnnnnnnnnnnnnnnnnnnnnnnnnnnnnnnnnnnnnnnnnnnnnnnnnnnnnnnnnnnnnnnnnnnnnnnnnnnnnnnnnnnnnnnnnnnnnnnnnnnnnnnnngactagtccaccctggctagcaggacctgtgaggctgtgactgtagcccctagctctcatgactgctctagcctggcaaatttgccttagacttctctctgatggcatccatgctccggtatcggggctataagagcgacgacgtatggggacgaggaggctatgtgcacaggataggaataacaatcacgtctcctgcttcaactcgagtccacataccaatgcgtggcacattcatgcgcacaacctccagtaaatcatgcaccagtaagtgcactgcggagacccttgacaaagtggccttggagcttctcctagtcgtccctctaggtccaatccaatcaacgttgaagtatctaatttataaagagcaggaaatatgttagaactattccatgggttacaatttaatatatgttgttgaaaacaatcactaagatcatgacaaccaagtctgattgcttctttaattttgtaaaatctaggatgatgtcctctaccctcttctttgccttgccatatgtattgataggtttctgtttaggcagtttcctgaaatggtgttttgctctaggacaatatcgcggttattgaaccttaatatatcgtgtccctgggatgtgtttttttttttgccactttataagtaatttcatttggatgagacttaattctggtttgactccttacattgttaactcttgacccgagaggagtgccttcccnnnnnnnnnnnnnnnn

SEQ ID NO: 3807 - DNA, 297 bp, Zea mays
  Peptide Sequence Number=SeqID_9992
  Probeset Number=SeqID_18210
cattcaaggatgttcaactgttggaaaggtcgttttttttttagcaataggatctgcacattgccaccctcttgaatttcaaaacaagccagccctggggaaaaacaaaaccaaaaacaaaaggcggcggcgcctcctccacaccacggtcaaaccagcacgccgggaacccgcggggcatgatgacaatggataaccaaagaagaaggcagcccgccgagcgagctataaagctttttggcttgggcgggggaggaccaagggcccaacaagaaattcaggaggacttggttgaaa

SEQ ID NO: 3808 - DNA, 581 bp, Zea mays
  misc_feature (10)..(11): n is a, c, g, or t
  misc_feature (14)..(14): n is a, c, g, or t
  misc_feature (16)..(16): n is a, c, g, or t
  misc_feature (18)..(18): n is a, c, g, or t
  misc_feature (38)..(38): n is a, c, g, or t
  misc_feature (42)..(42): n is a, c, g, or t
  misc_feature (45)..(45): n is a, c, g, or t
  misc_feature (47)..(47): n is a, c, g, or t
  misc_feature (57)..(57): n is a, c, g, or t
  misc_feature (65)..(65): n is a, c, g, or t
  misc_feature (97)..(97): n is a, c, g, or t
  misc_feature (116)..(116): n is a, c, g, or t
  misc_feature (139)..(139): n is a, c, g, or t
  misc_feature (218)..(218): n is a, c, g, or t
  misc_feature (226)..(228): n is a, c, g, or t
  misc_feature (252)..(252): n is a, c, g, or t
  misc_feature (255)..(255): n is a, c, g, or t
  misc_feature (282)..(283): n is a, c, g, or t
  misc_feature (306)..(306): n is a, c, g, or t
  misc_feature (315)..(315): n is a, c, g, or t
  misc_feature (326)..(326): n is a, c, g, or t
  misc_feature (328)..(328): n is a, c, g, or t
  misc_feature (331)..(331): n is a, c, g, or t
  misc_feature (335)..(336): n is a, c, g, or t
  misc_feature (338)..(339): n is a, c, g, or t
  misc_feature (351)..(351): n is a, c, g, or t
  misc_feature (355)..(355): n is a, c, g, or t
  misc_feature (362)..(362): n is a, c, g, or t
  misc_feature (366)..(366): n is a, c, g, or t
  misc_feature (370)..(370): n is a, c, g, or t
  misc_feature (373)..(373): n is a, c, g, or t
  misc_feature (378)..(379): n is a, c, g, or t
  misc_feature (388)..(389): n is a, c, g, or t
  misc_feature (392)..(393): n is a, c, g, or t
  misc_feature (398)..(398): n is a, c, g, or t
  misc_feature (401)..(401): n is a, c, g, or t
  misc_feature (405)..(405): n is a, c, g, or t
  misc_feature (410)..(410): n is a, c, g, or t
  misc_feature (413)..(413): n is a, c, g, or t
  misc_feature (416)..(417): n is a, c, g, or t
  misc_feature (424)..(426): n is a, c, g, or t
  misc_feature (442)..(444): n is a, c, g, or t
  misc_feature (448)..(448): n is a, c, g, or t
  misc_feature (451)..(452): n is a, c, g, or t
  misc_feature (460)..(460): n is a, c, g, or t
  misc_feature (464)..(464): n is a, c, g, or t
  misc_feature (470)..(470): n is a, c, g, or t
  misc_feature (475)..(475): n is a, c, g, or t
  misc_feature (479)..(479): n is a, c, g, or t
  misc_feature (488)..(488): n is a, c, g, or t
  misc_feature (493)..(493): n is a, c, g, or t
  misc_feature (501)..(501): n is a, c, g, or t
  misc_feature (504)..(504): n is a, c, g, or t
  misc_feature (508)..(508): n is a, c, g, or t
  misc_feature (514)..(514): n is a, c, g, or t
  misc_feature (518)..(520): n is a, c, g, or t
  misc_feature (525)..(525): n is a, c, g, or t
  misc_feature (532)..(532): n is a, c, g, or t
  misc_feature (540)..(541): n is a, c, g, or t
  misc_feature (548)..(549): n is a, c, g, or t
  misc_feature (552)..(552): n is a, c, g, or t
  misc_feature (559)..(560): n is a, c, g, or t
  misc_feature (563)..(565): n is a, c, g, or t
  misc_feature (568)..(569): n is a, c, g, or t
  misc_feature (573)..(573): n is a, c, g, or t
  misc_feature (577)..(577): n is a, c, g, or t
  misc_feature (580)..(580): n is a, c, g, or t
  Probeset Number=SeqID_18211
gctctttttnnccncncncccccgggctgcaggaattntccnccngntgccgatagncacccccnccccccgatccttgaagctttgtttcatctgntgttccctgtgaccatggntactccatctctcaatgtcatcnaatcctctcacctcccgccattgttaccgtctccacttatcttctacttcgttcaagggaaatgtaagtgttttggggnaaaacccnnnacagattctatctctgaaactccnacngacccttaaaacgagaaaccaacagcnntttgcgagaccccttgttgtggntagccaaanggcgggtacantnggncgannanntgtacctccggngagnttccgtntggntaantcntggannacagccagnntcnnggaanaanccgntgaanaanggnnagaggtnnntctgccggacaaggannnaganganntctttgantatnataggnccttnaaancaagatcgngggcntgggattncgnaganggcttngaannnaggancaactgnctcatttnntcgttcnntantttcccnnaannntgnnaggnaatncgnt

SEQ ID NO: 3809 - DNA, 1054 bp, Zea mays
  misc_feature (1)..(97): n is a, c, g, or t
  misc_feature (109)..(109): n is a, c, g, or t
  misc_feature (876)..(876): n is a, c, g, or t
  misc_feature (1054)..(1054): n is a, c, g, or t
  Peptide Sequence Number=SeqID_9993
  Probeset Number=SeqID_18212
nnnnnnnnnnnnnnnnnnnnnnnnnnnnnnnnnnnnnnnnnnnnnnnnnnnnnnnnnnnnnnnnnnnnnnnnnnnnnnnnnnnnnnnnnnnnnnnnnagggttcgatcntgggttagcctctcacgatgccgccagcccccaagtccggcgacgccctcttcgccagcgtggatcgcgtcaatgcggagctgttcacgctcacgtacggcgccatagtgcggcagctgctcacggatctggaggaggtcgaggaggtcaacaagcagctcgatcaaatgggttacgacattggaacacgattggttgatgagttcttagcgaagtcaaatgtatcaaggtgtgttgacttcaaggagactgccgatgttattgcgaagcttggcttcaaaatgttcttgggtgtgactgcaactgtgaccaattgggatgttgagggtacaagttgcagcattgtcctcgaagacaaccctcttgttgattttgttgagctccctgacacttgccaaggccttcagtattgcaatttgttaagtggagttattaggggggcattggaaatggtgtctatgaaggcggaggtgacatgggtacgtgacatgcttcgcggggatgatgcctatgaaatgcgggtgaagcttatctagcaagtcccggaggaatacccctacaaggatgacgactagttctatcccattggaagatacaggacgcctgtttgcttgtttggattttttcacattgttgtcgttgacggattctagttctgctataacctgatgccatacgaggacatttagtcagtaaacttatgttagccctgtttccttcttgtcacagcaacagttgttgccgttctacctgcacgctatgcctancgctgaaaaaaaaaacaactgccccccccgctgccattcaaccaacttgctttgacaaacccagcagtgttctaccaacaacccatcattggtggtgccctcttttagattgcttatgagttatagttcaataatgaagttttttggatgatgtttgtggcttcccagaaataagaan

SEQ ID NO: 3810 - DNA, 549 bp, Zea mays
  misc_feature (544)..(546): n is a, c, g, or t
  Peptide Sequence Number=SeqID_9994
  Probeset Number=SeqID_18213
ggagcataagaagaaggtagaggcaaagaatgcattggagaactatgcatacaacatgaggaacaccgtgaaggatgagaagattggaggaaagctggatccagctgacaagaagaaaattgaggatgccattgaggcggccatccagtggctagacaacaatcaacttggggaggcagatgagtttgaggacaaaatgaaggaattggaaagcatctgcaacccaatcatcgccaagatgtaccagggtgcttctggtccggacatgggtggtggtgcaatggatgatgatgctcctaccggtggaagcggtgctggtcccaagattgaggaagtggactaaatttagatgatataattttttttaaagtcgcatttatcgtgttttttgttgggttagtttgcgatttagctttcgatcaaagactctatttggcactatttcgttctgttttatgttttattagcttcatgtcactttttactgtagttcattgaacagatgctattaaaatgcattatctgtcataattttccttctttnnngtc

SEQ ID NO: 3811 - DNA, 442 bp, Zea mays
  Peptide Sequence Number=SeqID_9995
  Probeset Number=SeqID_18214
ttttttttttttttttttttttttttttttttttttttttttttttttttttttttttttttttttttttttttttttttttttttttttttttattcttgcaagagtattcaattgtcaattgtcttccctttactatgggaacatcccttgggtcaatctaatatggaacactcactacactaatggtaaagtgccgtatgcaacaaatgaaagagaacctttctagtggaaggacatcattttggctaaaagatctttacagaggagttgcaaaatgtattgttggagacgacaccactttacttttctggttcgacatctagaatgataagttgctacagcaaatctatcccatattcttctcttatgccaagaacaaaaacatctctgtctccaagttcgtctcatcatagtctttggagttgcacttctatttacc

SEQ ID NO: 3812 - DNA, 664 bp, Zea mays
  misc_feature (1)..(51): n is a, c, g, or t
  misc_feature (123)..(123): n is a, c, g, or t
  misc_feature (141)..(141): n is a, c, g, or t
  misc_feature (197)..(197): n is a, c, g, or t
  misc_feature (368)..(368): n is a, c, g, or t
  misc_feature (384)..(384): n is a, c, g, or t
  misc_feature (389)..(390): n is a, c, g, or t
  misc_feature (394)..(394): n is a, c, g, or t
  misc_feature (439)..(439): n is a, c, g, or t
  misc_feature (441)..(442): n is a, c, g, or t
  misc_feature (449)..(456): n is a, c, g, or t
  misc_feature (459)..(459): n is a, c, g, or t
  misc_feature (652)..(664): n is a, c, g, or t
  Peptide Sequence Number=SeqID_9996
  Probeset Number=SeqID_18215
nnnnnnnnnnnnnnnnnnnnnnnnnnnnnnnnnnnnnnnnnnnnnnnnnnnaataaaaaaaaaaaaaaaaaacaaaaaaataaataaacaaaaaaaaaaaaaaaaaaaataaaaaaaaaaaanaaaaaaaaaaaaaaacanttaaaataaaaaaaaaaaaaaaaaaaaaaaaaaaaaataaaaaaaaaaaaaaaaanaaaaaaaaaaataaaaaaaaaaaaataaaataaaaagtagacaaaagaaaaaaaaaaacaaaaaaaaaaaaaaaataaaagaggggcgagccaagggcattgacgaagaacaagaaaaaaaaaaaaaaagaaaaaagaaaaaaaaaaaaaaaaaaataaaaaaaaaaaaanaaaaaaaaaaaaaaanaaacnnaaanaaaaaaaaaaaaaaaaaaaaaaaaaaaaaaaaaaaaaaaaaaaanannacaaaannnnnnnnatncaccccaccatctcccctcccctctcccgccgctgccgtcgctcgccgcgggagaaggcgccgcctcttttggtggtagtgagactgcgacggcggcgcgtcttctgcctggctcgagctccggttgggcctcgcgcgcctggcagtggccagtggtggtgtgctcagtgcaccaatctgtccgtcggtggtnnnnnnnnnnnnn

SEQ ID NO: 3813 - DNA, 434 bp, Zea mays
  misc_feature (17)..(17): n is a, c, g, or t
  misc_feature (107)..(108): n is a, c, g, or t
  Probeset Number=SeqID_18216
ccaaatagagatcaggntatccgtcgtttgcccgcaaccgcaagccccgtcgctcgccgccgccgcacactgccgctcgaccgctccagccaggcagccagcctctnngccccaggctactgctcggccgctcggctgctggccgctgtggcgctgctgcccgctggctgctcgcctgctcgccgggctgggcctggcggctgccggctgggcgcctggctgcctgtgtgcttggctgcctctgctgccgtgctgctgcgcctgcgtgctgcctgctccgctgctcgcagctcgcttgcctctgctgcgtgctgttcggtgctcggtttctcgctccgtcgcagcgtgaatgctgtaggcttgtctgattggtgctttctgcttagatttgtttccttgcatttacactttcatttattttacaattcagttaa

SEQ ID NO: 3814 - DNA, 972 bp, Zea mays
  Peptide Sequence Number=SeqID_9997
  Probeset Number=SeqID_18217
acgattctagggctttcacactttcacagcagtcggcgagaacttcaagaaccacaacatggcgacacaaatcagcaagaagagaaagtttgtagctgacggtgtgttctacgccgagctgaacgaggttttaaccagagagcttgcggaagatggttactctggtgtggaggttagggttactccgatgaggactgagatcatcatcagagccacccgtactcaaaatgttctcggtgagaagggaaggaggatcagagagttgacatctcttgtgcagaagagattcagattccctcaagacagtgttgagctttacgctgagaaggttgccaacagaggtctctgcgccattgctcaggctgagtctctccgttacgagctcctcggtgggcttgctgttcgcagggcttgctacggtgttttgagattcgtcatggagagtggtgctaagggttgtgaggttattgtgagtggaaagcttcgtgcagcacgtgccaagtccatgaaattcaaggacggttacatggtttcctctggtcaaccaaccaaggattacatcgactctgcagtcagacatgttctgcttagacagggtgtgctcggaatcaaggtgaaggtcatgcttgactgggaccctaagggaataaatggacccaagacaccattgcctgatgttgtcatcatccatgctcccaaggaggaagacgtcaactctgcacctgctcaggttgctgctccggctgctcttgcaccagaagctcccctcactgccgtagattaccctgagatgatcccagtcgcctagaagaaaagctctttttttactagtactatgtgatttcgcccttaaaactattctgctttttgacagtttatagtttgtcttcgaatcagacacctttcttcaaatactgtttctaaaattattccatttcttattaagttaaaaaaaaaaaaaaaaaagcttat

SEQ ID NO: 3815 - DNA, 690 bp, Zea mays
  Peptide Sequence Number=SeqID_9998
  Probeset Number=SeqID_18218
atacagacacgacgcagcgcatcactgaacactacttccatgcttcactgcgctagatcgtcaaccgcacgacaagagaacatcaccaccaatgcttccccaggctgcgatcttccttgccctgagcctcctgtttgctgccaccgacgaatggatgaaaacccaactgctctgtcccagtcgatgcaatgaccaccagcggtgccgactccgcggtggtacattcacgaacaatgcccgatccacgtcatcaaactcaaagagcgagctatcgtgctatgcctcattcaggactacctacctcactactagcaatgctgtccgtagttgtaggatcaggtggatctctgacactgattgagtctctgcaccgacatactaggtcaacgacctcagcatccacctcgacgtgccccttattctcaacttcatcctcaagaactgcggaaggatttgcccagatgacttcacttgccccaactaagcttgggatccgcttgtatgctccatctcgtcaatctattgactactatgtcgagctcttgttatattattgaataaatctggcgcataaaattctttcgctggaccatggactactgtatctgtgcggagttatatttgaaattttaatgatcaataagaaatattcgtgttttttattttgagtaaaaacataaaaataaaatg

SEQ ID NO: 3816 - DNA, 682 bp, Zea mays
  misc_feature (1)..(10): n is a, c, g, or t
  misc_feature (471)..(471): n is a, c, g, or t
  misc_feature (681)..(682): n is a, c, g, or t
  Peptide Sequence Number=SeqID_9999
  Probeset Number=SeqID_18219
nnnnnnnnnncccgttctcagtcctgacaaccgagcgtacgctgagctgcaagtaaacggcgctggctaccggaagagccgagccggaccaagtctcctcgtctctacctcgtccctcacctctgacccaagccagggttccaccccacccccgcccctatccaatccgatggagggcggcgactcgtccggcgccggcgccggcggcgccgtggccgcggcggtcaagtggcggagcgacgcgtcgcgggcgttccagtactacctggaccgatcgacgcctcacgccacggggcggtggttatcttcgctcggcgccgacgccatgtaaacgctggtgactctactgcagaggagcttgtcactgctacccaagtccagtgtgactatatgtcatttactcgtggtgagaaacctccagctgttggttggaatttcacaccccccctgaagtcatttgttggctatggnaagttccgccttgagcggatgaacaaaaaacatcttggtgcccgccagaagaaggcatctgaggcagagaaggaagataagaagtgaagcggttgaagatagtaccctgttttgttctattcagtcattagtgaatgctactacttaaagtgcttgttctatgtttttttgcggtaatggaaatagagcccagacaaacattttggtgtnn

SEQ ID NO: 3817 - DNA, 686 bp, Zea mays
  Peptide Sequence Number=SeqID_10000
  Probeset Number=SeqID_18220
ctgcaggtcgactctagaagttgaaaaatgtgaaaaactatctagtgagctaagcacatgccatgatattatcaacaaccttagaaatgaaaatgctaatttaattgctaaggttgattcaaatgtttgtaatgtttcaattcccaatcttagagatgataatgttgatttgcttgctaagattgaagaattgaatgtttctcttgctagccttagaaatgaaaatgaaaaattgattgctaaggctaaaaattttgatgtttgcaatgctactatttctgaccttagaagtaaaaatgatatattacatgctaaggttgtagaattaaaatcttgcaaaccctctacatctaccgttgagcatacttcgatttgcactagatgtagagatgttaacattgatgctatacatgatcacatggctttaattaaacaacaaaatgatcacatagctaaattagatgctaaaattaccgagcatgacttagaaaatgaaaaatttaaatttgctagaagtatgctctatagtgggaaacgccctggcatcaaggatggcattggcttccaaaagggaggaaatgtcaaacttaatgcccctcaataaaaccttctaaatttgttaagagggcaaggctccagaacctcaggataacgagggttacattataaaccctgacggttatcct

SEQ ID NO: 3818 - DNA, 1325 bp, Zea mays
  misc_feature (1)..(319): n is a, c, g, or t
  Peptide Sequence Number=SeqID_10001
  Probeset Number=SeqID_18221
nnnnnnnnnnnnnnnnnnnnnnnnnnnnnnnnnnnnnnnnnnnnnnnnnnnnnnnnnnnnnnnnnnnnnnnnnnnnnnnnnnnnnnnnnnnnnnnnnnnnnnnnnnnnnnnnnnnnnnnnnnnnnnnnnnnnnnnnnnnnnnnnnnnnnnnnnnnnnnnnnnnnnnnnnnnnnnnnnnnnnnnnnnnnnnnnnnnnnnnnnnnnnnnnnnnnnnnnnnnnnnnnnnnnnnnnnnnnnnnnnnnnnnnnnnnnnnnnnnnnnnnnnnnnnnnnnnnnnnnnnnnnnnnnnnnnnnnnnnnnnnnnnnnnnnnnnnnnnnnttggttgcctttggtgcaatctatgctcaggtaaagaaagtgtcgaggcggatctccaggagttccaggacttcgacgagttcaaggattaggctagtgacctcccgcagtcagctgcctgtggtcatgtcacagatgatgtcggtgtttctactctagctaaagaaggaattatgcaaggaaacggagcacgatgtgcttaagggtttcctccatgcaaagataacaagtgctactgctgcattggggggcgaactcatgctcgctactctacgatggctgagtgtagtcatgcctgcttctaaacaaaaattaagatcgctgttattatatacattgtaatggtaggtaatgctattaataatatatgggaattttagttttggtattaaaaaaaaaaaaaaaaaaaaaaaaaaaaaaaaaaaaaaacaaccacacaaacaccaaaaaaaaaaacccccccccgagccccccctcctccgcccccttaagcgggggcaaaccccccccctggcgaaaacgggcacacccccgccccccgcgcaaaattcatccccgcccacttccccccacaacccccgcccccctcccaaaagggctaacccccggggcccctagggcgcccccccccccccttccagtccggagcccccaccccccttttcccttaggaaaccccccccccccccgctacattcggaacgccccccccccccggtgacgccccctcgccaaatggccccctccccccccccctcccactgtgccccgcggctccggctctctcctcggcggggcgcggtctcccccccctaaggggcgataacccggttccccccatgcccgcggaacccccccgaaagacccacgtgccccaaagcgcccgagtggcccgccgccccccccaaagcccccccccccccgcccgttcccccaaaacaccccccccccccccccgcgcttcccaaaacccccccccccctttcaggggcccccaccccccccc

SEQ ID NO: 3819 - DNA, 700 bp, Zea mays
  misc_feature (622)..(625): n is a, c, g, or t
  misc_feature (663)..(664): n is a, c, g, or t
  Peptide Sequence Number=SeqID_10002
  Probeset Number=SeqID_18222
ggtccttcgcaattttctctctctctctctctccccgatcggaagacacgcacacacagaatcgctatatctcctccaccgcaaccgctcactctcaaatctccgacaaccacaactaactcatggcaaacgcagcatcaggtgtggcaggccatgatgactgcatgttaaagttgtgggagctcaaggcgaagcggacatatcggtatatagtttataacattgacgagactcaaaagcatgtcatggtggagaagcttggtgagccaaccgaaggctatgaagatttctctgctagccttcctgctaatgagtgtcgttatgctgtttatgactttgagtatctgacagaagggaacctccccaaaagcagaactttttgcattgcgtggtcgcctgatacatcaagggtgaggaacaagatgatttatgcaggctccaaagacaggattcctgagggagctggatggaattcaaatagagccgcaagcaactgatcctactgagatgggtcttgatgtgctcaaaagccgtgccaactaaatgattatgaacagtaggctttctgttggggagctccccttaagccttagttactctttttatggaaatatccatagtnnnngggtcggtcaacttggctagttatggtctcaaactctnnattttccaacttgtggcataaagtttattgcacctt

SEQ ID NO: 3820 - DNA, 544 bp, Zea mays
  Peptide Sequence Number=SeqID_10003
  Probeset Number=SeqID_18223
cgtcgctgcacgctcttaagctggatccctagacggccgggttgtttttttttttttttttttttttttttttttttttttttttttttccttaagcaaaggttcatacataagtacatccctcgtcacgcttagtccaacaacaatgggtttttactttttacaaatatataccaaccctgcccctcaggggggcctcccattacatatattaataatcaatgcgttttattatcatgaaaacggaatggaaacccaaatactcacacaaacaggcttttgggaagagccttttatttccagaaacttcagtcccaatcacttcacttattacggcaggagctcctccttggggcggggtcggtcacacatttccttgttcaccagggaacaatcttccagcgctggtggggtcccttgcaccactcccacagcacaagggccgtcccgtcgcgcacacccccctgggccttgtctctctgtgaagcatcaaagttcaggtggatgttggtggccatcctaatggcgggggacccatccccaa

SEQ ID NO: 3821 - DNA, 544 bp, Zea mays
  Peptide Sequence Number=SeqID_10004
  Probeset Number=SeqID_18224
aaaaaattgggaagggttaaatttggcccccccaagggaaattttaaacggcccccccttttttttttttttgacggctcctgcaagttattttactttgaatacacaggaaaaaaaaatctacaaacaagaagctctgttctacggctcttttaaagaatgctttgtatttacaaaaaaatttttttttgtgattaaaagcaccagctgaaaatacaggctgctaaaaacttaagacactgaaaatccattaaaagacagtatgccaaacatacattaaaaaccttttagggaaacaaagatgatgcaaccaacacatctcacccactgtgccaggcagccttttccgatttccctgcctgtgttcccagtaagtggggcggggagtgcttaccccagggggaggaccctggcctccccccatgggcgactgtggggatccaactacgtgtctgagagggaaccggcacctcctggaccagcatcctcagagccacaggacctgagggccaccatcactgacaggaggaagcgggaggcacac

SEQ ID NO: 3822 - DNA, 481 bp, Zea mays
  Probeset Number=SeqID_18225
gggattagaccaccagttcagatcgcaccacgcacacgagcaccatttacgcaaaccagccgccgccgagtaaatctcgcctgtgtccaccactttgagcgttgtggcttcaggccatcggcggtcctccacgaggacggccgtggctgcgggtggcgcgttggagctgcatggtggcgggaactcctcgccagcgtcgcggttctacgcatcatcatgaataggagcccatgtgctgcgcaatcgaagaaactgttggacgatctgccgacccccacacaaaaggggatgaagaaattaatcaaatggccgaaactatcatggacaaggttgttgaccaacttctgaatgaagccgccgaagcagtattgagggaagattaggtgctatttggaaaaaacatttaaagtgtaatttatgcaacactttgtacatttgaatgtaatatacaagtctcttttcatcaaaaaaaaaaaaaaaa

SEQ ID NO: 3823 - DNA, 451 bp, Zea mays
  Peptide Sequence Number=SeqID_10005
  Probeset Number=SeqID_18226
aactgatctcgctctctctttctctctgctttctgaaatgactgctgacgtaagctctctcgtacggttactaagtaggtacaatgacgatagaaccacggtaaaagattccgcccaacagggatcgtcggtggccctaatgacccgtgatctcctcggaagcggcagttgtcgaggaggaggaggaggcgatcagtcgctggaacttgaccttgacctgaaagtccccaacggttgggaaaagcgtctcgacctaaagtcagggaaagtgtatctgcaacaacaaaactcaacaacctcgtctcatcatcgtcgcgcagaacaatccaaccaaacttttcgaaaatttcaagatttaaattttcctagcaaatctccggtgagaccattgttaagcctcttcgacgacacaagccttgaactgaaactagtcccctcttcatcatcatcg

SEQ ID NO: 3824 - DNA, 1364 bp, Zea mays
  misc_feature (1)..(239): n is a, c, g, or t
  Peptide Sequence Number=SeqID_10006
  Probeset Number=SeqID_18227
nnnnnnnnnnnnnnnnnnnnnnnnnnnnnnnnnnnnnnnnnnnnnnnnnnnnnnnnnnnnnnnnnnnnnnnnnnnnnnnnnnnnnnnnnnnnnnnnnnnnnnnnnnnnnnnnnnnnnnnnnnnnnnnnnnnnnnnnnnnnnnnnnnnnnnnnnnnnnnnnnnnnnnnnnnnnnnnnnnnnnnnnnnnnnnnnnnnnnnnnnnnnnnnnnnnnnnnnnnnnnnnnnnnnnnnnnnnnnnncagcttactagtatattgcctgatcttgagaagaagcttgaggacctgtctgaagcaaacccaagcgctgacatggatgagatggtgaaggcaattgcgtccagggtaactgaagtgatgccaaaagctgcatcttttacttcttcccagatggcaacctcaagcaatggattcgactcctcggttatgtctacggcagcgacaaccggaagctctggaagcacggtgactgaccttggggttgtaggcagaggcgtcaaacgagctagcatcaagccgatctctgctgaacctgctgctaagaaacctgcacttgattcaccatctctccaaggtgacagcagcatcaactctgaggttgtccctgcaacgcagactggagacgagtccgtatctaagtaaattacaatttcattagccctactgtaatgttaacttgctggaacatattagctgctatgtaaacgcttaagaagggactgctggagccatagactcatcgtgagctgacaattgaaatgttaaattgctgagatcatcatggcggtaaatcatgtatgctgtctcagatcttacattactcaccattgggcaacgccacgagccaggctgtgaacgtgacgttcactgcgcgtgctgagaggacacgcgtggcgttctacagcgtgtactacaacacgaggagtgacgaccacagctcgctgtgcgggccggtgatcgacgacgtccgcgtatggggcttgaacaccgcggctgggttgaaggcgagtgctggactggttcttggcattgttggcgtcgttggcatggtgctgttctaaaaactggatctctcggtggctgtagtcttgggaagcatggatgtgtaatctcatctgttagttcgaggaagggcagggcttactggttttggtagtaagcttgaagtttgtcgagtaatatgagcttaggctgaaaaaaaagctcccagaacctacttgttattgcctgtgttatttcatttgtgattcccgaagtaacatgcaattctatgggattgtgtggtttgtttgccctagcttgtaatatgagatgttagaactgttacaagttcatctcctcacaatatgaaaatattgttattct

SEQ ID NO: 3825 - DNA, 688 bp, Zea mays
  misc_feature (202)..(202): n is a, c, g, or t
  misc_feature (573)..(573): n is a, c, g, or t
  misc_feature (577)..(577): n is a, c, g, or t
  misc_feature (601)..(688): n is a, c, g, or t
  Peptide Sequence Number=SeqID_10007
  Probeset Number=SeqID_18228
ccagctttttgccggctttaaaaaggggggttagatgggtactaaacaaacttaatcttgaaaacaaaggtgctgattgattcttgagagtgagaccaattcctggcttgcttagatgagccagaatatccataccttgctcaatgggcattttggggggggaggagccttttagaccttctcaagtcaaaatatattcaanacatgactttggatctgaaatcctcccagagctgtctagatcatagtgtgcaggcatgcatttttacgggccattgggaggatgttggcccgatccttttcgttctttgatgccgcctctggccctcgctgagcacccctcccagtttgctttttgcgatcccggaacgcccttcttccctgccccccgatgctcgcctccgacgcaattgggcaagtgccccctcccatatgcatttctctcggatggttgcttactgagagaatgcaacatcgagcattctgtgattggagtctgctcacgtgtcagctctggatgtgaactcaaggactccgtgatgatgggcgcggacgtctatgaagctgaagaanaagnttcccccccccccccccccgggannnnnnnnnnnnnnnnnnnnnnnnnnnnnnnnnnnnnnnnnnnnnnnnnnnnnnnnnnnnnnnnnnnnnnnnnnnnnnnnnnnnnnnn

SEQ ID NO: 3826 - DNA, 316 bp, Zea mays
  Peptide Sequence Number=SeqID_10008
  Probeset Number=SeqID_18229
ttttggtatgtcgttgcttattttggtaatttatcatcctcttatttcattgagcatgctcaacatctggctccaggcgcagcaaattgctttggcaagcatggtatcattgcatctgtgcagccagatcatctattagatgatgccaatcgtgctggaagcaagattagggtggaaagggctaagcgaagctcctacacatttcaatcactgttagatggcggtgcataggtagctcctggttctgactggtttatttcagacatcaaccccttgcaagctatctgaaacgtagtattacacagtccaagtaaaa

SEQ ID NO: 3827 - DNA, 635 bp, Zea mays
  Peptide Sequence Number=SeqID_10009
  Probeset Number=SeqID_18230
gtttctttaggcataaactgtggggggggggggtcaacactacagcagtatctccactgccatttatctgatatatcttggcgccgttttcaacattcccttaaaaatcaggtgaggggtagactggatctggagtatgcgcggatgtgttatattactgatgcacttgacgggtgttgcttagcgggatgagtcaaaacaagttgctacgataatcaagagcatgctgcagctggctttggagttacgatcatgctttcagagtggtgacacttgtgatttatcagtaaatcaactcagtaatttgcaataccttataaacttctctcaggtggatgtaattagaacaaagttcgaggatcacatcaaagatctctatattttgcattcgaaatcttcaaaatatgccgtgcttggcctttcccggtttctggcggtttcttgaactacaattgagtatcattctacgaaagtcagcaaagatatggacagcttctgtttttgataggacattgcaagactgaaatatacgctggtttgatcaaattggcccttgtcaatacttggagatgcatgtatgtccctaacggtgtatcccagttttacgataaaaatggaaatcatgtgtagttctg

SEQ ID NO: 3828 - DNA, 525 bp, Zea mays
  Peptide Sequence Number=SeqID_10010
  Probeset Number=SeqID_18231
aaaaatttgaaaatcaaaaaaaatgttcgataacaaagcaagttgatcggttaattcaatttaattcaataataaataagaaatgtaagttaatactctctcttattggtaccatccaaccaattcaattgtttacctaattcaatttcaatgatttaattttcaagttcaagccaatcattttgcaaatttcaattggatgaaatctttcgaaagtcttttatttgtctgtcattttttatttgtctgtcattatagacaatactatttatattatctatataattaaattatctatggaattcgaacctgaacttcatttacgattccgtttttctatctcactggcccctatttctttcatatttcatcagcatacgatttatacccagcatattttgtttaccgatttcttttcgtgggcgaattctttctatttttacatctaggatttacatatacaacatatatcactgtcaaggtcgagagtgaatttcttattatttagattctaaatttcgattc

SEQ ID NO: 3829 - DNA, 511 bp, Zea mays
  Probeset Number=SeqID_18232
tgcagctcggattcgccgcgggccagccggagatcggtggagaagcgggttgtgtcggtgccgctggccgagtgcggggaggggccgccgccgtctgactcgtgggcgtggcgcaagtatgggcagaagcccatcaagggctccccctacccacgtgggtactaccgctgcagcagctccaaggggtgccccgcgaggaagcaggtggagcgcagccgcgccgaccctgccgtgctgctcgtcacctacaccttcgaccacaaccacgaggcgccgcggcccaagagcagctgctgccaccagcaaggcaggccgccggcgccgaagcctgatgagcccgtcgtggccgtggccgagcaggaggatgagccggaagactggcaggagccggagcagaaggtcgtcctagcgaaagcttcgacttggggtggttcgaccagtacccgacgtggcaccgttcggcgctgtacgcgccactgctgccgccggaggagtgggagcgggagctgca

SEQ ID NO: 3830 - DNA, 656 bp, Zea mays
  Peptide Sequence Number=SeqID_10011
  Probeset Number=SeqID_18233
ccgagtaagtctgcgcttagcagggccagtggtaaaggcccaatcaaccactcattcggagttcataaagctcagctccatctcagttcttttgttgcagcgtgagcttcctcaatcttctcatattcaatcaaagcgtcgcccttgacaaatccggtatgacggtccaaattcacaatgcaggtttggacctgtccaaattatggaacagcatattggacggtcatcttatcgagcttcttcatgaactccagaggccatcacattgcatccttcaatggatcggatgggtcacggaccgccgagcgagtagagatcgccgcgtcccatcgcgccaaagcgcgaatcgcggggcgcagaggagttggggtcctcgcggaagccgcggccctcggtcatacgcggcgcgtcgtcacccagcgatggtggagcggagacgcgaggtgggggccggcgctggatccgcaccggcgatcctcgtccatgaggtcgtcgtcgtataggtcgaagtcgaccacctccacatcggcgttcatagccgccgccatagccgccgccgccgccgccgccgctggattcggttggatagggttgggggaagggcgacttttggggatttcgggaattgctagttcctggccggcctcgaggtaccc

SEQ ID NO: 3831 - DNA, 463 bp, Zea mays
  misc_feature (5)..(5): n is a, c, g, or t
  misc_feature (12)..(12): n is a, c, g, or t
  misc_feature (17)..(18): n is a, c, g, or t
  misc_feature (29)..(29): n is a, c, g, or t
  misc_feature (36)..(36): n is a, c, g, or t
  misc_feature (45)..(46): n is a, c, g, or t
  misc_feature (57)..(57): n is a, c, g, or t
  misc_feature (63)..(64): n is a, c, g, or t
  misc_feature (90)..(91): n is a, c, g, or t
  misc_feature (116)..(116): n is a, c, g, or t
  misc_feature (124)..(125): n is a, c, g, or t
  misc_feature (164)..(164): n is a, c, g, or t
  misc_feature (179)..(179): n is a, c, g, or t
  misc_feature (191)..(192): n is a, c, g, or t
  misc_feature (205)..(206): n is a, c, g, or t
  misc_feature (224)..(224): n is a, c, g, or t
  misc_feature (248)..(248): n is a, c, g, or t
  misc_feature (250)..(251): n is a, c, g, or t
  misc_feature (259)..(261): n is a, c, g, or t
  misc_feature (269)..(270): n is a, c, g, or t
  misc_feature (276)..(277): n is a, c, g, or t
  misc_feature (292)..(292): n is a, c, g, or t
  misc_feature (294)..(295): n is a, c, g, or t
  misc_feature (311)..(311): n is a, c, g, or t
  misc_feature (313)..(314): n is a, c, g, or t
  misc_feature (321)..(321): n is a, c, g, or t
  misc_feature (327)..(327): n is a, c, g, or t
  misc_feature (353)..(353): n is a, c, g, or t
  misc_feature (379)..(379): n is a, c, g, or t
  misc_feature (383)..(383): n is a, c, g, or t
  misc_feature (401)..(402): n is a, c, g, or t
  Peptide Sequence Number=SeqID_10012
  Probeset Number=SeqID_18234
tccgntacgcgnagcgnngccgcccgcgnatctagnaacccccgnnatcttccccgnctcagnncttcgcgtaattgcattttaagcccnnctttggcactcattgccgtcccccntcggctcnncatttcttggagggtgaccgcgcagctctttccggcggnaaggggcggcgcagnatggggcttccnngcggcgaccacanngtgcttcagcgtactgcncgtcgttgccccggcccacgtggngnnctctgcgnnngcagcggnnggcggnncggtgccccagcgtngnnctccggctttctcttncnnccggcgncccctncccgcgcccgcgcccccccgcgccgnccctcctcccctcctcctcctccctnctcncgccgccccccccccccnnccgccccccgccccccccccgcccccgcctcccccgcctccccttcccccccctccgcccc

SEQ ID NO: 3832 - DNA, 704 bp, Zea mays
  misc_feature (3)..(3): n is a, c, g, or t
  misc_feature (553)..(553): n is a, c, g, or t
  misc_feature (584)..(584): n is a, c, g, or t
  misc_feature (617)..(617): n is a, c, g, or t
  misc_feature (640)..(640): n is a, c, g, or t
  misc_feature (644)..(645): n is a, c, g, or t
  misc_feature (656)..(656): n is a, c, g, or t
  misc_feature (666)..(666): n is a, c, g, or t
  misc_feature (675)..(675): n is a, c, g, or t
  misc_feature (677)..(677): n is a, c, g, or t
  misc_feature (680)..(680): n is a, c, g, or t
  misc_feature (687)..(687): n is a, c, g, or t
  misc_feature (689)..(689): n is a, c, g, or t
  misc_feature (699)..(699): n is a, c, g, or t
  misc_feature (702)..(702): n is a, c, g, or t
  Probeset Number=SeqID_18235
acnattgggtaccgggcccccccctcgagatcgcgagcgacttccgcgagtcgtgtcacgagctcgtcgtgtgcggcgggctcgccaccaacttcagcactgcggtcatcgacgtcctcttgaacgcggcgctcgggaacggcgccgcctcgctcacgtacaagggcaacggcgtctaccagaccggaaacagcggcgatggcggcagtggtgtggtcatggagatcacgaccatgctcggcgcagacacgagcttcggcaaggccggcgacgtcatcaacttcaacctgctcgacgtggcgacgtacttcaccggcgcgcagctcgccgcgaaggcgacgctcagcacgagcggcgcgacgtactcgctcggtatcacgtttacgagcacggggccgggcttcgagctgctcggcttggaaacagcgcgcagagtccgctcaccgtcgacagcaagaagatcgaggccgcctcggcaagatcatgatcaagaccacatccaccagaacgactcgcaggggcacgcgcttcttacctacgatttgtcggtcanccgaatcgttgacgtcacgctgaccgggacncatgccctttcgctcacggctacggcggcgcgnggacctggtcaacctaaggtatnatgnnaatcggtattngaccttgccncattgatantnatnggacatngntccaataccngcngc

SEQ ID NO: 3833 - DNA, 581 bp, Zea mays
  Peptide Sequence Number=SeqID_10013
  Probeset Number=SeqID_18236
aaagagcttgaagaaacatttgaagagcgtcacctctttccatctttcacttgttcatttcttacctatttactggctgtatcaataaactcccgctcacggaatatcacaaaacacgcttgaaaatactttaatttaatgcttcggaactcttatctgtagcctccgttttttcacctgtctggtttatcttcaatctcaggtggaccgacttgtcgattggcggggaggagattggaagggtgttgggtgtgaaggatgttgtagaatgaaagtttgatggcatggaggaggaagagggggtagaagaaagggtggatgaaattttgggtgaatattattttgctttttcttatttttgtctttctttctctttatcattctctttctctgtccggtgctttatggcacggggctgaacatttaactggtcagcttggttatacttttttattttctgggcttttctttaatttggcttgtatgttttcttcctgtctatggggttgccctcgcaagatttttacctagccagaatttgctcgacgcagccatccaacgcccgcccgctcataattaat

SEQ ID NO: 3834 - DNA, 692 bp, Zea mays
  misc_feature (682)..(689): n is a, c, g, or t
  Peptide Sequence Number=SeqID_10014
  Probeset Number=SeqID_18237
gatatatttattataataacttacgcaccgcacgaacagcgtgtagggttttggaataataataagaatacgcaaaatatagatatcaaatcgaatcgtatcaaagatggcgctgcccaaagcgaaggagatcgtgtcttccaattccgtcgtggttttcagcaaaacctattgccctttctgcgtcgaagtgaagcagctctttggtaacttaggtgtcacttacaaggccattgaactcgattctgaagctgatggaagtgagatccaagcagcattagtcgaatggactggtcagcggactgtgccaaatgtgttcattggtggaaaccacattggtggctgtgattcaacaactgccttgcacaatcaaggcaagctggtgcctctgctgacatctgctggagctcttgccaaatcaactgcttgaaggagctcaatttctgtttatgtagttaactaccgtaataaaaaattgtcgagtaaaggtgtggatttaattcaacaccctgaaactcgtgtttgttcctgtgtggttctctttaaactgtaaccctggcaaataagtcaattgctgtggaggcatttggaagattttctttggaattatttgggcttactttataacatatgcacttaagtgtttttttttattaagcttataacaatataagttttcacnnnnnnnnaaa

SEQ ID NO: 3835 - DNA, 409 bp, Zea mays
  Peptide Sequence Number=SeqID_10015
  Probeset Number=SeqID_18238
gtgggctgcgtccgcatcgtcctcatcaggctcccacctcccgccaccgcgcctctcgttgtgccgtgcggcggcggctgacggtttacgtggattgcaatcgatgccaagctgcgcgccttcccgctctaccgctctcgtgtaattctgagtggtttggatcgtttctcgatgcatatcggatgattttttttatagcgttatgaaaaagaatggctcctgttctttggattttttactccttcctcgtggccaatatttctggcaatggggatcaataaaagtctctgggtctttggataagcaggatgcctgaaaattaaatcagagacctgttcaagaccaggttgcgagatggggatccacaaatatcatgggccagggaaaaggtgttgtcttcaaacgaatg

SEQ ID NO: 3836 - DNA, 848 bp, Zea mays
  misc_feature (593)..(593): n is a, c, g, or t
  Probeset Number=SeqID_18239
catgaattggcataaggaagactatatcttttacctgctgtgcctttctttgttttaggatttacagttcaagtttttatgttggtttatgtcgatactgaatagttattggatcttatagggatgaccaaacatgtatcattttcaaaatgagtatcgatctttattgggctgaggtaatgacatatgttcaaggcattacttgaatgttagaggccctgaatagcgccagtaaataagacttaaacagtgctctttttttggatgaacatgggtcttagaaggttctttagttctactggatataacatctgactgtttgctgttgcctgttgcagctcacattttctggtgcaattattgaggtgtgcatgaggaaactggtattttatccagaagttgttggcttcccccgagagggcgcagaccccttcccctatgtggaaacccgttattcttaggggtcgccacccaagctcataatgctcgacaccaagggtgaacagaaggagcccataaggattgataactggaagcgagagcacattcgccagtttctcacggcgaaagggacgccagtgaaattagacagntgagttcttgcgataagtgcctgaatatttccagtttgacgttccaatagaacctacgtaacctgtaccttgctaccaaaatcgtaccccatgtatgagattggcgttctcatatttacacctaaaaatgatcgtacgagaagcctgtgtgtgcggcatactttgtaacctgtttgttactcttacagtcaggtagtaagtatctggcactaaaaaaaaaaaaaaaaaaaaaaaaaaaaaaaaagggcggccgtt

SEQ ID NO: 3837 - DNA, 667 bp, Zea mays
  Peptide Sequence Number=SeqID_10016
  Probeset Number=SeqID_18240
cggacgcgtgggcggacgcgtgggcggacgcgtggggagaccgcctcgttactcaccacaccgtgctcgggccggagcagagaaaggtaactcgcctcctccccttcgacgccacccccgcctccgtccccaccccctgctactccgcccccaccccctccgcctccggcctagccactgtttgcccagtccccgtcactccgaaaggagcagcagcctaaggcaacgctgccaagagtggagaacaaatcaaaagggtgatcatctcggtgcccaccaaacctcaacaaccaagtttcatgtctaatctcgacgttcagcttccatctgctttgatttgtttgtcgaggcaaatgctgaggctctggtgttgctcctggaacgaaggattaagtgcatgtgcgcatcttagagcgcaacgatagaaagtctctgaatacagtccagggtttgaatatgaagaagaaattctgctgcaatggtaatgtagttcagtacccagagctaggtcaggtcattcagctccaaggtgatcaacataaggacgccctcacgtaaaactactatatcttagacgtagtgtttttattgttgttttatgtgggaccattgattggtcagtatggatcttcttttttattaatataattgggtatttggcaataac

SEQ ID NO: 3838 - DNA, 886 bp, Zea mays
  misc_feature (9)..(10): n is a, c, g, or t
  misc_feature (35)..(35): n is a, c, g, or t
  misc_feature (45)..(45): n is a, c, g, or t
  misc_feature (51)..(51): n is a, c, g, or t
  misc_feature (55)..(55): n is a, c, g, or t
  misc_feature (61)..(61): n is a, c, g, or t
  misc_feature (71)..(71): n is a, c, g, or t
  misc_feature (73)..(73): n is a, c, g, or t
  misc_feature (81)..(81): n is a, c, g, or t
  misc_feature (100)..(100): n is a, c, g, or t
  misc_feature (106)..(106): n is a, c, g, or t
  misc_feature (109)..(109): n is a, c, g, or t
  misc_feature (132)..(132): n is a, c, g, or t
  misc_feature (150)..(150): n is a, c, g, or t
  misc_feature (153)..(154): n is a, c, g, or t
  misc_feature (157)..(158): n is a, c, g, or t
  misc_feature (161)..(161): n is a, c, g, or t
  misc_feature (164)..(165): n is a, c, g, or t
  misc_feature (168)..(168): n is a, c, g, or t
  misc_feature (171)..(171): n is a, c, g, or t
  misc_feature (194)..(194): n is a, c, g, or t
  misc_feature (196)..(196): n is a, c, g, or t
  misc_feature (205)..(206): n is a, c, g, or t
  misc_feature (208)..(208): n is a, c, g, or t
  misc_feature (211)..(211): n is a, c, g, or t
  misc_feature (218)..(218): n is a, c, g, or t
  misc_feature (222)..(222): n is a, c, g, or t
  misc_feature (225)..(226): n is a, c, g, or t
  misc_feature (234)..(234): n is a, c, g, or t
  misc_feature (238)..(238): n is a, c, g, or t
  misc_feature (243)..(243): n is a, c, g, or t
  misc_feature (246)..(247): n is a, c, g, or t
  misc_feature (255)..(255): n is a, c, g, or t
  misc_feature (257)..(257): n is a, c, g, or t
  misc_feature (269)..(269): n is a, c, g, or t
  misc_feature (312)..(312): n is a, c, g, or t
  misc_feature (315)..(315): n is a, c, g, or t
  misc_feature (321)..(321): n is a, c, g, or t
  misc_feature (324)..(324): n is a, c, g, or t
  misc_feature (328)..(328): n is a, c, g, or t
  misc_feature (332)..(332): n is a, c, g, or t
  misc_feature (347)..(347): n is a, c, g, or t
  misc_feature (351)..(351): n is a, c, g, or t
  misc_feature (355)..(355): n is a, c, g, or t
  misc_feature (370)..(370): n is a, c, g, or t
  misc_feature (372)..(372): n is a, c, g, or t
  misc_feature (379)..(379): n is a, c, g, or t
  misc_feature (382)..(382): n is a, c, g, or t
  misc_feature (399)..(399): n is a, c, g, or t
  misc_feature (403)..(403): n is a, c, g, or t
  misc_feature (407)..(407): n is a, c, g, or t
  misc_feature (425)..(425): n is a, c, g, or t
  misc_feature (436)..(436): n is a, c, g, or t
  misc_feature (696)..(696): n is a, c, g, or t
  misc_feature (727)..(727): n is a, c, g, or t
  misc_feature (732)..(732): n is a, c, g, or t
  misc_feature (747)..(748): n is a, c, g, or t
  misc_feature (762)..(762): n is a, c, g, or t
  misc_feature (775)..(776): n is a, c, g, or t
  misc_feature (779)..(779): n is a, c, g, or t
  misc_feature (781)..(782): n is a, c, g, or t
  misc_feature (792)..(792): n is a, c, g, or t
  misc_feature (799)..(799): n is a, c, g, or t
  misc_feature (802)..(805): n is a, c, g, or t
  misc_feature (807)..(807): n is a, c, g, or t
  misc_feature (810)..(810): n is a, c, g, or t
  misc_feature (819)..(819): n is a, c, g, or t
  misc_feature (822)..(822): n is a, c, g, or t
  misc_feature (844)..(844): n is a, c, g, or t
  Peptide Sequence Number=SeqID_10017
  Probeset Number=SeqID_18241
attataatnnttatatatcctcagagaaagacatnttatttctantataanaatngaatgngggggggggngncccccccntctatttataaattttttnttttanctnataataatatataaacccaaaancataaaaaattaccctanatnnaannaanttnntanaanagggcaataatttttttaatatnanaaattaatnnanaangaaacgnagtntgnngatgcctnattngaggntcnncgaaagantncgaaggtttatntagatttgagaaaacagagtccatggattccagctggagtttntcnacggtngtnttgngganttaacggcggtggtncggnacangtagcaagttggatntntgtggantangttgaggatgcaagatngttnatgnaacggtcgggttttaganaggaaagcaangggtgaggatcatttctgggcgatttccggggaggaggaggagataggcgtcgttttgggatacaaagtcaagcttgttcctgtgccatcggtcgttacggtgtttagagtggagcagtatatggattcaggaactgtggatatggttcacaaatggcaatcggatggtaagaaaactgatcagaatctgtttatgagaatgttgattcaaccagtgacgaggaagaaggtaaagactgtgagagcttctgtggttgctntgtttttaggcagagcagatgaagttgatgntttgnttagtaaggagtttnntgaattgggtttanagaagccccttcnnccncnnccctcttggnttcagtntgnnnnanggngggacaatngtnttaatgatactcaggttgatcntaaagtgtttctagatcggaatctcgatacccgaggggggcc

SEQ ID NO: 3839 - DNA, 703 bp, Zea mays
  misc_feature (3)..(8): n is a, c, g, or t
  misc_feature (12)..(17): n is a, c, g, or t
  misc_feature (23)..(23): n is a, c, g, or t
  misc_feature (79)..(79): n is a, c, g, or t
  misc_feature (599)..(599): n is a, c, g, or t
  Peptide Sequence Number=SeqID_10018
  Probeset Number=SeqID_18242
agnnnnnnaggnnnnnnttgaancctttgtaccgggccccccctcgagcaaaacggcgccatgaaattctggggcggtncttttgtgagcaatcccttcggcagcttattgtacaaagcatcgcatgatgcagaagaagtggccgttgttgagatcgataccactgcaaccgatcgttacagaacacactggcccttcatgcgcgacaggcgtatcgattcttaccagcccgttaccaaaagatacatcgacgaagactgattaaactacatcatttgaaattaccgaaagaagccggttattatttcccggcagaatttgaaccgcacgaagccacctggctcagctggccacataaagaagccagttggcccggtaagatccataccatctatccgaactattcattgtttgtgaaatacctcgcattgagcgagaaagtgcgcatcaatgtaacagatgaagccatgaaagcttttgctgttgaacagttgcaaaaagcaggcgttgatatgcagcaggttgaatttttcctgcaccccaccaatgatgcctggtgcagggatcatggcctgctttcctcgtcaccctcatgccgnacaaagaaaagtaatcgttgactggactacatgcctggggcacaaataccttcttatgactggcgatgtgatccccattattggcaacattcacatccggttat

SEQ ID NO: 3840 - DNA, 334 bp, Zea mays
  Peptide Sequence Number=SeqID_10019
  Probeset Number=SeqID_18243
aaaaagagagacgtgtttaactcatgcagacattccttttttgcgcgcctggggcggatagcgcacacaacagactggttgagtcggcgcgttgggttgaaccacgttgcagggtggtcgacttgtgcttcctttaactattagaagcactgggctcccgttatatctgccatatatatatatatatatatatatatatatatatatatatattacagtagccctggagtctgacttggaagagatgtctgctcaggcaagttggacaccatatttctacctgttactctactcaattgagtcatttgaagaagcaccaaaaaaaaaaaaaaaa

SEQ ID NO: 3841 - DNA, 371 bp, Zea mays
  Probeset Number=SeqID_18244
gcgcggcggatcagccaccagtccgagcctaccagtgctcgggccggcccccggctgacccctgcgcgcgcgcaggcatccttttccaccggcgacgcactcccctgccctccaggccccgctgcgcgcacgccacccgcttccggtcacctccctctcactctctccttccttggatcacagcccctttggtcgccgcctaccccccctcccgcggctggccggcagcaacagcagcgctgccgacccgcaagagcgccggctctcggggcccggcgcgggcgccggtgctcgcggcggcggtcgcgggtcctcggccagcaggccgaacggggccagccgcccgacggggtgcgagcgatgggtgttac

SEQ ID NO: 3842 - DNA, 472 bp, Zea mays
  Peptide Sequence Number=SeqID_10020
  Probeset Number=SeqID_18245
cttcttcgcccagtttcttcatcaactcagcggctcgtgtcttctttcttctctgcttaagaaagctatggcgtacgcaccaccaccgatgaagcaaggaaagacaggatttgaagaaacacaagagcagattcacaagatcagaatcactctctcctccaagaacgtcaaaaaccttgagaaggtgtgcactgacttggtccgtggagcgaaagacaagaggttgagagttaaaggaccggtaaggatgccaactaaagttctcaagattaccacaagaaaagctccttgtggtgaaggaaccaacacatgggacagatttgagctccgtgtacacaagcgtgtgatcgatctcttcagctctccggatgtggtgaagcagatcacttccatcaccattgagcctggtgttgaggtcgaggtcaccattgctgattcttagatgcacgtggtttaatttacaacttcgtat

SEQ ID NO: 3843 - DNA, 222 bp, Zea mays
  Peptide Sequence Number=SeqID_10021
  Probeset Number=SeqID_18246
accactcgttcgttccaaacggagaagaggatcaggttcgttccaagggaagggagaagagggtcaggagagagagagagagagagagagagcccttgctcgttgtgttgtcgatgctaataccgcattgtaattgacgaaatgactaaaatgaagagtagtgtagtagatgtacaactaaaaaaaaggagggcggccgcattagagtgcacccagctgacg

SEQ ID NO: 3844 - DNA, 690 bp, Zea mays
  misc_feature (3)..(3): n is a, c, g, or t
  misc_feature (10)..(10): n is a, c, g, or t
  misc_feature (12)..(12): n is a, c, g, or t
  misc_feature (15)..(18): n is a, c, g, or t
  misc_feature (21)..(21): n is a, c, g, or t
  misc_feature (24)..(25): n is a, c, g, or t
  misc_feature (30)..(30): n is a, c, g, or t
  misc_feature (32)..(32): n is a, c, g, or t
  misc_feature (34)..(36): n is a, c, g, or t
  misc_feature (39)..(39): n is a, c, g, or t
  misc_feature (43)..(44): n is a, c, g, or t
  misc_feature (47)..(49): n is a, c, g, or t
  misc_feature (52)..(54): n is a, c, g, or t
  misc_feature (56)..(57): n is a, c, g, or t
  misc_feature (60)..(60): n is a, c, g, or t
  misc_feature (62)..(62): n is a, c, g, or t
  misc_feature (66)..(68): n is a, c, g, or t
  misc_feature (75)..(75): n is a, c, g, or t
  misc_feature (77)..(77): n is a, c, g, or t
  misc_feature (79)..(79): n is a, c, g, or t
  misc_feature (83)..(85): n is a, c, g, or t
  misc_feature (102)..(102): n is a, c, g, or t
  misc_feature (105)..(105): n is a, c, g, or t
  misc_feature (118)..(118): n is a, c, g, or t
  misc_feature (153)..(153): n is a, c, g, or t
  misc_feature (668)..(668): n is a, c, g, or t
  misc_feature (670)..(673): n is a, c, g, or t
  misc_feature (675)..(679): n is a, c, g, or t
  misc_feature (683)..(689): n is a, c, g, or t
  Probeset Number=SeqID_18247
cgnttttttntnggnnnncanaannagttngngnnncanaatnntgnnnaannnannggntngccnnnacatgtnanangcgnnngatgcattcaccagacnatnaaccgcaccatcntgagtggaattcgcagccgaaaagttttcggctgncggcgcgaggagcgatcggcagaaacgccatcgacctgttcgtcgccggcagcgagcgcgaaaacgtcaacgccgcgctgcaacgtttcctgaaatccggggaagacaggctaaccaacccgcggcgtgaaattgtcgcgcggcgacgcgacggtcaggagttcagggccgagctcagcgtcacggcgctccggcgacgtagaggcctcctcttcaattcgttctaccgtgatctgaccgacaagatcgccgccgatgagcgcatccgacacgcagagaagatggaagcgatcggccagctcaccggcggcgtggcgcacgatttcaacaacatcctcaccgttatcaccggtacgatcgggatcctggcggaggcggtggcagcggagccacagcttgcggtcatcgccaagatgatcgacgaggccgccgggcgcggcgccgagctgacccagcatctgctcgcctttgcgcgcaagcagccgctgcaaccgcggggggggcccggtaccaangnnnnannnnncctnnnnnnnc

SEQ ID NO: 3845 - DNA, 436 bp, Zea mays
  misc_feature (415)..(416): n is a, c, g, or t
  Peptide Sequence Number=SeqID_10022
  Probeset Number=SeqID_18248
gagcgaaaccaaagccgcatcaacccctctcgcgaatcgatggacgcgagcgcggcggcggccggaggaggagacgggacgcagaggacactgaatccttatgtgactggtaattcggtgattgcaatgaaatacaaggatggtgtgatcatggcatgtgacactggagcctcctatgggtcaactttgcgatacaagagtgtggagcgtatcaaggaggttggaaagcatagccttattggagggagtggggagttcagtgatttccaggagattttgcggtatctggatgaattaactttgaatgatcatatgtgggatgatggcaactcattgggccccaaggaaatccatgcctacctcacaagagtaatgtacaacaggcgcaataagtttgaccctctatggaactccnnggtgcttggtggagtgaaaa

SEQ ID NO: 3846 - DNA, 555 bp, Zea mays
  Peptide Sequence Number=SeqID_10023
  Probeset Number=SeqID_18249
tacggcggccggcccggacgggcacactttactgggggtgatgcgtggtgccgaattgcatacggctgagcgctggaccatgagtagtgcacacagaaacgaatagcctgcaggccatgtgtctcacgggcaggagcattttcgaatatggtgtagagtgatcagactcacaatgcagctgctagacagcacccaacggcctcttgtagggcacggatcaccgggaccacaggaacacggggctgtatgccccttgagctgggccctcacggcccgcgcagccgtggccttccacctgtacgtacagcgcgaggcacagctccggctgcatcgggccgcccctgccaatggcgcatcatgcccatgctgagatgacacagctgaaccctgccctacaagagcccgctggcgctgctagcccgcatgaggtctgtcaccacacctttcgtaatgcctgccggggcacatgctgcgcgattacttcgagcgctcacatggccagccctatccatatagaactcaggatcctgctcactcccagtatagtcgcgcccg

SEQ ID NO: 3847 - DNA, 650 bp, Zea mays
  Probeset Number=SeqID_18250
gcgctgaacctgcaagtgagcatcatcagccaggcgcttttctttttgacccggacccagagccggacctgggggggggggccctaagcgctgctggagaacccctaactggaagaccagacggaggcgacgcgcatcgacgagaacgccaactgggagttcttgaatatgcatggcatctagctggggctggggcggtaccatctgggcgttcagcgacgtcacctacttaccgctggacgtgctcaagttcgccatccgcttacccgcgcgtccgcccgcccgggcgcaacatcaacaacaagacgggcttcaccaaccggaccgactacggcaagggcgagcgagaggcgcagcgggccacggcacacaggacgctgcacggcctcaaccaggccaccgtcagctgcgacctcttcggcgaccaccagggctaccgcgagctgtcagagctcgccgagcatgcagccaatcgcgccgagggggccaggctcagggagctgcacacgctgaaaggacacgtcgagtacgtcggctagctcaagggcctatgcattgacaccattcagcagagctacaccgcgtatactcgactcagaagactagctgatatgttgtgcaaacttattcaatgcacacacatctatata

SEQ ID NO: 3848 - DNA, 261 bp, Zea mays
  Peptide Sequence Number=SeqID_10024
  Probeset Number=SeqID_18251
tacccctgcgcctataaagcaacacggcgaccccacacaggttcatatcgtcttctgcgtgtatgtagctggttcttcttcaattctctttgtggggaaaacgttcatcgggattttcccagcaatcagcttgataggcgacatcgccattgtggggatcttctacttcattggctttgcattgttctgcctggaggctttgctaagcgtgtgggtcattcaggtgaagttattacttcctaccgcttctctattgatctc

SEQ ID NO: 3849 - DNA, 1671 bp, Zea mays
  misc_feature (1)..(163): n is a, c, g, or t
  misc_feature (1671)..(1671): n is a, c, g, or t
  Peptide Sequence Number=SeqID_10025
  Probeset Number=SeqID_18252
nnnnnnnnnnnnnnnnnnnnnnnnnnnnnnnnnnnnnnnnnnnnnnnnnnnnnnnnnnnnnnnnnnnnnnnnnnnnnnnnnnnnnnnnnnnnnnnnnnnnnnnnnnnnnnnnnnnnnnnnnnnnnnnnnnnnnnnnnnnnnnnnnnnnnnnnnnnnnnnnnnnagtacaaaagggacctccagaaggtgttcgccagggagctggaggcgtcccgacgggagaagaggctggccaagagggaggaggacctgagccagagggaggccctcacaacagagctccgggccaagctgaatgccctggaccagaccctggaggcccagggggtccagcaagtggaggccattgaaaggatgaaaaaatggcaacaagagctaaaggacaaggccaacaacattgccctcgccgaggagaacctcaaggagaagggtacatccctggacaggcgggagacggacctcaccaggcgggagaaggatctcgccttcagggaggaaatgcttgaaaggcggggcatgttgctggccgagcatgagctcgaggcggaggagaaggagcggaagctggaggagcggatccgccggttcgaagcggcgcaggcggcgccggacccctctctcgcctcccccacgccgcgcacacgccagagcgccgccgccattaaaccgccgtcgtcccgagctcgtttctccgtcgatgtcggagccccgccgtgccctctgccacgccgtagaggtccgccaccgtcgacccgggccgtcgtcgcgccattgccgccaccgaggagtccctgggcgtcgccgccgagccgcttcgccgtggaccgcccccctccggtgcccctgtcccgacctagcccccgccagaggattccccgcgccttccccaacctcgcaggccactccggtcgccctaaggacccacagagcccccgcgccctcgtctccggcgagcttctccgccgcgggtgcggccgccgccgtctctgctggttggagaaggggacagaggccggccacccgatccccgccgtccatcccagatcgggcggccttgtttcaattaacccgggcccgatcatggccgtccgcctggaatccgacggcccagggccgctccccccacaccccgcctccctgccgtttgagcctcgcctgtcagccgcccgcgtccgcgctgcccgcctggccccgcctgtcagccgctcgcgctcgctctgcccgcccggccccacctgtcagcccgccgccccgcgctgcccgcctggccccgcctacaacgagcagtctgtgtttcccgaggaagttgcagaggaagtccctgatcagcagtttggtgaaggcaaggggctcaggctgtttcctgagtacctctccgtaaggacctcgtcgatctccgacgccctcccagtgctggactccgccgccgaacgccttcgtcgcctagaccagatcctcggcgcccgcctggaggcagagggcaacaggctctgccgggcgatggtggattacttgctgacgtgcttccggagccatgacccagccatgtccttggcaccggtgctcgatggtccgatggccgccacagaagacgtcgcctgggagagcgtccaagacgtcgtggagacggtggccgcgcgtttccagcgcgaccctgtcgatgccgagtan

SEQ ID NO: 3850 - DNA, 799 bp, Zea mays
  misc_feature (1)..(15): n is a, c, g, or t
  misc_feature (763)..(799): n is a, c, g, or t
  Peptide Sequence Number=SeqID_10026
  Probeset Number=SeqID_18253
nnnnnnnnnnnnnnnggccggccccgccccggctcgctagcctcctcccactcccagtaccagcccccgcccctccagcaccaccagcagctcgccttcggaccatgagacgggtcggaggagacctgcagggcgacggcacaacgccttcctctccggcaacgtgctcctcaacggccgcaaggccaagctctccttcggcgccgcggcgtacgtgacgcaggacgacaacctgatcgggacgctgacggtgcgcgagacgatcggctactcggcgctgctgcggctgccggacaagatgccgcgggaggacaagcgcgcgctggtggagggcaccatcgtcgagatggggctgcaggactgcgccgacaccgtcatcggcaactggcacctccgcggggtcagcggcggcgagaagcgccgcgtcagcatcgcgctcgagctcctcatgaggccccggctcctcttcctcgacgagcccaccagcggcctcgacagctcgtctgcgttcttcgtgacgcagacgctgcgggggctggcgagggatggcggccggaccgtcgtagcttcggtccaccagccgagcagcgacgtcttcttgctcttcgacttcctctacctcctgtcaggaggcagaacagtctactttggcaaggcatcgcaagcttgcgagttcttcgcgcaagctgggttcccgtgcccgccgatgcgcaacccgtccgaccatttcctgcggtgcataaactcggacttcgacagggtnnnnnnnnnnnnnnnnnnnnnnnnnnnnnnnnnnnnn

SEQ ID NO: 3851 - DNA, 702 bp, Zea mays
  misc_feature (3)..(5): n is a, c, g, or t
  misc_feature (9)..(21): n is a, c, g, or t
  misc_feature (547)..(547): n is a, c, g, or t
  misc_feature (559)..(560): n is a, c, g, or t
  misc_feature (562)..(562): n is a, c, g, or t
  misc_feature (573)..(575): n is a, c, g, or t
  misc_feature (577)..(578): n is a, c, g, or t
  misc_feature (580)..(584): n is a, c, g, or t
  misc_feature (586)..(586): n is a, c, g, or t
  misc_feature (590)..(590): n is a, c, g, or t
  misc_feature (597)..(597): n is a, c, g, or t
  misc_feature (604)..(604): n is a, c, g, or t
  misc_feature (610)..(610): n is a, c, g, or t
  misc_feature (617)..(617): n is a, c, g, or t
  misc_feature (620)..(620): n is a, c, g, or t
  misc_feature (622)..(622): n is a, c, g, or t
  misc_feature (624)..(625): n is a, c, g, or t
  misc_feature (631)..(632): n is a, c, g, or t
  misc_feature (634)..(635): n is a, c, g, or t
  misc_feature (638)..(638): n is a, c, g, or t
  misc_feature (640)..(640): n is a, c, g, or t
  misc_feature (642)..(642): n is a, c, g, or t
  misc_feature (645)..(645): n is a, c, g, or t
  misc_feature (648)..(648): n is a, c, g, or t
  misc_feature (650)..(651): n is a, c, g, or t
  misc_feature (654)..(656): n is a, c, g, or t
  misc_feature (658)..(662): n is a, c, g, or t
  misc_feature (666)..(666): n is a, c, g, or t
  misc_feature (668)..(668): n is a, c, g, or t
  misc_feature (671)..(671): n is a, c, g, or t
  misc_feature (674)..(675): n is a, c, g, or t
  misc_feature (677)..(677): n is a, c, g, or t
  misc_feature (680)..(682): n is a, c, g, or t
  misc_feature (684)..(686): n is a, c, g, or t
  misc_feature (688)..(688): n is a, c, g, or t
  misc_feature (690)..(690): n is a, c, g, or t
  misc_feature (693)..(696): n is a, c, g, or t
  misc_feature (698)..(698): n is a, c, g, or t
  misc_feature (700)..(700): n is a, c, g, or t
  misc_feature (702)..(702): n is a, c, g, or t
  Peptide Sequence Number=SeqID_10027
  Probeset Number=SeqID_18254
agnnnatgnnnnnnnnnnnnnccaattgggtaccgggccccccctcgagcggcggatacgaggcggtgcagggcgtggcgacgagcgccacggtgctgagcggcggtgttcagctcatctacgcgaacggcctcgccagcaacacactggtcatgtccggcggcacgttggacgtgctctcgggcggcattgcctcgtcgacgacggtttcccagggcggactggaggtcgtcagcgccggcgggatcgacatcgggacaagagtgaggtcaggcgctgtcttggtgaactccgggtccgtgagcggggcggtcatcagcggtggtcgggaaaccgtctccggcggcctcgatgtcggtgcgaccatcctggcaaatggccaggtccgtgtctttgggggcaccgtgagcggtgcgacgatcgcagctggcagccagtacatcaactatggcacggcggtagacaccaccatcagcggcaccggcagctaccagtacctcggagttagcgggggcgttggctcccaagcaacaccaccattctggcncacggtggccannangtgggatacannngnngnnnnngntacnccactancactacnatccanggtggangcnancnngatatnngnncancngnggnctngnnttnnngnnnnncaananttnaanngnggnnncnnntntnttnnnngncngn

SEQ ID NO: 3852 - DNA, 745 bp, Zea mays
  misc_feature (1)..(136): n is a, c, g, or t
  misc_feature (737)..(745): n is a, c, g, or t
  Peptide Sequence Number=SeqID_10028
  Probeset Number=SeqID_18255
nnnnnnnnnnnnnnnnnnnnnnnnnnnnnnnnnnnnnnnnnnnnnnnnnnnnnnnnnnnnnnnnnnnnnnnnnnnnnnnnnnnnnnnnnnnnnnnnnnnnnnnnnnnnnnnnnnnnnnnnnnnnnnnnnnnnnnnngcacgcccggcggcggagccggctcgtgcaagccgtaccggccgcgaggaaggtgagcagtgcgccgtgctcgcgcagcaaccttcgcggcgaggtctggcagatccggcgaccggcaggcaaagcccgcgccggcccccgcgccgagccctgccccttcggtctgagagctgttctccgacaggcgggcaccgccgcggcagcacaaggacaaacccgccggcgttgccaacggccggaagcccggcctgagtagcggcgtccggggcctgaacctggctggtgctcgtcggcggcgaggaggcgccaaagggaccggcgaagacctgggcacctggagaagggcggcgacgacgacggtcgcccagctgtcgcaagaaaaacaaatcgcgggagtcggcggatccgagggctaccttctccggcggcggatacgtcgcccttggttcgcctccctcgctctccgtggagttttccgagcgcgcggtcgtgtagacgaaagaaccggctacgggagagaaatccggcgtagcgtgcccatccatttagcgggagagagaaggaatcgggaggggagaggaggaggaggaggaagccggtnnnnnnnnn

SEQ ID NO: 3853 - DNA, 560 bp, Zea mays
  Probeset Number=SeqID_18256
gaccctcgggtctctccgggggatttaggtgacactacaggtgccgtgccgaggttcttaccggcgaagagcgcccgccagacaaatggaactgggtgataaggcggtcggttttctgctgactctgacaagcttaaccttatttacatactacacattactgggtcatcattgtgccatttgtcgacagcagaccacgtctgggcacaagtacttcctgcctcatgagtatgcgcttttgataccggcactggccggcgtggttctcctttcgttcttgagcgtgtttgtgggccttgtgatgctcaaatcgaagaacatgaagaagacggcttgctgcgggtttgccatgtacactgctgcgtcattcacttactgtgatgaaatgcatgagtccgcaggatctaagtgctacacgctcgggtctgtaatcaggtccgtcatactttagaggtctctactttggcatccggatgtgtggccttttttattactggcggtcaattaaaagcagcgttcatcacttctctagctagaggtcaaaatatacaaaaagggct

SEQ ID NO: 3854 - DNA, 913 bp, Zea mays
  misc_feature (1)..(299): n is a, c, g, or t
  misc_feature (831)..(831): n is a, c, g, or t
  misc_feature (859)..(859): n is a, c, g, or t
  misc_feature (881)..(881): n is a, c, g, or t
  misc_feature (913)..(913): n is a, c, g, or t
  Peptide Sequence Number=SeqID_10029
  Probeset Number=SeqID_18257
nnnnnnnnnnnnnnnnnnnnnnnnnnnnnnnnnnnnnnnnnnnnnnnnnnnnnnnnnnnnnnnnnnnnnnnnnnnnnnnnnnnnnnnnnnnnnnnnnnnnnnnnnnnnnnnnnnnnnnnnnnnnnnnnnnnnnnnnnnnnnnnnnnnnnnnnnnnnnnnnnnnnnnnnnnnnnnnnnnnnnnnnnnnnnnnnnnnnnnnnnnnnnnnnnnnnnnnnnnnnnnnnnnnnnnnnnnnnnnnnnnnnnnnnnnnnnnnnnnnnnnnnnnnnnnnnnnnnnnnnnnnnnnnnnnnnnnnnnnnatgacgacactagacacagacgtggctaagtggggaggttcctggattggggttgaccgacgaggacgtcggtcttctaaggggggtggattgtgataacctggcccttgagatgggatgtctggcccaaggcttaatagaattaatagtgtaatcataccaacaaggtgcatctatgttcaacgccgggggcgccgttgaggagtgcgacgtgatcagcgatgctggcagcaaggccatggctctcagggttcgcgggtgcggtcggttcggcgcttactgctcgcgggagccggcgaggtgcctattggactcggcggaagtggagttcagctacgatatcgacactggcctcgtgtccgtcgacttgccggtgccggagcaggagctatacctttggacgctggagattatgatctaggtcgtgatgctgtgcgccgacgccaacgcttgccttcgcggctgagccattatgagtcggacgacattgtcatttgctatgtgcacgagagatagatgtattgtggtgggngttgtataattggcatggggaggggttntttttggtatgttcttatctgnatatcatacgtgctctgaatggtatataatan

SEQ ID NO: 3855 - DNA, 913 bp, Zea mays
  misc_feature (1)..(1): n is a, c, g, or t
  misc_feature (33)..(33): n is a, c, g, or t
  misc_feature (55)..(55): n is a, c, g, or t
  misc_feature (83)..(83): n is a, c, g, or t
  misc_feature (615)..(913): n is a, c, g, or t
  Peptide Sequence Number=SeqID_10030
  Probeset Number=SeqID_18258
ntattatataccattcagagcacgtatgatatncagataagaacataccaaaaanaacccctccccatgccaattatacaacncccaccacaatacatctatctctcgtgcacatagcaaatgacaatgtcgtccgactcataatggctcagccgcgaaggcaagcgttggcgtcggcgcacagcatcacgacctagatcataatctccagcgtccaaaggtatagctcctgctccggcaccggcaagtcgacggacacgaggccagtgtcgatatcgtagctgaactccacttccgccgagtccaataggcacctcgccggctcccgcgagcagtaagcgccgaaccgaccgcacccgcgaaccctgagagccatggccttgctgccagcatcgctgatcacgtcgcactcctcaacggcgcccccggcgttgaacatagatgcaccttgttggtatgattacactattaattctattaagccttgggccagacatcccatctcaagggccaggttatcacaatccaccccccttagaagaccgacgtcctcgtcggtcaaccccaatccaggaacctccccacttagccacgtctgtgtctagtgtcgtcatnnnnnnnnnnnnnnnnnnnnnnnnnnnnnnnnnnnnnnnnnnnnnnnnnnnnnnnnnnnnnnnnnnnnnnnnnnnnnnnnnnnnnnnnnnnnnnnnnnnnnnnnnnnnnnnnnnnnnnnnnnnnnnnnnnnnnnnnnnnnnnnnnnnnnnnnnnnnnnnnnnnnnnnnnnnnnnnnnnnnnnnnnnnnnnnnnnnnnnnnnnnnnnnnnnnnnnnnnnnnnnnnnnnnnnnnnnnnnnnnnnnnnnnnnnnnnnnnnnnnnnnnnnnnnnnnnnnnnnnnnnnnnnnnnnnnnnnnnnn

SEQ ID NO: 3856 - DNA, 812 bp, Zea mays
  misc_feature (522)..(522): n is a, c, g, or t
  misc_feature (534)..(534): n is a, c, g, or t
  misc_feature (545)..(545): n is a, c, g, or t
  misc_feature (553)..(554): n is a, c, g, or t
  misc_feature (569)..(569): n is a, c, g, or t
  misc_feature (575)..(576): n is a, c, g, or t
  misc_feature (581)..(581): n is a, c, g, or t
  misc_feature (584)..(584): n is a, c, g, or t
  misc_feature (586)..(586): n is a, c, g, or t
  misc_feature (590)..(590): n is a, c, g, or t
  misc_feature (592)..(592): n is a, c, g, or t
  misc_feature (594)..(594): n is a, c, g, or t
  misc_feature (597)..(597): n is a, c, g, or t
  misc_feature (601)..(601): n is a, c, g, or t
  misc_feature (604)..(607): n is a, c, g, or t
  misc_feature (609)..(610): n is a, c, g, or t
  misc_feature (613)..(613): n is a, c, g, or t
  misc_feature (616)..(616): n is a, c, g, or t
  misc_feature (619)..(619): n is a, c, g, or t
  misc_feature (621)..(621): n is a, c, g, or t
  misc_feature (623)..(623): n is a, c, g, or t
  misc_feature (627)..(633): n is a, c, g, or t
  misc_feature (640)..(640): n is a, c, g, or t
  misc_feature (642)..(643): n is a, c, g, or t
  misc_feature (645)..(645): n is a, c, g, or t
  misc_feature (649)..(650): n is a, c, g, or t
  misc_feature (654)..(655): n is a, c, g, or t
  misc_feature (657)..(658): n is a, c, g, or t
  misc_feature (660)..(661): n is a, c, g, or t
  misc_feature (663)..(664): n is a, c, g, or t
  misc_feature (669)..(669): n is a, c, g, or t
  misc_feature (672)..(674): n is a, c, g, or t
  misc_feature (676)..(677): n is a, c, g, or t
  misc_feature (679)..(679): n is a, c, g, or t
  misc_feature (684)..(685): n is a, c, g, or t
  misc_feature (687)..(687): n is a, c, g, or t
  misc_feature (694)..(694): n is a, c, g, or t
  misc_feature (696)..(696): n is a, c, g, or t
  misc_feature (700)..(700): n is a, c, g, or t
  misc_feature (702)..(703): n is a, c, g, or t
  misc_feature (706)..(706): n is a, c, g, or t
  misc_feature (709)..(709): n is a, c, g, or t
  misc_feature (716)..(717): n is a, c, g, or t
  misc_feature (719)..(720): n is a, c, g, or t
  misc_feature (724)..(724): n is a, c, g, or t
  misc_feature (729)..(729): n is a, c, g, or t
  misc_feature (733)..(733): n is a, c, g, or t
  misc_feature (735)..(735): n is a, c, g, or t
  misc_feature (739)..(739): n is a, c, g, or t
  misc_feature (742)..(742): n is a, c, g, or t
  misc_feature (744)..(745): n is a, c, g, or t
  misc_feature (748)..(748): n is a, c, g, or t
  misc_feature (755)..(755): n is a, c, g, or t
  misc_feature (758)..(758): n is a, c, g, or t
  misc_feature (769)..(769): n is a, c, g, or t
  misc_feature (771)..(771): n is a, c, g, or t
  misc_feature (775)..(779): n is a, c, g, or t
  misc_feature (783)..(783): n is a, c, g, or t
  misc_feature (786)..(786): n is a, c, g, or t
  misc_feature (789)..(789): n is a, c, g, or t
  misc_feature (791)..(791): n is a, c, g, or t
  misc_feature (793)..(794): n is a, c, g, or t
  misc_feature (796)..(796): n is a, c, g, or t
  misc_feature (805)..(805): n is a, c, g, or t
  misc_feature (812)..(812): n is a, c, g, or t
  Peptide Sequence Number=SeqID_10031
  Probeset Number=SeqID_18259
cccccgcggtggccgccgcgcggggacagtgggtcccccggcccgctggtcccccccccccccccagatagtctacttgctgttgttattataggaaatggactcctatatggggagggggaatgcctattctggcacaactgacagacatgcctccggcctttaatcaaatgtattgccgcatagcttcacaaaagtatatcttcttctgtgatccccataggcgaggaagagcctgcatcaaaaagatactgctcactacctgtctgcacggacctaatggaattgcatcaggaaagcgaggaggaagtcaaaacacactgaacaggcagaaaatgcgtgctcgtcgtctccgaccctgctcaggcgggatatgcgtcctctctcacgtcagcccaacgcgtgggtggtttgtccctcgcgcttgtttaacattcggccgggtcgccctgcaaacgagaacttacacttgatgctggtgggcccctatccgtgactttcagtgatacagagttccatgancctgtacggccnggaaaactcgngcaccccnntccccccggatcggnttacanntcccnagnantgtntngngtntcgnaannnntnnatnctnaanancnatcnnnnnnncaaaccntnntntaanngctnncnncnncnnatgancannnannancgccnngnatacctncntgcntnncgngtntcccctnncnntacncgttnaaancnggcnacntnncantgtagcnaancttccgctcgntngacnnnnnatcnggnacncncnngnactaacccnctgcgtn

SEQ ID NO: 3857 - DNA, 374 bp, Zea mays
  Peptide Sequence Number=SeqID_10032
  Probeset Number=SeqID_18260
ccgtccccctccacaaaaaaaattccccctaaaaaaggcaaaaaatgtccacctaaaagcggttcccaaaaagcgcggcgaggttatcagccccaaaaggcagccattgggtcccaaagcccggctttatggtttagggcacccccatttagaccgtaactcccctcccaaataatgtggtcaatgatctcaagggtggatactaggttgtttggtccatctacctgcagtacccagttttacatttgtgttactttaaggggtgcaactttgccccctttaaacagtagtataaacctgttgtctgttcctgttaaaaaatttccccttttaggtgcaaaccttagtttttccgggaaaaaaccccagaaaaa

SEQ ID NO: 3858 - DNA, 1124 bp, Zea mays
  misc_feature (1)..(489): n is a, c, g, or t
  misc_feature (1090)..(1124): n is a, c, g, or t
  Peptide Sequence Number=SeqID_10033
  Probeset Number=SeqID_18261
nnnnnnnnnnnnnnnnnnnnnnnnnnnnnnnnnnnnnnnnnnnnnnnnnnnnnnnnnnnnnnnnnnnnnnnnnnnnnnnnnnnnnnnnnnnnnnnnnnnnnnnnnnnnnnnnnnnnnnnnnnnnnnnnnnnnnnnnnnnnnnnnnnnnnnnnnnnnnnnnnnnnnnnnnnnnnnnnnnnnnnnnnnnnnnnnnnnnnnnnnnnnnnnnnnnnnnnnnnnnnnnnnnnnnnnnnnnnnnnnnnnnnnnnnnnnnnnnnnnnnnnnnnnnnnnnnnnnnnnnnnnnnnnnnnnnnnnnnnnnnnnnnnnnnnnnnnnnnnnnnnnnnnnnnnnnnnnnnnnnnnnnnnnnnnnnnnnnnnnnnnnnnnnnnnnnnnnnnnnnnnnnnnnnnnnnnnnnnnnnnnnnnnnnnnnnnnnnnnnnnnnnnnnnnnnnnnnnnnnnnnnnnnnnnnnnnnnnnnnnnnnnnnnnnnnnnnnnnnnnnnnnnnnnntactaccagcaccgcatcgacaccaccatccccatcgaggacacgattggtgagctcaagaagctcgtgggggaggggaaggtcaagtacattgggttatcggaggcgagccccgacaccatcaggcgtgctcacgctgtgcaccccatctctgccgtgattatggagtggtctctgaaacctcgcgacatcgagccggagatagtgggtctctgcatacgggaaaaaaatgtggctggtggaagacaattcacttcatttgcacataccccctggaagtacgctgatacgccaaagaagcagagctaaaaaatacttgaaagcaccaatgatgatgcgattggtatggccctctccctgcagatgccctcaggaacattgccgatgcccctttgtgaacagcctcttctagtaaataataatgtatggagaagaccaatgaagggcccagtcttgttggaagtacgaataatgtcccgcccccggaatgtgtgctcccatatatttcgtcgcatcagtttgagttgtggttgtgtgaaccccccatattttccctcgcaaaagaataatgtatagttccaataaaaaaaaaaaaaaaaannnnnnnnnnnnnnnnnnnnnnnnnnnnnnnnnnn

SEQ ID NO: 3859 - DNA, 337 bp, Zea mays
  Peptide Sequence Number=SeqID_10034
  Probeset Number=SeqID_18262
aattattattttctttttaaagactgaaagaaaaagggggctcattaaagggtgttctgcaagtgacctcccagcagcaccgggtgtgccccgtgtctctctagtcacaatacgaggcacgagtatgcctcgtagacgttgcatacacgctgtttgcaccattgctcagacacttgtgtgcgcccatttctcacacaccgacacctcgcagtggagccctaaaaagaagagacggaaccctcacaaagtgtgccatgtctcgatctgtgcgtgtcagtcctatgcgcagcgacagtgctactcatctatgtaccgtacccagtacaacgaatgtctc

SEQ ID NO: 3860 - DNA, 586 bp, Zea mays
  misc_feature (14)..(16): n is a, c, g, or t
  misc_feature (94)..(95): n is a, c, g, or t
  misc_feature (186)..(186): n is a, c, g, or t
  misc_feature (403)..(403): n is a, c, g, or t
  misc_feature (580)..(580): n is a, c, g, or t
  Probeset Number=SeqID_18263
taccaatcaaaccnnntcacacaaacaatagtcctcgtggggggttttatccctcgaacctcttttgtagttcccgagcctccgtgtggctccnnggtaattcatatcacagcaattcccaatgcacgacattccttgttactgctcatagatattgagtttcttgacctcattaatgaagagttngccaatatagttgtcaggcaattgtgaaacttaaattatttttgcttgaggcaggatttaacaaacaaacatggcggcgaaagtaatggagaaactgatggctgttatcaaaacaagatgaaattttattgacagagtgtttctgcaacacatgattttacaattactgagaatgagagaatgaccagaaagaaacgacaaaagatgatggtgaaancaacatataacttggacagggattttgtggaaatttgccccagtttaagttccttgttcctcaattgattgattcgcctttgacttttggtgtggtggactgctcatggggtcgacatccttcaccgattaatgaaccttgtcagccaattcgcttgagattatgcctttctgttantttacc

SEQ ID NO: 3861 - DNA, 289 bp, Zea mays
  Peptide Sequence Number=SeqID_10035
  Probeset Number=SeqID_18264
agccgacaggacagacagggactcgtccgtccctgctcttgaccgtatcttcaagctgaaagatttccccatgtgcccagccgtctgccgtcggcgtcagtgtactgcatgcctcccaccggtctgcctgcggccgtgggccgccttcagccttggattgggactgcacatggagatcccggcgcagcaccgaggggacgcggtgagcagcctggtgtacgaggccaacgcgcgcgtcagggacccggtgtacggctgcgcgggcgccgtctcgtcgctgcaggagcgg

SEQ ID NO: 3862 - DNA, 1419 bp, Zea mays
  misc_feature (1)..(39): n is a, c, g, or t
  misc_feature (1419)..(1419): n is a, c, g, or t
  Peptide Sequence Number=SeqID_10036
  Probeset Number=SeqID_18265
nnnnnnnnnnnnnnnnnnnnnnnnnnnnnnnnnnnnnnnacgaaccaatcccattccgtcggccatggtgaccgccacgctgctgggctcctccttcgccatgcccgccgcagcccgtagggcgtcctcctctgcctccacctccttgggcttcgccacgtcgcagctcgccggcctctccctctccgcgggcgccgcaactccaaccgccgtcgccttcctcccaaagaggcagcagctccagcccattgtcgcgcggcgggtgtgccctttcacgggcaagaagacgaaccgggcgaacaaggtgtccttctccaaccacaagacgaagaagcagcagttcgtgaacctgcagtacaagaagctgtggtgggaggctggcaagcgcttcgtcaagctgcgcctctccaccaaggcgctcaagaccatcgagaagcacggtctcgatgctgtcgcgcgcaaggccggcatcgacctcaacaagaagtgagaacagccaaactatggtgtggtggcaccgtggcacactggcatcgaccccagtttgatttgtgtaccataccaatcagtgtaggcagatcgaggttgcacatgccgtgggcctgtttagttcagcttttttctggcttttttctgaccaacttttctgaaaatctggctacgaggagaatctggctgtggggagaatctgagtatcattacgattacatatggaagaagataaagttgttcataggactcaggatctaaaaagtgacggattcctaatattaaaacgactgaaccgattatgtgtttatgttgattttggatggtttttgccctaacgaattttataaaagctggctgaaaagctgagcgtttggtggttcgcagcagcttttggtggccagaagctgccagaagccgaaacaaacaggcccattgttggtcaaagtcttgctgtaacaaaacaaaatacgccatagattcacaggcagcagtgaaagaagaaaagagagaagcccggaaagcgaagaaagagctcaaaggcctgtataaatcagaaacgcagaaggctcagaaagttgctgctgttactggaccttcttccattcgactaatgtgatggttgatctgtggcacgtttactgatgagtggcgactatgacagtcttgaatccaaaagaccgcctggagccctggacaaatgcatcaaatctatgaacgatgacccaatcgcaaggaaatgatgatgtgttctgtgaatggtggttgagaaccagtttgatcaaactggaaacggggtctcaactcgctgatgactttaggggcctggatgttgtggaagcatcagaatggctgtttttaaaggtgctgcacccagtgtccagcttgtccttggatgaattgggagtaagaaaccgctaatgcatgacn

SEQ ID NO: 3863 - DNA, 719 bp, Zea mays
  misc_feature (5)..(5): n is a, c, g, or t
  misc_feature (97)..(98): n is a, c, g, or t
  misc_feature (135)..(136): n is a, c, g, or t
  misc_feature (153)..(154): n is a, c, g, or t
  misc_feature (171)..(172): n is a, c, g, or t
  misc_feature (188)..(188): n is a, c, g, or t
  misc_feature (196)..(197): n is a, c, g, or t
  misc_feature (204)..(205): n is a, c, g, or t
  misc_feature (213)..(214): n is a, c, g, or t
  misc_feature (233)..(233): n is a, c, g, or t
  misc_feature (243)..(244): n is a, c, g, or t
  misc_feature (251)..(252): n is a, c, g, or t
  misc_feature (260)..(261): n is a, c, g, or t
  misc_feature (270)..(271): n is a, c, g, or t
  misc_feature (317)..(318): n is a, c, g, or t
  misc_feature (330)..(330): n is a, c, g, or t
  misc_feature (338)..(339): n is a, c, g, or t
  misc_feature (350)..(351): n is a, c, g, or t
  misc_feature (372)..(372): n is a, c, g, or t
  misc_feature (392)..(393): n is a, c, g, or t
  misc_feature (422)..(422): n is a, c, g, or t
  misc_feature (444)..(444): n is a, c, g, or t
  misc_feature (484)..(484): n is a, c, g, or t
  misc_feature (547)..(547): n is a, c, g, or t
  misc_feature (606)..(607): n is a, c, g, or t
  misc_feature (619)..(621): n is a, c, g, or t
  misc_feature (639)..(640): n is a, c, g, or t
  misc_feature (679)..(679): n is a, c, g, or t
  misc_feature (681)..(682): n is a, c, g, or t
  Peptide Sequence Number=SeqID_10037
  Probeset Number=SeqID_18266
ctggncgcaccactgggccgcgctgcttctccgtcacgctggatacgtcgtcgcccggccggcccagccgcaagggagctcgccgtcgcgccgtttnnttgaagctctccaggaaaagggggggcgcgcgcaggnncgcagcatgagagcggnnccgtgaaccacgccacnnctccgcgcttgctacnttcgcggnncggcgcnngccagcgnnccacgctttgctggaaagngcgcgttatnngtgttcnngaccacgnntgccgcagnncggcgccttgcgccgagcctggcttgcggaaactctccgcgcgcgnngcccgcgtccgntggctgcnnccggaggcccnngcgcggcgctttcggccgcgntctgcggctttgcccccacnnctgtggcgccgctttcagttacctcgttntgttaggggcatttgctgcagnattccaacgggccctattcttcaatttcttcgcgtgcgtnttagccccggcttgcatttctcttgccagcaagataccaactttgaaggcttatatcccccgntagctgctttccagttcattcgctttcagaatctattagagccggtcatttcgatgttnnaaatctaccacnnncatcttcagctttctcanncggtgtccttcccagctttcacctccttctgacgtagcncnncagcgttcagaagggaatttggttcgcttcttttcgc

SEQ ID NO: 3864 - DNA, 713 bp, Zea mays
  misc_feature (1)..(1): n is a, c, g, or t
  misc_feature (3)..(3): n is a, c, g, or t
  misc_feature (534)..(534): n is a, c, g, or t
  misc_feature (579)..(579): n is a, c, g, or t
  misc_feature (647)..(648): n is a, c, g, or t
  misc_feature (684)..(684): n is a, c, g, or t
  misc_feature (700)..(700): n is a, c, g, or t
  misc_feature (704)..(704): n is a, c, g, or t
  Probeset Number=SeqID_18267
ncnattgggtaccgggccccccctcgaggaggagcaggcaaccaaggaaatcctgcaggaagtcgcactgtatctgctgtggcgaggcggcttcttcgatgtcgccgcctttcaaggcggtaccagcctgcggatcctgcaccacctgccccgcttttcagaagatttggactttattctgcaacagccgaacccggcgttcgactggaatccctatctgaagccgctcacggcgggactggcggaattcggactgaactgcgaggtgctcaacaaaagcaaaatggagcgcaacattcgcgcggcgctgctgaagaatgactccatcggcaaccaactcaacctcagatttgaacgtgacgccggcatccgaaccctgaagatcaagttggaaatcgatgtgaacccgccggcgggttcgagctttgcttacacatacttcgattttccactcgacttcgagatctgtcatcaggacttgccgagcaactttgctctcaaactccatgccctactctgaggccctatctgaanggccggactggtatgacttcaactggtacatccggcaagccgctncccacttaccgcatctgcaaccgcctgatagatggaccctgcaggggcaacacctgccatcgatcgcnntggctggtggaccaactcaccggaaaatctacatcnatgggcggcgcggaancatnggacgattt

SEQ ID NO: 3865 - DNA, 681 bp, Zea mays
  Peptide Sequence Number=SeqID_10038
  Probeset Number=SeqID_18268
ctagccggccggcccaaccagccacgccccctctccccttcccccccgtctcgcgctgtgggccggcggtgtggcatcccagctcgcctcccccgccccccgctttgggcccagccgccccctcccctccccccaaatccctctccactccccgcaggcgccgccgatccccgcccgcggtgagcccctccctccccctctcctattctctctcccctccctcctccttcccccgcccgacggcgcccttcttgtgtcccggccgcgcctggccccgcccgcctcgagctcgccggctatggcgcccggctcccgtccgccccgccccagcgcgagcgaccccgcccctcccctcggcgtggccggccatggcggcgcggcgagccccgccccgctcgcgcgcgctcgccccagcccaccctcgcgctcaccggcgccctccccgccgcggccgtgccccgcctcggctcgcccgccccgagctcgtcccgccccggcctcgccggccatggcgcccgcgcggcgtgcccttgccccgccctgcgcgcgcgcccggcctcggccccgtcccgtccatggcacgtggccatggcgcgcccgcccgtgcccgcccgcccgccccggcatgtcctgctcgcatcgtgacggccccggcgcggcctcgagctcggcccagcgtgc

SEQ ID NO: 3866 - DNA, 649 bp, Zea mays
  Peptide Sequence Number=SeqID_10039
  Probeset Number=SeqID_18269
tgtgcaggcgctcgatggcggccgtatctaccatcgcttatcatctgcgcctctacatttcttctctctctgctcctccggctccgccggatccatcctagacaggaatcgccatgtctagactcggtaggagcaccacttcaaatcgaacgacgacgctgcggcggccgagacctacccgcagcaggctggccccgcccgtaagaacggcttcatcgccatcgagaaccgcccctgcaaggctgtggaggtttctacctcccagactggcacgctatggccacgccaaatgccactcttgtcgccatagacatattcaatgggaaaaagcttgaagatattgttccttcatcactcaactgtgacattccgcatgcgaaccgcactgagtatcacctgattgatatttctgaggatgcatttgcgagccttcttacttcagatgggaacgctaacggtgatcttagactcccaactgatgagactcttgcgggccagattaaggaagggttcgaaagctgtcaaggatcttgttgcgactgtccagtctgccctgatggatgagcagatctgcgcgttgtaggatgttgtgcccaaccaacttccttggctttggagacagaaccctactggatctcaacttaaatcg

SEQ ID NO: 3867 - DNA, 747 bp, Zea mays
  misc_feature (1)..(130): n is a, c, g, or t
  misc_feature (731)..(747): n is a, c, g, or t
  Peptide Sequence Number=SeqID_10040
  Probeset Number=SeqID_18270
nnnnnnnnnnnnnnnnnnnnnnnnnnnnnnnnnnnnnnnnnnnnnnnnnnnnnnnnnnnnnnnnnnnnnnnnnnnnnnnnnnnnnnnnnnnnnnnnnnnnnnnnnnnnnnnnnnnnnnnnnnnnnnnnnnttcttggacgagcagggtggctcggttgaggagcttgagatgatgagggctggcagtttagatgcatttaggtgatgaagaagattggtttatttctcacgtgtgtatctgttcatagcatcatagtagaataagtgagatggccatttgtcaatagccgcacaggattgagcaggttgttattgttgaggaccatccatggtggcttatgtgtatgcatgggttgattagctgaagttggtgttggaaggaacatttttttgagtattttggtattaccatgctaggacaatagcggatttggacatttgtcaagagccgcacagattgacaagtccgtattggtggttacaagccatggtggcatatgtgtatgcttgggttgattagctgaagttggtgttgaaaggaacattttttgcacccatttggtatgccatgcttagtcaaaaaaaaaaaaaaaatggttatactgggggagatctgtcatgtggtttgttctggatcagatccatgttttggcagcgattgaagagctggtgatatgtgtagcattctttcaaaacggtgtaactagtatatcaatttaatcgttgtggannnnnnnnnnnnnnnnn

SEQ ID NO: 3868 - DNA, 258 bp, Zea mays
  Probeset Number=SeqID_18271
ccagtaagtgttgttgttatagatggcctttttcttggaggactgggagattgtgtatacttttctgggtttgtttttttcagctacacagaagagtttgacaaggtcatgcttgatgatgttgtcgtctgtgttagcgatcttccagatgcagagcttgatccagctgtgaaggaagcctttgatgttgcatatgacaatatatatgccttccatgtttcacaaaaaatacctgagaagacagttgaaaatatgaaa

SEQ ID NO: 3869 - DNA, 830 bp, Zea mays
  Peptide Sequence Number=SeqID_10041
  Probeset Number=SeqID_18272
cgaattgtgtaccgggccgccccctctacgcgagcgctatatttttttcgagtcacaaaaaaggtggagattgaaagggaaataggggtaaccttttcctataattagttttggtagttgatcgtcaacacaaacacatggactaactagtttgccaagaattcatgtattacaggtgcataaggttcaacacaaactaataaaagattcaagttagggactaaattgaaatggagcaaaggcttgagtgtgctgtgaactggcgcaccggacagtgtacgaacccccattcccgtacaatcccaaagtagtcatccgtgaaaaatagcagtgtagcttaaaaaacatgtacccatgagtggtttgtgcttttgcccaaacccgtacccatcgggttagcgggtacccatgggttacccgcgggtttcatccaaagttttaaatagccggctaatagcggctatttagccagctatagcctttcaagaggtctggagctaagagatgcaccatttagcgctaaccaaacttagccgctaatagccttatttagcccgctaaacacacaacattagctcgatttagctgctaaacaaaaatcttttttaccgttcgaacctttgaaacattgaggcccaaaaacaaaccgtgggcagacccttttaacttaatgtttgttaggtagtggttaaataccttttacatgtgtcgttgaacgttgaatttgcatgtatgttgatttattattgaacatttgaactactagtttaaattgtaaggtccaaatattgaacatttaatttatttataaagttatgttatgttttttt

SEQ ID NO: 3870 - DNA, 718 bp, Zea mays
  misc_feature (3)..(3): n is a, c, g, or t
  misc_feature (9)..(9): n is a, c, g, or t
  misc_feature (503)..(503): n is a, c, g, or t
  misc_feature (517)..(517): n is a, c, g, or t
  misc_feature (552)..(552): n is a, c, g, or t
  misc_feature (575)..(575): n is a, c, g, or t
  misc_feature (580)..(580): n is a, c, g, or t
  misc_feature (582)..(583): n is a, c, g, or t
  misc_feature (587)..(587): n is a, c, g, or t
  misc_feature (591)..(591): n is a, c, g, or t
  misc_feature (597)..(597): n is a, c, g, or t
  misc_feature (606)..(607): n is a, c, g, or t
  misc_feature (609)..(610): n is a, c, g, or t
  misc_feature (612)..(612): n is a, c, g, or t
  misc_feature (614)..(614): n is a, c, g, or t
  misc_feature (616)..(617): n is a, c, g, or t
  misc_feature (638)..(638): n is a, c, g, or t
  misc_feature (646)..(646): n is a, c, g, or t
  misc_feature (656)..(656): n is a, c, g, or t
  misc_feature (664)..(664): n is a, c, g, or t
  misc_feature (678)..(678): n is a, c, g, or t
  misc_feature (680)..(680): n is a, c, g, or t
  misc_feature (683)..(683): n is a, c, g, or t
  misc_feature (687)..(687): n is a, c, g, or t
  misc_feature (689)..(689): n is a, c, g, or t
  misc_feature (691)..(691): n is a, c, g, or t
  misc_feature (700)..(703): n is a, c, g, or t
  misc_feature (706)..(707): n is a, c, g, or t
  misc_feature (712)..(712): n is a, c, g, or t
  misc_feature (714)..(716): n is a, c, g, or t
  Probeset Number=SeqID_18273
ttnaaaccnattgggtaccgggcccccccttgatgagaccggaatatcggccgtggccatgcgctttgcggcaacgaagctgcggattgcgaccgagtccgtcaccgctgcgtcgcagtcgcgccagtatggagaggcattgggtcgcaagctcgtcgatgcgagtctcgtcggcgtctacgtgctgtccgacggtttgcaagttaatggcagtgacctcgtcagcggattgacatccgtcgtcggagggtctgtgcgagtgagcggaggattggcgggagatggcgcccgtttccaggagacgcgcgtcggcgcggataccgcgccgcggcccatgaccattgccgcgatcggtttctatggtgcggcagtccgattcagttacggttgcggaggtggttgggacaccttcggcgtctcgcgcaggatcacgcgctcgagcggcaacgaattgtttgagctggatggcaaaccggctctcgatctgtacgagcgttatcttngcgaaaagcgcaangactgccgggaaccggcctgttgtatccgctgaangtctggattccgaatacctttanacaangnntgcnaacngtgctngcggcaatnncnnancncnntaatgactttgcggcgatgtncccaaggntcaaagccanttaaaaanggaatttatcggtnanganggantntnagttccccnnnnagnnattgnannnct

SEQ ID NO: 3871 - DNA, 642 bp, Zea mays
  misc_feature (601)..(642): n is a, c, g, or t
  Peptide Sequence Number=SeqID_10042
  Probeset Number=SeqID_18274
agtctgcagaacatgtcgtgtattatatggcacgaggatagaacagattttcaggctctccagtcttacaggaaggatggctttcgtttttattcaagagattttcctagcagctacagcttcctttcacagggttttttttgctgtgaggcaacaatctgaagggcagcgagcggtgtacgcaatgcatctaggtcgacttgacgatgtcatccctggtgttgacggtgaagccccagagctccccgtacttctcgttgaagtcccagatgtccatggagttgtagccggagatctacatgatggagaggtcggcccgcgacaagctcatcgccgactacaactcccagatgtccatggagttgcggacgcgtgggcggacgcgtgggcggacgcgtgcaaaaacgcccctgtgaaaggaacctgtagctgctaggaaaatctcttgaataaaaggaaaccccccctccctgtaagcctgccccccctcaaaatttgttctaccctcggcccaggtaaacccaacatgttttgcagactgttgcttcccctttcggcatgaattgcttttgttttaaaaaaaaaaaaaaaaaaaaaaaannnnnnnnnnnnnnnnnnnnnnnnnnnnnnnnnnnnnnnnnn

SEQ ID NO: 3872 - DNA, 512 bp, Zea mays
  Peptide Sequence Number=SeqID_10043
  Probeset Number=SeqID_18275
gaaaaccctagtcttcgcggcgtgacgacggagagagagagagattcagctctgcgttaaaggcaaaaaccttcagccatggcaaatggtaaaactgtgaaagacgtctcgccacatgacttcgtgaaggcttacgcttctcacctcaagcgatctggcaagatcgagcttccctcatggacagacattgtgaagaccggtaagctgaaggagcttgccccatacgatccagattggtactacatcagagctgcatctatggcaaggaaagtgtacctaaggggaggtcttggagttggtgctttccgtagaatctatggtggaagcaagagaaacggcagtcgcccaccacatttctgcaaaagcagcggtggcattgcccgtcacatcctccagcagttggagactatgaacattgttgagattgacaccaaaggaggaagaagaatcacttccagtgggcaaagggatttggaccaggttgctgggcgtatcgcagttgaagtttgaag

SEQ ID NO: 3873 - DNA, 837 bp, Zea mays
  misc_feature (2)..(2): n is a, c, g, or t
  misc_feature (6)..(6): n is a, c, g, or t
  misc_feature (10)..(10): n is a, c, g, or t
  misc_feature (13)..(13): n is a, c, g, or t
  misc_feature (24)..(24): n is a, c, g, or t
  misc_feature (32)..(35): n is a, c, g, or t
  misc_feature (37)..(37): n is a, c, g, or t
  misc_feature (40)..(40): n is a, c, g, or t
  misc_feature (42)..(42): n is a, c, g, or t
  misc_feature (46)..(46): n is a, c, g, or t
  misc_feature (48)..(48): n is a, c, g, or t
  misc_feature (52)..(52): n is a, c, g, or t
  misc_feature (54)..(54): n is a, c, g, or t
  misc_feature (59)..(60): n is a, c, g, or t
  misc_feature (73)..(73): n is a, c, g, or t
  misc_feature (78)..(79): n is a, c, g, or t
  misc_feature (82)..(83): n is a, c, g, or t
  misc_feature (88)..(88): n is a, c, g, or t
  misc_feature (90)..(91): n is a, c, g, or t
  misc_feature (95)..(95): n is a, c, g, or t
  misc_feature (102)..(103): n is a, c, g, or t
  misc_feature (108)..(108): n is a, c, g, or t
  misc_feature (111)..(111): n is a, c, g, or t
  misc_feature (116)..(116): n is a, c, g, or t
  misc_feature (128)..(128): n is a, c, g, or t
  misc_feature (136)..(137): n is a, c, g, or t
  misc_feature (139)..(139): n is a, c, g, or t
  misc_feature (141)..(142): n is a, c, g, or t
  misc_feature (152)..(153): n is a, c, g, or t
  misc_feature (160)..(160): n is a, c, g, or t
  misc_feature (165)..(165): n is a, c, g, or t
  misc_feature (168)..(168): n is a, c, g, or t
  misc_feature (213)..(213): n is a, c, g, or t
  misc_feature (217)..(217): n is a, c, g, or t
  misc_feature (224)..(224): n is a, c, g, or t
  misc_feature (247)..(247): n is a, c, g, or t
  misc_feature (298)..(298): n is a, c, g, or t
  misc_feature (308)..(308): n is a, c, g, or t
  misc_feature (326)..(326): n is a, c, g, or t
  misc_feature (335)..(335): n is a, c, g, or t
  misc_feature (340)..(340): n is a, c, g, or t
  misc_feature (372)..(372): n is a, c, g, or t
  misc_feature (398)..(398): n is a, c, g, or t
  misc_feature (458)..(458): n is a, c, g, or t
  misc_feature (797)..(797): n is a, c, g, or t
  Peptide Sequence Number=SeqID_10044
  Probeset Number=SeqID_18276
anatanattnatnctataattaantgctaccnnnnanacnancaananaaananaaagnnggatgcatataanaatanncanntccananntccntccagannacagntgntttangtttctattcanattaatcnngntnncagtcctttnntagaaangtccntcngatagcgggatcttacccacccttgcctatgaccgattgatacancatngaattancgatagatgtggacatcatgggntcaagacatcaacccattcccttggtagagtatacacgagcgacatgggancagcgatatngtgagctggaggggacgnagcagtgcnacttntcccgctccttcgtccactcaagtactatggntccgacccgaccttcgcgacagaagnaggaacaatctgcaactggacaccgtgccaagattgggaatcattctgcagcatgatgcntagatatagtctggactcagagccaaactcacttcagctcgaccgaaagacgtcattggcatcacgtcaaccttccggttgcacctgtccagcagcgtcatcagccaaacccagaaaacgatcatgccgacgaccacgatccatctactcgactcttgcgctggcagtactagcggcagcaccggtcgctgccgttcaggttcccttcaccaactgcctttccgattcataccgaaacaacgatccgactctactgcaatgggttcccctctacgccgatgccaagtttgataccgaaagttcaagccataaccttgaggttgttgtatggggcaatgntacgggatctcgaggggggcccggacacaagtgttacaca

SEQ ID NO: 3874 - DNA, 498 bp, Zea mays
  Peptide Sequence Number=SeqID_10045
  Probeset Number=SeqID_18277
gtggatcccccgggctgcaggaattcggcacgaggagagagagagagagagagagagagctcactagtccccccccccccgctgggggcttcttaataaacccctctcgctctcttgtctcttccttacgacaacctctcctgctcttcgttttctctctacgacgataaaacccagatttgggttcaagcttccataactttaaacccctctcgcgatccaggttgctatcaaatacttgggagcccccagtattattgaataacacagcctgacaatgagtgtagtcgggtttgattttggaaacgagaattgccttgttgccgttgcgaggcacggagctatcggcgtcctgctccatcatgagtccaatcgtgaggctcctgccattctcggcttcggcgacaggcagcgcttcatcggcactgctggagctgcttctaccatgccgaacccccagaactccatctcccaaatcaagcgcttaactggtccccg

SEQ ID NO: 3875 - DNA, 374 bp, Zea mays
  Peptide Sequence Number=SeqID_10046
  Probeset Number=SeqID_18278
ttgggtacctcgaggccggccgggccttgttccttcccagctccgcaggctgctcatcgccctccctccgcgcccccgatccagatccagatccaggggcttgtcatggcatccaaacgtatcctcaaggaattaaaggacttgcaaaaggaccctccaacatcatgcagtgcaggtcctgctggtgaggatatgttccactggcaggcaaccatcatgggtcctcctgatagtccatatgctggaggtgttttcttggtgaacattcatttcccgccagactaccccttcaagcctccaaagacgaagggcttccatccaaacatggacagcaacggaaagatatgtgtggacgttcttaatgagcagcgcag

SEQ ID NO: 3876 - DNA, 456 bp, Zea mays
  Peptide Sequence Number=SeqID_10047
  Probeset Number=SeqID_18279
tccttaagcagtggtaacaacgcagagtacgcgggaaggcagtggtaccaacccagagtcgcgggggcttactcggcggagggcaaagtcaaggcatcgttccgcaggggattccgctggatcaaggccaagtgctccgagctcatccatggctgaacccggtacctcggtgaaattctattgtattggcatggtacaagatgcggctacaaagcgcgagagatggtctgtctggtgttatttcgctaattcgctctcaaaatgtggaagagaatttgttctgagattgtgtagagaactttgttgcccccctggttataggaaaagaacccgatggagatctgctgagattgcttgtcgctacctgccaattgccccctaattctgttcaaaaaaatgtttgaagaagacttgaatctcggagaagaaaaattctttgcacgatagtacttttct

SEQ ID NO: 3877 - DNA, 531 bp, Zea mays
  misc_feature (24)..(24): n is a, c, g, or t
  misc_feature (30)..(30): n is a, c, g, or t
  misc_feature (36)..(36): n is a, c, g, or t
  misc_feature (41)..(41): n is a, c, g, or t
  misc_feature (47)..(47): n is a, c, g, or t
  misc_feature (53)..(53): n is a, c, g, or t
  misc_feature (67)..(67): n is a, c, g, or t
  misc_feature (73)..(73): n is a, c, g, or t
  misc_feature (77)..(77): n is a, c, g, or t
  misc_feature (97)..(97): n is a, c, g, or t
  misc_feature (148)..(148): n is a, c, g, or t
  misc_feature (165)..(165): n is a, c, g, or t
  misc_feature (181)..(181): n is a, c, g, or t
  misc_feature (184)..(184): n is a, c, g, or t
  misc_feature (193)..(193): n is a, c, g, or t
  misc_feature (196)..(196): n is a, c, g, or t
  misc_feature (199)..(199): n is a, c, g, or t
  misc_feature (214)..(214): n is a, c, g, or t
  misc_feature (219)..(219): n is a, c, g, or t
  misc_feature (237)..(237): n is a, c, g, or t
  misc_feature (259)..(259): n is a, c, g, or t
  misc_feature (269)..(270): n is a, c, g, or t
  misc_feature (273)..(273): n is a, c, g, or t
  misc_feature (293)..(293): n is a, c, g, or t
  misc_feature (347)..(347): n is a, c, g, or t
  misc_feature (393)..(393): n is a, c, g, or t
  misc_feature (414)..(414): n is a, c, g, or t
  misc_feature (432)..(432): n is a, c, g, or t
  misc_feature (434)..(435): n is a, c, g, or t
  misc_feature (438)..(438): n is a, c, g, or t
  misc_feature (440)..(440): n is a, c, g, or t
  misc_feature (447)..(447): n is a, c, g, or t
  misc_feature (453)..(453): n is a, c, g, or t
  misc_feature (463)..(463): n is a, c, g, or t
  misc_feature (491)..(491): n is a, c, g, or t
  misc_feature (493)..(493): n is a, c, g, or t
  misc_feature (499)..(499): n is a, c, g, or t
  misc_feature (511)..(511): n is a, c, g, or t
  misc_feature (523)..(523): n is a, c, g, or t
  Peptide Sequence Number=SeqID_10048
  Probeset Number=SeqID_18280
ccagctcactagtccccccccccnccccgnctatgngccgnggagtncccganagattgatgcaccntcactnttgnaccttccttgtactacctanggcgtgatgctaacttcgttaaatcctaacaccctctcttctgccatggancgggacaacgctccttngctcacacctctgctnctncttctcctnctnctngagggggggcccggnacccnattcgccctatagggagncgtattacaattcactggccgncgctttacannganatagactgggaaaaccctgncgttacccaacttaatcgccttgcagcacagccccctttcgccagctggcgtantagcgaagaggcccgcaccgatcgcccttcccaacagttgcagcancctgaatggcgaatggcaaantgtaagcgttaatatttngnnaanantcgcgcntaaatntttgttaaancagctcattttttaaccaataggcccgnantcggcnaaatcccttatnaatcaaaagaanaggaccgg

SEQ ID NO: 3878 - DNA, 496 bp, Zea mays
  Peptide Sequence Number=SeqID_10049
  Probeset Number=SeqID_18281
caagggtcttcgtgaggctgccaaggccattgagaagcacgctgctcagctttgtgtgcttgctgaggactgtgaccagcctgattatgtcaagctggtgaaggcgctctgtgctgagcacaatgttcacctggtcactgttcctgctgctaagactcttggcgagtgggctgggctttgcaagatcgactctgagggcaaggcaaggaaggttgtaggctgctcctgtgtcgttgtcaaggactacggtgaagaatctgagggccttaacatagtgcaggagtatgtcaagtcacactagaatgtaatacgtttcaagtactttggaccctgggctctaaaatatatgctgtgcatcctggggccttgctaggaagactaagaaccattttacctagaaaacgccgaagaaggtatatgagcaatttggacatctgaaatttttgttatggtgctgtcatctggttttaatgcaaatcaagaagagctgagttaa

SEQ ID NO: 3879 - DNA, 217 bp, Zea mays
  misc_feature (54)..(54): n is a, c, g, or t
  Peptide Sequence Number=SeqID_10050
  Probeset Number=SeqID_18282
aatactgccaatcctgccgaggcgaggcgagccctggcccctgggtcaaaccancttcagagaccggctgctggttctccagttctccaccaaaccaagtaaccaaccaaccatgcgtccatcgtcgcgctacccgccgcaacccgcgctactcgctctcgccctcgccctcgccctcgckgcggcggccccggagctgagacccctcgctcgccgc

SEQ ID NO: 3880 - DNA, 381 bp, Zea mays
  Probeset Number=SeqID_18283
gcagctcgcgcagttcccacttcccacccaccaaaccaaactctcctccacaaccacagcccagcgcgccgcccctcctgggctcggcttgctcggccccaaaacggcaagagccgacgccagcaaaccctcggattcgggagggaaggaaggcacgagcagcgcagctgcctacccgcagctaaccccaaacagcaacgtcgtagccgacgagagcctccgccacctacccaccaactcccgcccgtcgtcgccggggggggggttctcgtcgagcatctcgtgggcacctacctgggcaagccagagagagagagagagagtgagccactgagccagggcggcaaggtggagatgaagaagctgtaccaggcggaaggg

SEQ ID NO: 3881 - DNA, 1003 bp, Zea mays
  Peptide Sequence Number=SeqID_10051
  Probeset Number=SeqID_18284
acacagcaacgcgtatacaccaccgaaagcacaaggcatcagcccagacgccgacgccgcccaacccaagctctcgaactcgaagcgcccaccctctctgaccgcggcgccggcggcgagccgcggcggaggccggccgatggggtccaacgaggcggacaagccgctgcggcggatcggcgcgtcgttcgagcagctcgcggccgtcgcgaagcagcagcagccgcagcagcccgcgatggcggcgggggacttctcgcgcgcctgctccaacgtctccgtcctcttcggctgcctcggcatcgccttcaagttcgccccggccggctacgtcgccaaggttgatgatttgctggaggcctccaagtcgatttcaacattgccctccatggttgagcgtgacattcagaccggcactgtcaggcagccggggagccatacgaggaatctgctgagggtgaagcgcgggattgatatggtcaaagtcctgtttgagcagatccttggtcacagagggcaactccctgaagggacgcggcgtcggtggcttatgctcaggtctttgctcctcaccatggctgggccataaggaaagcagttgctgctggaatgtatgcccttcccttccaagtcccagctcttgaagaaactgaatgaagatgaggaatcagcaaaggttcaaatgcagaactttgtcaggtcatcagctccagtaatctgctatgttgacgaccttttcacctcaaggaatttgggcatagattggtgaagaaaaatatggatacgtttgtttgatgtactaatccagtcagatggtgtgctgtgagctgggctcagaaaacctttttctggatccgtgtttccaagtcgtaaacaaatataactacttagggcctggtcggtttactcggaacgatgacctgaaacgtgtcgtagccggattgcttggataatttacataagctttgatcaggtggaacgattccaaaaaaaaaaaaaaaaa

SEQ ID NO: 3882 - DNA, 484 bp, Zea mays
  misc_feature (66)..(66): n is a, c, g, or t
  misc_feature (275)..(275): n is a, c, g, or t
  misc_feature (336)..(336): n is a, c, g, or t
  Peptide Sequence Number=SeqID_10052
  Probeset Number=SeqID_18285
gtcaatttcttttactttcgttccataagcaaccatggcgcccgttgccaagaaaccagccgtganaaaggagaagaaggatgttaaggataagtccaagaatcctatgaaggatctccacattaggaaattgtgtttaaacatttgtgtaggagagtctggtgacaggcttactcgtgccgccaaggtacttgaacagttaactggtcaacagccagtgttctccaaagcccgttacactgtacgatcgttcggtattcgtcgtaatgaaaaantcgcagtccactgcacagtccgaggcgccaaagctgaagaaatcttggaacgaggactganagtacgggaatacgaattgagaagggataatttctctgcatctggtaactttggatttggtatccaagaacacattgatttgggtatcaagtacgacccaagcattggtatttacggtttagatttctacgttgttttgggccgacct

SEQ ID NO: 3883 - DNA, 662 bp, Zea mays
  misc_feature (1)..(60): n is a, c, g, or t
  misc_feature (661)..(662): n is a, c, g, or t
  Peptide Sequence Number=SeqID_10053
  Probeset Number=SeqID_18286
nnnnnnnnnnnnnnnnnnnnnnnnnnnnnnnnnnnnnnnnnnnnnnnnnnnnnnnnnnnnagccaagtcaccaagttcatcaacagatataaatgacagtagccaacagatccgacgactatcaggggctgctggatcaagcgaggccgaatgcgaagataacatgtctgatgatggctgctcagtggcaggaaccgagtgttctgtaggtggtgcttcagaggcgacagcagaacggatgcagaaggccccatcaaggatagccaggctgttccccccaaagaatgggcagcctgcaaactccaagccaaaaccaagggagtctgccctgaaacccccaggtcgcccgacatctacaggaggaagccaggcgacaggaggaggatctttagtgaaaccccctaagaggcggtagagaaataaagattccatcgtctaggatttgccatgttgatggctgatgctatgcgtctaaagccccctcggagattgtggtgccatgtaagggtatgtgacgtatgtcactgtaacgggttcacttgtcatcaacatgatgagcaaccgactgtaggctggatgttgtatgagctggacgtcatgaggttggtttttcagccctgctgaccatcccattagttatcgactatgttactgaccatcnn

SEQ ID NO: 3884 - DNA, 494 bp, Zea mays
  Peptide Sequence Number=SeqID_10054
  Probeset Number=SeqID_18287
cgtccgcatcatggcagccttccagggagagtgccattgcggcaacaccaagtggactgcgaagctcgagcaggaccaggggccggacatcctctgccactgcaacacctgcaagcagctctccggcggcacatacaccctcaaccagatcatccccaaggcgaacttgaagatcacccagggcgaggatctcgggaagtacacgtacaagggcgattcgggcaagggcgttccctgcttctcctgcaagaactgcaccgcacacgtgtaccacgcgcaggaggccatgggcgacgacaagatcgtgctgcggacgggcttgctggaggcggagttcaagcctgcggcggagatttactgcaaggatcggttggggtgggagaaggaggtagcgcatagctatgagactatgccggcttcgccgaggatgggctgtgacataccatattgaatgaccaaatcgatgaaagagcggttacctcgagaaaaaaata

SEQ ID NO: 3885 - DNA, 1444 bp, Zea mays
  misc_feature (1)..(485): n is a, c, g, or t
  misc_feature (1086)..(1444): n is a, c, g, or t
  Peptide Sequence Number=SeqID_10055
  Probeset Number=SeqID_18288
nnnnnnnnnnnnnnnnnnnnnnnnnnnnnnnnnnnnnnnnnnnnnnnnnnnnnnnnnnnnnnnnnnnnnnnnnnnnnnnnnnnnnnnnnnnnnnnnnnnnnnnnnnnnnnnnnnnnnnnnnnnnnnnnnnnnnnnnnnnnnnnnnnnnnnnnnnnnnnnnnnnnnnnnnnnnnnnnnnnnnnnnnnnnnnnnnnnnnnnnnnnnnnnnnnnnnnnnnnnnnnnnnnnnnnnnnnnnnnnnnnnnnnnnnnnnnnnnnnnnnnnnnnnnnnnnnnnnnnnnnnnnnnnnnnnnnnnnnnnnnnnnnnnnnnnnnnnnnnnnnnnnnnnnnnnnnnnnnnnnnnnnnnnnnnnnnnnnnnnnnnnnnnnnnnnnnnnnnnnnnnnnnnnnnnnnnnnnnnnnnnnnnnnnnnnnnnnnnnnnnnnnnnnnnnnnnnnnnnnnnnnnnnnnnnnnnnnnnnnnnnnnnnnnnnnnnnnnnnnnnnnnngttaaataatttattcttacttgatttcagaattagatccgattagaaagcaggaacgtgagtgttgcacttagtgtgtatggtttgctgtttcgtgatgtttgcgttagattcggttaatctagagaagcatgattattgcgcttggtcataaggcgatagctagcgtttgattatgaaatgtcatgatgccttcccattaagtgtttaattctttactgtgtaaaatcataatattatcttgcaatattcatcttgatattcatacatgtgcattgtgtatctcatgaggtacgataaataatcgcgtgatgcggaagatgagccaagtcgaccccaagcgcgggctactccgcatggtgatgctgatggacgaacctgcctgatcaagtgctaggacaaggatgatcgtcaagtggacatcgcctaacaaacactaaccttgtgttatccagttctggttgtaagtggtttatccgaggtccacgggacactcggacagatcctgttaagttatccggtgcacatgcatagccgtctgaggtctttgagacaaggacatgtgcatgtgggcccaataacttgggaggttctgccacannnnnnnnnnnnnnnnnnnnnnnnnnnnnnnnnnnnnnnnnnnnnnnnnnnnnnnnnnnnnnnnnnnnnnnnnnnnnnnnnnnnnnnnnnnnnnnnnnnnnnnnnnnnnnnnnnnnnnnnnnnnnnnnnnnnnnnnnnnnnnnnnnnnnnnnnnnnnnnnnnnnnnnnnnnnnnnnnnnnnnnnnnnnnnnnnnnnnnnnnnnnnnnnnnnnnnnnnnnnnnnnnnnnnnnnnnnnnnnnnnnnnnnnnnnnnnnnnnnnnnnnnnnnnnnnnnnnnnnnnnnnnnnnnnnnnnnnnnnnnnnnnnnnnnnnnnnnnnnnnnnnnnnnnnnnnnnnnnnnnnnnnnnnnnnnnnnnnnn

SEQ ID NO: 3886 - DNA, 420 bp, Zea mays
  Probeset Number=SeqID_18289
tctgggaacactgtcgggacttgcagcagtgtgatgaatcagtctgagggtctcagaaatattaatacctttctcttatctccaggggtttctctggtggctcagatggtaaagaatctgcctgcaatgcaggagacccggatttgatccctggttggggatgatcccctggagaagggcatggcaacccactccagtgtttttacctggagaatctcctggacagagagcctagtgggttacagtctatggggtcacaaagacttggacatgactgagcgactaacactttttactttttcacttttatctccgggatgggcctgcctagccaaagcctgcctgctggttatccgctctgtcctcctttgtcccctgcataaaaatcctttcactcaaaaaaaaaaaaaaaaagggggg

SEQ ID NO: 3887 - DNA, 764 bp, Zea mays
  misc_feature (20)..(20): n is a, c, g, or t
  misc_feature (602)..(602): n is a, c, g, or t
  Peptide Sequence Number=SeqID_10056
  Probeset Number=SeqID_18290
taccctcgggctttccgggnaacccactttccccgcaccttttcccaccgccagtcctccacccacgcgtccgcgcgcacacggaccccaacccaaaccggcaaaccccagctccacgttcgcgctctactcgcacgcgctcaaggtcgccctcggcgccgaccagagccgcctggcgctgctcggggtcgcctgcgacgtcggcgagaacctcggcctgctcccgcgcgtgctcggcaaccgcctccaccccgcgctgctcctcctcatcggcgccggcgcgtgcctgctcgggtacggcaccgcgtggctcctcgtctccggcgtcgcgcccgcgctgccttactggctgatttggtttgtgcgttattgtcttgctaccaatggtggcgcgtggttggcgactgccgtcctagtgaccaacatgaggaacttcccagctcagcagaggtgccgttgctggcattctgaaagggttctcgggtttaagtgctgctgtttacaccctaaatattacacccggagagtgctccgtgattctacctccatcaaacccttattgctctctctcgctctgggaattcctgccgtgtgcctcctgngaatgtactttgttcagccctgtgaaccctctctggtggagacgaacgcagagcaagtccattttatgtttgcgcaagtggcaagcgttcttcttggggtttatctggttggggctacaatattggatcacgtcgtggctctcatgacattatgaactattc

SEQ ID NO: 3888 - DNA, 1255 bp, Zea mays
  misc_feature (727)..(727): n is a, c, g, or t
  misc_feature (733)..(734): n is a, c, g, or t
  misc_feature (738)..(738): n is a, c, g, or t
  misc_feature (741)..(741): n is a, c, g, or t
  misc_feature (743)..(743): n is a, c, g, or t
  misc_feature (747)..(748): n is a, c, g, or t
  misc_feature (1161)..(1161): n is a, c, g, or t
  Peptide Sequence Number=SeqID_10057
  Probeset Number=SeqID_18291
ctaatcgaaaaaatagtttgatctaaatcaaattacgttgagggaaaattaatcgtttaacatggcaaaaatctcatttgtaattctcgttgtggccctcattgtctttctacgtgtctctgaggctcaatcttcgaaagatcgcgacgaaaaaaaaattgaaaatgacctgcatgaagcaaaggacttgatcgaagaggacttgaaggaaaaggaaaagaacatcaagagcttggaagacgaggtgaatatgttaaccaaatctgagaagatgttgaatgacatcggagaagctcacaaaaaaggtgagagtctagaaccttacgggaaaaagctcaagaaattcaacaggaaggtcaagcaggcaccaaagtcaaagagaggatccgtagttcaaaacattttgaaggatttgggattaaacggagggagaaactgaaacaataactagggtttgatggatgttttgatgcgtttaggaagtttcaaattggctttgcaaatgagatgagcaaatatctttcccattgtatatatttatttaactacatcaactgaataataaatcaattgtaatacaatttaatgtattacttatattatctatctttgtgctactattttgtaaatttttttaaatatattttgttaataattagttattaatatatacattgtaaaattttattacttatatagtatctaatctgtcaaaaaaaaaaaaaanaaaaanngctntantnccgnnattaacccgggttcccggaaaaccccttcccgaaaggggggggggggttcactctcctacttgccgggccgggccgcgacccttcacccccttcccccttccccccccctcttcggcactgagccgggggcgcggtgttttcctcctcccgcaaaattctctcgcgccatcccctccccccgcccccccctctcccccctgtatatttcacctccttccctctcacacccccaaagaccagctgtgttcgaattatctattttatctttttcttttctccctccccgacgcgcgcccccctctcatcgacctcaacctcgctactctgttgcggcccccttccgccccacccacatcgttctctgcgttatttcctgccctgactgccgcacacctgaggcattcctcacgcnctcctgaatatacaactttatccacgcataacataatcatcctctacggcgcccctgttttcatcctacccgtcgtctcatctcctttaccccc

SEQ ID NO: 3889 - DNA, 869 bp, Zea mays
  misc_feature (1)..(202): n is a, c, g, or t
  misc_feature (803)..(869): n is a, c, g, or t
  Peptide Sequence Number=SeqID_10058
  Probeset Number=SeqID_18292
nnnnnnnnnnnnnnnnnnnnnnnnnnnnnnnnnnnnnnnnnnnnnnnnnnnnnnnnnnnnnnnnnnnnnnnnnnnnnnnnnnnnnnnnnnnnnnnnnnnnnnnnnnnnnnnnnnnnnnnnnnnnnnnnnnnnnnnnnnnnnnnnnnnnnnnnnnnnnnnnnnnnnnnnnnnnnnnnnnnnnnnnnnnnnnnnnnnnnnnnnntgttggtgaagcaggcatcggctcagctggccgtagatcgttcataagttgaaatgtagaaagaaaaaggtggtatgaatccgatgagatgtttggtaattcgtcctccgccaccggggagctctctcggagattatctcctgatgatgttccctgcgattacaactcctacgacccatgaagtctagaactacgcctatgatgaaagcatacccggcagggctcttccccagaagcacccgtgacctgcaagctgatcggagctctgctcgtccttgagcgcatggataactacgtcctgcagcctgaggtcggcaacaacaacgtccccaaggtgaacactaactaccgctgtttacatcgctgcacgcctcatgaggggtgtatcaggccacaggtctatttcgaagcaggccccgtgcgatgcaccgaatgccatcgagctgcgcttttacttgtttatcatcagattccattttgcgggccacggcccgggacaaaggtgtgaccggggtgggttaggcgactagattgcacgattatgtacttgcgatttgtttgttaaactgggttgccgacagttaatcttcatttgattttnnnnnnnnnnnnnnnnnnnnnnnnnnnnnnnnnnnnnnnnnnnnnnnnnnnnnnnnnnnnnnnnnnn

SEQ ID NO: 3890 - DNA, 1623 bp, Zea mays
  misc_feature (1)..(23): n is a, c, g, or t
  misc_feature (1623)..(1623): n is a, c, g, or t
  Probeset Number=SeqID_18293
nnnnnnnnnnnnnnnnnnnnnnnaaaaacacacaacacaaccaaccgcctcagtcctcactcatcactcgcacagtcgcaagtccagctatcaccaaccagagctcggctccaagcctccaacccaaggagacagatacgttcgcagatggcgggtgcagtgagggcgtcgtggatggtggccatgagcgtgggcgccgtggaggcgctcaaggaccaggggggcctctgccgctggaactacgcgctgcggtccgtccaccgcaccgccaaggccaacgtccgcagcagcctcgccgcgcagcgggacaaggagctggccccggcggcggcggcggagtcgaagaggcggccgggcaaggccgccgcggaggaggggatgaggaccgtcatgtacctcagctgctggggacccaactaggaggactagctagggttcactgttcagttcattgccggtgctgggttcagttcagacctggctgtggccggttgcctcctgcgattgtaaaataggaatacggtcaagacgatgaatgatgatgacgatgaaaagttctgccaaaaaaaaaaaaaaaaaaaaaaaaaaaaaaaaaaaaaaaaaaaaaaaaaaaaaaaaaaaaaaaaaaaaaaaagtctcagccggattcaatactctaaatttcctgaaagcatttcccccctccagttcccaacgttttatgtttcccaagcgggggggcccattccggtctcgctaaatttccgcaccaccgcgaacggtagaaaaagggccaggtccggtcactggatgccaccgctccctccctagcccctgacaacgatctccaggcattcgcttccgcagtccgcaccaccgccatttcacgcacaccgccgctgggtgcgcggacgcgtggtcactcccacagtccaaactccacagtccccgtatctgccgctattgctgtgctcggctcggcacactcatactcggagtgagagcgaccaagaacagggcatgatggagaagtgacacgccgccggaggttgcaccctgctccgcctcctcggggccacagccgtcttatcggttcgacttattgctacttcatctataacgtcatcctcccccgtgccccccccgcatgaccccacggctcccccacattctggctacttagactttattgtcatagtttttcaacaaaagggtcagtttaagactttattcccaaaaaacaacaacgatctccaggcattcgcttccgcagtccgcaccaccgccatttcacgcacaccgccgctgggtgcgcggacgcgtggtcactcccacagtccaaactccacagtccccgcatctgccgctattgctgtgctcggctcggcacactcagactcggagtgagagcgaccaagaagaggggatgatggagaagtgacacggcgccggaggttgcaccctgctccgcctcctcggcgccacagccgccttagcggttcgacttagtgctacttcatttgtgttcttgattttcttcttctttttaggaaagaacatctctgtgttgagttcaacaataatgctaaaactgggtaaaatcaattgaaataatgtttttcagagatacaaaaaaaaaaaaan

SEQ ID NO: 3891 - DNA, 1054 bp, Zea mays
  Peptide Sequence Number=SeqID_10059
  Probeset Number=SeqID_18294
tgtgattctatatattgtgtcatgttcctggataatgagtaatcgaattaaaaaatggagtactgttccattgatgtggatattgtcgttgaatattgcaatccattttcacccttgctagctttcacgtgatttttttctgaaaagcgagtatcgtctggagtcgctaaaacaacgtgtacaggctctgattcgatttaagggcccaggttgaaatgtcccaggacggtggggggtgtttcgcaaatactcagagcctgattgacgagatacaagaggtgtggtgggagggtttaaacgcaaaaacagcagacaacgttggattcagattggatggtttggatggactgattgcatgcttgcacaagataacggattgcacaggatatggcgccgaggaagagagtatggttggggaataaacgagttttttttattcatgcaacccccaacattagactctcttcaatgagatttttgcaagcatggcaccggctttaatgggcttcacacgcacggcaccgccacgtgccaattgcaaacatggtactataatggtcgagactttaaagatactagaataaggcagcgccctatcgggcgctacacaacttgcctgatggagcaaataggaggttagatataataaaagacaaacacttcatttgacaactttttaaaagcggtattagacatacagatttggcgaataagacattttttactaactactgcctaaaatctcgccaaatagagtgttccttctactgatgccaagcacctagcaagaaggcttgtgcatctgcaggatgctgattcaaagtacaagccctctttatacagataccgaattggatatttcactcaatagtgcacaaagtttgtggaaatgaatcagtttgttattatctaacctggatttaggcagtgcatagatgatatacacaattgagagatgatacgtaaataaataaataaataaataagggagccgatgagaaatcaatgtgagtcactgcatgcattccattaccgacagcaacggaattcgagc

SEQ ID NO: 3892 - DNA, 442 bp, Zea mays
  Probeset Number=SeqID_18295
attttagggcgaacgcgaaatctaaaattagagagcgatggcgagtacagcagctgcgacgggaacgacgacggcgaagagaaaacctgtgtttgtgaaggttgagcagctgaagcctggaacgaccggtcacacattgactgtcaaggtcgttgacgccaatcctgtggttccggctgcgaggaaggctcgtccggggggttctatgggtcgtccgtctcagccgagtcgaatcgctgagtgtctcatcggagacgaaaccgggtgtattctcttcactgctcgtaacgatcaagttgatcttatgaagccgggggaaacagtgatagtgcgcaattcgaggatagacatgttcaagggtacaatgaggctaggggttgataaatggggacgcatcgaagccactgagcctgcttctttcacagtcaaagaggataacaat

SEQ ID NO: 3893 - DNA, 452 bp, Zea mays
  Peptide Sequence Number=SeqID_10060
  Probeset Number=SeqID_18296
aaatagtacccataatttcatataacacatgaataccacatctaattaatacagtttatcacttattagttcatctgggaatgccttttgttttgcttacaaatgctagatcattcgagctaacaagcttaactcgagctggcttgtaacaaaccgagccaagatactagcttaacttgggacaaaactaaaacaagtcgagaacgagttgacgagccacaagtattttgtctctcgtggctcgaacctggccacataagccctcgccacacaaaatcctgctggaaagaagaggacgcgcaggggcacgcgcaccaagcctgccgctggggagtatgcgatgccaaggcagaggacgccggccgaactgatcacaactgccaaggccatttatccgatccacccgcagatcccgttcctcaaaaagctcaccccccgagcttcgcggacgc

SEQ ID NO: 3894 - DNA, 259 bp, Zea mays
  Probeset Number=SeqID_18297
cccgcattcggctcgagcacgatatttacttcacacgacgcgattgctttgatgaggagaaggatactacagcgtgatgtggagatagaggttgaagcagttgacagcaccggaacattcataggttcgttgtgggagtccacgaccatccatagggctcaattgctccgagtgccagtattccacagtacctcccaccagttacttcaatgggcttcgaacatccagccgtgcaagcctaaaggcgacaactagcgct

SEQ ID NO: 3895 - DNA, 952 bp, Zea mays
  misc_feature (1)..(351): n is a, c, g, or t
  misc_feature (952)..(952): n is a, c, g, or t
  Peptide Sequence Number=SeqID_10061
  Probeset Number=SeqID_18298
nnnnnnnnnnnnnnnnnnnnnnnnnnnnnnnnnnnnnnnnnnnnnnnnnnnnnnnnnnnnnnnnnnnnnnnnnnnnnnnnnnnnnnnnnnnnnnnnnnnnnnnnnnnnnnnnnnnnnnnnnnnnnnnnnnnnnnnnnnnnnnnnnnnnnnnnnnnnnnnnnnnnnnnnnnnnnnnnnnnnnnnnnnnnnnnnnnnnnnnnnnnnnnnnnnnnnnnnnnnnnnnnnnnnnnnnnnnnnnnnnnnnnnnnnnnnnnnnnnnnnnnnnnnnnnnnnnnnnnnnnnnnnnnnnnnnnnnnnnnnnnnnnnnnnnnnnnnnnnnnnnnnnnnnnnnnnnnnnnnnnnnnnnnnnnnagcaaagttagtgatagtccatcatgatatgttatcatcgtatatactgtttatgcgtgggcacctcatggtttttgctttttttcaattattttttgtccttatatttgttctattctttttatcttatatagtaattatactagttaaattagtggatctggttctttttcggcatctgctccagtgtaccctgattttgtagacagttaggactcaaagagcgacttaatgattaacaaatcttattataggctgacatccacagtttttgtttcttctttgactactaaccatagcagtttgttgtttgtcctttgtaaagttttttgagaactaatacaagaaaaaaattgggatttgataggccaaaatgggaaggatcggtgatgaagagattagacagaatgatttgtatcctattgtataaaatgatgtaggtccttttattttcctgtgtgttatctatcttaagaaattagaaggatataatatgcattatttgcgagtttgatagatttttgtttcattggattagtgtattctgagattttggcgtatatttgttttacttcttaacagtattcaatctttcgagatn

SEQ ID NO: 3896 - DNA, 555 bp, Zea mays
  Probeset Number=SeqID_18299
gatgatacatctttgtttccgtttcaaaaaaaaaaaaaaaaaagggcggcgaacaccatcgtcctcgtccctgtacctgtaggtcgacagccacaggcggtgccatctgtgacgacgacgtgcctgttgcggaggagcagacgtgtcggctggcatggttggaggaggtcccgcagcctaggaacctgagggttgtctgcttgccgttccgaggcccaacgatcttctagcctcatcaacagcccatccggcaggcagaccctgcttactatctctagctatgagggaggcatagttgatcaaaaaaaaatattgtctttttccttttggagaataggatcccgtgctgataaatgatgatgtttacagtatgtagtgttaagctactcctcctgcgtcactgagacaaaacgtattcagctcttcacaggtggacgacaaagccactggcttctgtactttctgtttctgcggatgaaccagatccccgccatagtcaaaaaaaaaaaaaaaaaaaaaaaagggcgccgccggacgcgtgggcggacgcgtggg

SEQ ID NO: 3897 - DNA, 869 bp, Zea mays
  misc_feature (1)..(210): n is a, c, g, or t
  misc_feature (811)..(869): n is a, c, g, or t
  Peptide Sequence Number=SeqID_10062
  Probeset Number=SeqID_18300
nnnnnnnnnnnnnnnnnnnnnnnnnnnnnnnnnnnnnnnnnnnnnnnnnnnnnnnnnnnnnnnnnnnnnnnnnnnnnnnnnnnnnnnnnnnnnnnnnnnnnnnnnnnnnnnnnnnnnnnnnnnnnnnnnnnnnnnnnnnnnnnnnnnnnnnnnnnnnnnnnnnnnnnnnnnnnnnnnnnnnnnnnnnnnnnnnnnnnnnnnnnnnnnnnnagatctgccgcatcagctacaaggtgagcacgctgagtgcaacgatacctctctcgatacagcgattccgaaggcgcatcacaactgctcatcacagttcctggacagaggccaccgccctgaatgctatgttcttgctcaagcgacaagtccgctgtctgcacggtaccgggagggagctcctctcttactgtcgtactgtgttggctgacactgagaatacctcagatacctctgacttgctcgcacggacgctccaaaggaccagagcttctgatgaatgacgtgccgcgtgatcgctggaactgataggagcaggcagtcgtcttatgattcgaaagcgaaggacggatcgattcccttgatgtactgcagtcctgtgagcgtgcatctacaacttgtataagactccccgcgcggcgcgcgcgggatcctgtactgcagcatcactctgaagcctagctaaaaccaccagctcctgtaacttgatgccgggcgggtcttgtcatgtactgaaacctacaataacggtcgccgaaccccactctttgatgttcagttaacttgtcgcggtttacaagaggccgtgtgatttctgcannnnnnnnnnnnnnnnnnnnnnnnnnnnnnnnnnnnnnnnnnnnnnnnnnnnnnnnnnn

SEQ ID NO: 3898 - DNA, 623 bp, Zea mays
  misc_feature (602)..(602): n is a, c, g, or t
  misc_feature (604)..(604): n is a, c, g, or t
  misc_feature (616)..(616): n is a, c, g, or t
  misc_feature (619)..(622): n is a, c, g, or t
  Peptide Sequence Number=SeqID_10063
  Probeset Number=SeqID_18301
cgccgacgctgaacaatgtcggcggcgtggaaagctatggcgcggaggtttcggccttttaccgcctgaccccggccttctcggcgctggccagctattcctacaaccatgccacctatcagcagacggtgcgcgacgggtcgggcaacctgctggccgaaaaggggcgctatgtcgtcgacacgccgcagaatatggtcaagggcgagctggtctatgacgacagccgcgtcttcggccgggtcggcgcggactatatgtcgaagcgctacttcacctatctgaacgatcagtcggtcgacgggcgcgtgctggtcgatgccagcatcgggtatcgtttccccaaggaatggggcggcttctcgatcgaaggcagcgtgaccaacctgaccgacaagcggtacatctcgaccatcggcaccaacggcttcaccgccagcggcgacaaccagacactactcgcgggcgcgccgcgccagtggttcgtgacgctgaagaaggggttctgaaggccaccgctaacctctagccgctcccctcccgcaagcgggaggggatgggggagggcaaggggtctcaccgagggggggcccggtaccaantngttcaacccacnatnnnnc

SEQ ID NO: 3899 - DNA, 601 bp, Zea mays
  misc_feature (601)..(601): n is a, c, g, or t
  Peptide Sequence Number=SeqID_10064
  Probeset Number=SeqID_18302
gtactgttgggtagtaataatgtactaggttgtctgactgaaaaaacaaaaaaaaaataccctagacctgaaagaaaaaaagaacaaaaggggcgcgccgctcgcgaatctaaaaactagtccgctgtgaattttgaataaatgtgttgctgttctatctaggcgcacttctatgccggcttggtccgctgctgctgctgctggccaccatgcctgggccgctgacatcgctggtgctgcttcgaagaggcggcctccaccgccagcggccggcagaagcgaagaaagacccgaacgtcagcggagtgcaggctaaagtgcttgctagcaggaagaggaaggaggccatgaaggaagctgtggccaagctgagggagaaaggtaagccggttgataagtgaaggccagaacccagtgacccttgatcaagaaatgtaacttattgttaaataatatactccctttattcttctaaagtaataagtcattaatttgaatagtctactcactttatgtgtacagatgagaataaaaatacaactattttgcttgtatgtattttgtcccagccaaaaaaaaaaaaaaaaaaaagggcggccgn

SEQ ID NO: 3900 - DNA, 893 bp, Zea mays
  Peptide Sequence Number=SeqID_10065
  Probeset Number=SeqID_18303
ccggccgggggctttttgactttcgttttacggcggcgagtgaagaactacttcctccctcccttctgccttctcccctgccccctctctcatcactctcagatctctccctccccctccctccttcccttcatctctctgaattctgcacacctcgccgtccacgcattccgcgctcgccctcgcggatccggcagccctttcttcgccgtcgttcttgcctccgctgtcctgctctcctggaggctgctgttgggtcaccagtggctggactcgaccccgcggcctccggggggtgggttcgctggatggttatcgcctcctgatccatccggaccccggatcctctgcaaaggcaccgcctttgtgggttgggttctctgcgcccatgcagaagggtttggcgcgtcggcggtgaggcagggctctggtttagttcttgcgttggactagtccggagatgcttcgtggaacggggtacgggggcggcgatgcgcggaggcgggcactgcgctcgtcgcggcggcatctgccggggtggatctggtggcttctcgggatcttcctcctcgtcgggctcatgctcttcgtcctgcaccacaaccaaaaggagcagttccggccgcccgtcgtggataagggttcagcgatccagatcctcaaaaattctcctttgagcagcacatcatttgctcgcaatttcagatgactctagcatccttcagtgagtgtggcagacctggtcttgtgtagctttcagattgctcaattcggcgagatcttccgaaagatccctgctttgctgttattgatgaagaattgtgagaaattaggtgtctctatttatggttctggcacctgcttctgctacgtggatctcgattagcactatg

SEQ ID NO: 3901 - DNA, 525 bp, Zea mays
  Probeset Number=SeqID_18304
aaaagagccccccaaaaagatccagccgccgcgcgccgcggcccctgagcctgtgagggaacgcagaagagggtttccgtgccgcgccacacgaccccccccggcgggcgatggacaccgaccacggcggcgcgtcggccgcgggcatggacgaggcggaggcggccttcttcgcgcgcgggggccggcggtgctgctgcttcccctggcccgccgccgcctcctcctcctcctcccaccagcgggtcggcggcgccgcggcggcggcggcggcggcggcggaggagacctggtggcagcgcgcggtggacgcggtgctcaaggtgcgcgagtggtcggagctggtggccggcccgcggtggaagaccttcatccggcggttcggccgcagcggcccgcccgcgcggccgcaccaccaccacttcggcggccgcaagctcaactacgacgcgctcagctacgcgctcaacttcgacgagggccaccccgccagcccgagggcgactacaccggctaccgcgactt

SEQ ID NO: 3902 - DNA, 773 bp, Zea mays
  misc_feature (2)..(2): n is a, c, g, or t
  misc_feature (4)..(4): n is a, c, g, or t
  misc_feature (131)..(131): n is a, c, g, or t
  misc_feature (468)..(468): n is a, c, g, or t
  misc_feature (471)..(471): n is a, c, g, or t
  misc_feature (505)..(505): n is a, c, g, or t
  misc_feature (511)..(511): n is a, c, g, or t
  misc_feature (513)..(513): n is a, c, g, or t
  misc_feature (519)..(519): n is a, c, g, or t
  misc_feature (530)..(530): n is a, c, g, or t
  misc_feature (533)..(533): n is a, c, g, or t
  misc_feature (539)..(539): n is a, c, g, or t
  misc_feature (545)..(545): n is a, c, g, or t
  misc_feature (565)..(565): n is a, c, g, or t
  misc_feature (577)..(577): n is a, c, g, or t
  misc_feature (603)..(603): n is a, c, g, or t
  misc_feature (622)..(623): n is a, c, g, or t
  misc_feature (641)..(641): n is a, c, g, or t
  misc_feature (665)..(666): n is a, c, g, or t
  misc_feature (670)..(670): n is a, c, g, or t
  misc_feature (673)..(673): n is a, c, g, or t
  misc_feature (676)..(676): n is a, c, g, or t
  misc_feature (678)..(678): n is a, c, g, or t
  misc_feature (681)..(681): n is a, c, g, or t
  misc_feature (687)..(687): n is a, c, g, or t
  misc_feature (696)..(696): n is a, c, g, or t
  misc_feature (700)..(700): n is a, c, g, or t
  misc_feature (705)..(705): n is a, c, g, or t
  misc_feature (710)..(710): n is a, c, g, or t
  misc_feature (716)..(717): n is a, c, g, or t
  misc_feature (719)..(720): n is a, c, g, or t
  misc_feature (722)..(723): n is a, c, g, or t
  misc_feature (734)..(734): n is a, c, g, or t
  misc_feature (745)..(745): n is a, c, g, or t
  misc_feature (749)..(750): n is a, c, g, or t
  misc_feature (754)..(754): n is a, c, g, or t
  misc_feature (756)..(756): n is a, c, g, or t
  misc_feature (760)..(761): n is a, c, g, or t
  misc_feature (765)..(767): n is a, c, g, or t
  misc_feature (772)..(773): n is a, c, g, or t
  Peptide Sequence Number=SeqID_10066
  Probeset Number=SeqID_18305
ancnattgggtaccgggccccccctcgagcgcaagaagcggcccatcatcggccggctgctgctggagtccggcgtctggctcgtcgcgcccgaggaccggcgcatgggccaggacatcctgatcccgaanaacggcatcgccaacgcgaccgccggccaggtcgtcgccgtcgagctgaccgagccgccgtcgctgtattcgcagccggtcggccgtgtcgtcgaggtgctcggcgagatcgacgaccccggcatggagatcgagatcgccgtgcgcaagtacgacgtgccgcaccgcttcagccccgacacgctggcgcagagcgccaagctgcccgagaagctgcgcgcggccgacctcaagcatcgcatcgacctgcgcgacgtgcccctcgtcacgatcgacggcgaggacgcgcgcgacttcgacgacgccgtctactgcgagcccttcaagcagggccgcngcnagaaggccgtcgagggctggcggctgctggtcgnatttgncncgtgtngcactacgtgnatnccgganaccggntgacgccaccctacaacgcngcgacttggctntttccgcgccgcgtatcctatctgcngaaaagtgtccacggctgnntcctgaacctacaggacngttatattgtcttgaattggtttnngacntgnttntnttnttaaanttttttagnggtnttttngttgntttatnntnntnngtgggtttttntatattttttntagnnctangntttnnatannnatttnn

SEQ ID NO: 3903 - DNA, 342 bp, Zea mays
  Peptide Sequence Number=SeqID_10067
  Probeset Number=SeqID_18306
tggtagatcaaggcggaaaatattttcttccccgggtgagccatggcaaacccccattcggtttggtcccgcggggggccccaatcaactgggctccggcgggggggggcaatcaatccatgccctgtggtgcgcctgtaaaaaaaccttgggtttttaacttcacttcaagcccccatgtcccaggcccttttgtttttttagggtccttgggaggcccttttacccatagggctgtcctgttggacatggggtgatcatatgttgaaccccgggccatcctgggcccatgttagggttttaacccaagcccagaatgtccttcattgccttgcccgggcc

SEQ ID NO: 3904 - DNA, 607 bp, Zea mays
  Probeset Number=SeqID_18307
ttttttttttttttttttttttttttttttttttttttttttttttttttttttttttttaaatatagcagggcaacagcgagagacaatgctgttacaaaacattatgcacatgtgatcaagcccatccattagcagttactacccaagggtcacaccccttggggaaccatgtatacacttgtatataaactgctcctctgcaataaaggacaacagttctgtcattttgttacttctctcaaatctcgttaccactgaattccaacacgttatcagcactttgcctaccgtcgaagtctaatcggtcattgcgttcaaggagggcgagcgaccaattagtgcagatgtcccccgatgaagaagcaatacaggatactaaacatgatccattggatagggtaacaatattctgattctaccttccatggatgttgattcattttgcatgcttcgtggacttgtcgtcgttcttctgcctcttcaattacctgcaacactgcatcgccgctgtggtgaatgccgtatgatgtgtctcacgttgggcatgcataccacgagtggacctttgggcgacaagcgactgcgcagggagcatcgcagcgcc

SEQ ID NO: 3905 - DNA, 653 bp, Zea mays
  misc_feature (353)..(353): n is a, c, g, or t
  misc_feature (434)..(434): n is a, c, g, or t
  misc_feature (480)..(480): n is a, c, g, or t
  misc_feature (506)..(507): n is a, c, g, or t
  misc_feature (510)..(510): n is a, c, g, or t
  misc_feature (555)..(555): n is a, c, g, or t
  misc_feature (569)..(569): n is a, c, g, or t
  misc_feature (574)..(575): n is a, c, g, or t
  misc_feature (577)..(577): n is a, c, g, or t
  misc_feature (579)..(583): n is a, c, g, or t
  misc_feature (590)..(590): n is a, c, g, or t
  misc_feature (596)..(598): n is a, c, g, or t
  misc_feature (600)..(653): n is a, c, g, or t
  Peptide Sequence Number=SeqID_10068
  Probeset Number=SeqID_18308
gctggagctccaccgcggtggcggccgctctagaactcactggatcccccgggctgcagggagagagtagagagagagagctcactagtccccccccccccccctcactaagggaggaggttgataaggatgtgtactgcataccacaacaagcgcacactacctgcccatcaagagacttgtgcacattatcgatttaactcttactatgttgtctttccttttcatcctcaggatccatttttctggtatttgtcccaaaccatttctgataacatattttcactaactactggattttttgtttatcttgctttcatactttgctacctgcggcggactggtggtaaagngatcctggttccctttgtttccccaccaactggttttggtttgttttttcggcccttctcccttcgcggtcatgcttctgnttaccattactggttaatgctttttagttttctcatttctgctgtnaatttttttctttttgggttgcttgnnatnacctccatgttctcctgtttacggtcgtgttatggagcaggtttngtgggcttggaatngtctnntntnnnnnttaaatnatatannnannnnnnnnnnnnnnnnnnnnnnnnnnnnnnnnnnnnnnnnnnnnnnnnnnnnnn

SEQ ID NO: 3906 - DNA, 636 bp, Zea mays
  misc_feature (601)..(636): n is a, c, g, or t
  Probeset Number=SeqID_18309
cccacgcgtccgcccacgcgtccgctcagcataactaaacaccagcaaaaaaaatgcaattcacatcattgatttcagtgatctgtccattggggatcctatatgtgacataattccgctgcacttggatattttccggggtgatagtgaccttctcaaggaatttctacggagctaccaacttccccttctgaggggggaatcaaccaccgatgctacagacagatcagtgcgaaactcgaagttcagcagggcatcatatcgcgcgatgtgctactgtatactacacgaggacaatgtcttgggagctatattcagcctgtggaaggagctgagggctgcaacgtcctgggaggacgttgagaacctggtctggggagagctgaaccggtaccaggactctgcagttcgctcagcataactaaacaccagcaaaaaaaaactttctgaacatacgtgtatgttgttgttcctccgacgactgtaacttccaaataaaaaaaagtgtagggaaaataacgaaggctcgacacggcatgcccatattttcctaggcagcaggcaggtaattacctatggctggtgataatattgagatccnnnnnnnnnnnnnnnnnnnnnnnnnnnnnnnnnnnn

SEQ ID NO: 3907 - DNA, 824 bp, Zea mays
  misc_feature (731)..(824): n is a, c, g, or t
  Peptide Sequence Number=SeqID_10069
  Probeset Number=SeqID_18310
gatttggggtccaaacgaatcaggaatgagtatttcttattgggtcgttagatttgcattagggtataggaggcaaccatcgtttcctgttatcttcggtatcacatgagccttccctacccagccgtcatgtccctccgttccctgatctatcgaaacaaatgtagaagaagtgaaggggtctgctcctgccgccggatctgcttggctttggaaaagctaggtgaaaataaggatagaagggagggaggaggacgtggtctccttgattatgttttattcaagatcttacagttgaccaacaattgactttttgagtcgttcttcagatggacgatccgaggccgcagcaggttgcagtgctccgtatcggacttaattcatggtctccttatcggtaaagtcttttcaggtgtgctaattggatatgtctgtgcgctttcgagaaaaaaaattggatatgtctgctcaagggatgggagtagctgcacttcacacacatagatgacactttaaccaaagtttggcttgctactaatttaagtgaatggaagagtagagtctttaactagcttgctattaccttttgtttaattagtgcttttgctctgtctctgaggtgatgtgaaataaaaattcaatctattttggcatagcagtgtagttttagtagcaccctagagttgtttttcttaataaccgtggtgagttttcatcttctcaacattgtnnnnnnnnnnnnnnnnnnnnnnnnnnnnnnnnnnnnnnnnnnnnnnnnnnnnnnnnnnnnnnnnnnnnnnnnnnnnnnnnnnnnnnnnnnnnnn

SEQ ID NO: 3908 - DNA, 514 bp, Zea mays
  Probeset Number=SeqID_18311
atgtttcagtggttctgtctttgctgtcgtagccgtgccccgttagctactaacgccaccaccattttgatctggccgaaggggggccgagggaaagaccgtgccaccgtatccgggttcatttatgggtcaaaaaataaggtcaaaaacacaagggaacacacaaaacgtaacgttacagctgtcgaggacaggactggcctggagtcctttccacaaaacaatggcgaccaccctaaaaacgaggtacacttacactgggtatgcaagggggggtgagggaaaacaagccggcccattacccatggtggaacaccaccgttataaaagaaacgaaagggtaactacctgctgggcagcctaaggctacacaaggctgtcagggtaaccacgattacaattttcaaagcaaatgcgagggattgtcctaaagacataacgcaacagaggcccatttggaaaacaagcttatgtgcaccccacaggagagggaccaggatgtaaaatgcccctt

SEQ ID NO: 3909 - DNA, 426 bp, Zea mays
  Peptide Sequence Number=SeqID_10070
  Probeset Number=SeqID_18312
aatctcttcttcttcttcttcttcgtcacagagacgtcaatggcggcttcgttctcactcacgagcttcatctcattcatctctccattcaaatcccagaccaaaccaaccccgcctcccaatctcactctccccgctccagcatccccccacagacggagaaacgatcgcgccgcggacgaggctcctccttccaacgcctcgctttcctccgagctcgcgtccgtgatatgcccgtcgctagcttactcgaacacgctcttcttcagcagctcggggtacaacgtgcaggtgttcgtggaggacaacgagtcggaggagaggctggtgaatcggtttaggagggaggtgatgaggacgggggttatacaggagtgcaagaggaggaggtactttgagaataagcaggacgagaagawgcggagg

SEQ ID NO: 3910 - DNA, 467 bp, Zea mays
  misc_feature (336)..(336): n is a, c, g, or t
  misc_feature (338)..(338): n is a, c, g, or t
  misc_feature (342)..(342): n is a, c, g, or t
  misc_feature (346)..(346): n is a, c, g, or t
  misc_feature (372)..(373): n is a, c, g, or t
  Peptide Sequence Number=SeqID_10071
  Probeset Number=SeqID_18313
cccccctgccagcctatgcagcgcccgagcgctcgcctttttgaccgcgtccgcctgccgcccctgccctgtactgtacccctccccccttcacagcgtcacacgcactttttgttctcgccgatccagtgccactacactacaatactgctgcgcgctagcggtagcgctcgcactcgcaccacgccaccgctggtgcctgcttctaacagtcctccccgcgctcgcattgcgattcgcgacctaccgcgagggtaccgggggggtggtgcgcgcgcgtgctcggtgatccgggaaagcgccccgagatggccgggggtggaggcggcggtgccncncccnatcncgacgactttacgccgcgcccccggnnggaccagctccctgggggctcctactgggtcacccggcctcccccgtggcgccggagccggtcttcttggggtccgccgctttctgggcctgct

SEQ ID NO: 3911 - DNA, 316 bp, Zea mays
  Probeset Number=SeqID_18314
atatttcttgatcttgtggctaagataaagtgcattggctgcagtttgatatctaatatatgggttctatgtctattttaactttagatttattatgtatgtgaataattcaatttaattttaaatttatcttttatccatcatactagcttaacatgttgttagacccttttcaccaagagaggctctaaacatggtcctattttaaatctatactactctataagacagtatcgtagacgttcacaatccgtgcaccacggttctgcctcctcccaccgcgcgtccgcgtccggccaaaaaaaaaaaaaaaaaa

SEQ ID NO: 3912 - DNA, 472 bp, Zea mays
  Peptide Sequence Number=SeqID_10072
  Probeset Number=SeqID_18315
atcacggccacagcttccagaaacgagcaacatcccaaagcccctagcatttcgtctctcgtcatccattgttgaacatgtcgaggagaaagaccagagagcccaaggaggaaactgtcactctcggacccgctgttcgtgacggagagcaagtgttcggtgttgttcacatctttgcttctttcaatgacactttcattcatgtgactgatctttcgggaagagaaactctcgttcgtatcaccggtgggatgaaggtgaaggcagaccgtgatgagtcctctccttatgctgctatgcttgctgctcaagatgttgctcaaagatgcaaggagcttggcattactgcgatgcacgtgaagctccgtgccactggaggaaacaaaaccaagactccaggccctggtgctcagtctgctctcagagcccttgctcgttccggcatgaagattggtcgtatagaggatgtgac

SEQ ID NO: 3913 - DNA, 459 bp, Zea mays
  Peptide Sequence Number=SeqID_10073
  Probeset Number=SeqID_18316
tgggtcttgaacaagctcactttcagtttttgcctttggaatccacttctaggccttggctttgaggcagcagagcctctaggtgtcctgctccaaggctgtgtccctgtccaggacaggcacccctagagtgagcctgcagaaccaagctgaaagcctcccaccctaggctttccattccagttctggggcctagattctgaacttggggtctttggtcatacccatctcaaaggaaccagactagctgaacctggggagctcccacctcacaactgctgcccatggggacctcccttgggcaggaggaatcctcagtctcaccccacccattcagctaccagaatctgggccacccccagcagtatttttatcttaaatgttacccattttgtgagttatgatgaatttgtattaaattaaagttacaggcaaaaaaaaaaaaaagggggggccgtt

SEQ ID NO: 3914 - DNA, 913 bp, Zea mays
  misc_feature (1)..(128): n is a, c, g, or t
  misc_feature (729)..(913): n is a, c, g, or t
  Peptide Sequence Number=SeqID_10074
  Probeset Number=SeqID_18317
nnnnnnnnnnnnnnnnnnnnnnnnnnnnnnnnnnnnnnnnnnnnnnnnnnnnnnnnnnnnnnnnnnnnnnnnnnnnnnnnnnnnnnnnnnnnnnnnnnnnnnnnnnnnnnnnnnnnnnnnnnnnnnnnccctgtaatgggggggggggccagctgcccccttacatgaacgataatacagctgctgattcattcgctgcttcaccgtctggaagtccaccatggaattctcattcactcgatgaaataacagatgctgatgtatctcggatgcggaaaagtggggcagtgcacagatgccttttgttggtgtcagtgcatctcaacagcctcgcaaagatgtttccaaaggcttgaagaatctgtggaaatttggttggaagactcgagggggtgatggcttagtcaatgatctgggtatctgcttccactgcctcggtctgcgtcggtgacatggaagatgggcgggatctggtggtcggatcttctgttgttttcaggacggctcgaatgggttatcttgcttcgtgtgacggttttgctgggaacgaggttttttctgaacaagaacaatcactacgcagctccattccaaacccacctgcaaatttcagattgagggaggatcagctgactggaagttctcttaaagcgccgcgttctttcttctccctgtcaacattccgaagcaagggaggtgatgccaggctcaggtgatcctcagaagacnnnnnnnnnnnnnnnnnnnnnnnnnnnnnnnnnnnnnnnnnnnnnnnnnnnnnnnnnnnnnnnnnnnnnnnnnnnnnnnnnnnnnnnnnnnnnnnnnnnnnnnnnnnnnnnnnnnnnnnnnnnnnnnnnnnnnnnnnnnnnnnnnnnnnnnnnnnnnnnnnnnnnnnnnnnnnnnnnnnnnnnnn

SEQ ID NO: 3915 - DNA, 709 bp, Zea mays
  misc_feature (1)..(1): n is a, c, g, or t
  misc_feature (5)..(5): n is a, c, g, or t
  misc_feature (8)..(8): n is a, c, g, or t
  misc_feature (16)..(16): n is a, c, g, or t
  misc_feature (20)..(21): n is a, c, g, or t
  misc_feature (28)..(28): n is a, c, g, or t
  misc_feature (30)..(30): n is a, c, g, or t
  misc_feature (34)..(34): n is a, c, g, or t
  misc_feature (43)..(43): n is a, c, g, or t
  misc_feature (49)..(49): n is a, c, g, or t
  misc_feature (51)..(51): n is a, c, g, or t
  misc_feature (71)..(71): n is a, c, g, or t
  misc_feature (74)..(74): n is a, c, g, or t
  misc_feature (76)..(76): n is a, c, g, or t
  misc_feature (78)..(78): n is a, c, g, or t
  misc_feature (83)..(83): n is a, c, g, or t
  misc_feature (95)..(95): n is a, c, g, or t
  misc_feature (111)..(111): n is a, c, g, or t
  misc_feature (117)..(118): n is a, c, g, or t
  misc_feature (130)..(130): n is a, c, g, or t
  misc_feature (134)..(134): n is a, c, g, or t
  misc_feature (138)..(138): n is a, c, g, or t
  misc_feature (146)..(146): n is a, c, g, or t
  misc_feature (151)..(151): n is a, c, g, or t
  misc_feature (158)..(158): n is a, c, g, or t
  misc_feature (162)..(162): n is a, c, g, or t
  misc_feature (176)..(176): n is a, c, g, or t
  misc_feature (184)..(184): n is a, c, g, or t
  misc_feature (200)..(200): n is a, c, g, or t
  misc_feature (225)..(225): n is a, c, g, or t
  misc_feature (272)..(272): n is a, c, g, or t
  misc_feature (306)..(306): n is a, c, g, or t
  misc_feature (503)..(503): n is a, c, g, or t
  misc_feature (702)..(702): n is a, c, g, or t
  misc_feature (705)..(705): n is a, c, g, or t
  misc_feature (707)..(707): n is a, c, g, or t
  Peptide Sequence Number=SeqID_10075
  Probeset Number=SeqID_18318
ngcanggnggggttcntaannaaaaccnangccnttttggatnttccgntncaaggaatgtgattgataanaananantgganttggaaaaacgntttggaggcccaaatngtgggnngatttatcaagntggngatngggggtgnacccntagttangttngcctattttccatnattcattntcacggcatcatattntagatgctatttattaactcagacngactccagcacatcgcgaggtgttcattagtacggcaatgagggatntaagacctttttttgatccaatgaggattggatntaagggttcgaagtgctcgaaacgcctgacacttgcaggactccatagaaacgacagacactgcttctgtcagcaaagactgcgtatcccttgatatttttgcgatcagttgcttggcggtgaacattcacaaggaagtaacgacatgctgtcgcatgctgagccaaggtttagacttcatagcctaccaaaaaggntggtcagggatacgcagggccaacgccaagacgatttgttcactgctattccacaataaagacagacgattgcggcgtaaagacacccggactccaatggtaggctcaaattcctaacctgccttgaaatccaggccactattcagataaagtaaatgatctcaaatcaggcgtactcgggggggcccggtaccccatnggntnaa

SEQ ID NO: 3916 - DNA, 646 bp, Zea mays
  misc_feature (1)..(45): n is a, c, g, or t
  misc_feature (532)..(532): n is a, c, g, or t
  misc_feature (534)..(534): n is a, c, g, or t
  misc_feature (646)..(646): n is a, c, g, or t
  Probeset Number=SeqID_18319
nnnnnnnnnnnnnnnnnnnnnnnnnnnnnnnnnnnnnnnnnnnnnggccgcctttgcctgccttcccatctcctctggtcttccgccatgggccagcccgtattcctctcctctctccgctcccgcctctgctccgcgccgccgtcgccgcaccatcacctccagcccagccgcggctaccacgtcgagctcggcgctcgcgagaaagcgcttttggaggaggatgttgctttgaagaggttcagatcatacaagaacagtgtgaaacaggtctccaagattggggatgttctcactttagctgctgcatttggttgtagctaccagcttggtgtgttggcggcaagcatgaagtgaaggaatactctgtcattgttccgggcagcgatccactcacgcgtacactgtcgattctatctcctcatgtgttgagcgtgtctggctctctgtggatgcttttctcgtagcgccatgtattaaatcgagctaagctaggttaaccttgatttgcgaataacgttttctgtttaananaaataaaaaaaaaaaaaaaaaaaattcggcgactatggcggcggcaccggcaggcggcggccctcgggcattgtcccagcgggaagaggacatccagatgatgctcgccgcn

SEQ ID NO: 3917 - DNA, 264 bp, Zea mays
  misc_feature (206)..(206): n is a, c, g, or t
  Peptide Sequence Number=SeqID_10076
  Probeset Number=SeqID_18320
aaaatcttctcttcatctctatccctcacgcttctctctccctcctccgtgtgagattttttcagccacccagcgctcacaattctctccctgatatttcccagccgccgccgtacgtttgatttttcttcctgtgcttcccaagagctcccacgtatgcctctatctacaccagcatttcagccgctaaccgctgggtctatttntttgtgcgcgctcggcgttctgcacagtagcgttctctgctcgttcttcaggcagccg

SEQ ID NO: 3918 - DNA, 431 bp, Zea mays
  Probeset Number=SeqID_18321
ttttcagtatgacaatgattgttacagtatgcttgggctttgtgatcagggcgtgtatggaatgcaggtgcagtctgaaggaagcatgacccagctccgaaggtgtggtggagggagcttcggcttaacaggagaggcgatgatcaacaatggacccggcctaaaggagaaaagactggttagtcctcgccatctgactttatggtcattagtaaatgtcagggacgtaaacgtagttttgtccaggctgtgttctgtgcctataaatagatgcacagtagcacattactgttcatggtgacgtgtaatcactcatgcgtcactcttgtatttccaacttctgtcgagccgaaggtacaaatgtaatatgagcattatcgatgtttattcatgtttataaaatgagaatataaataatctgatgctttgtt

SEQ ID NO: 3919 - DNA, 406 bp, Zea mays
  Peptide Sequence Number=SeqID_10077
  Probeset Number=SeqID_18322
cggcaccacatagaaggtggtccaacaaaaaaaaattacatgaaggctatggtccttgacacaaagcttaatcaaatctttgctcagaatccatcgtggccagtcaaagcggtcactggaaaagctatcgaggaaacagctgctgtcatcttggggatcctccatgacaggaagcagaagtgctccatgccacgcagatcaaaactctactagcactgtactctatctcttctctactacaccttttaacgtgtgcatgtgtcgaataagctttgcttcaaggaccatttttttcaaaacatgccccccaggtggtgccgtttgtatcataaacataacttgaagtttagcgcagcagaaacacatgtatattgggtttacgaccttctattggccttaatgccgc

SEQ ID NO: 3920 - DNA, 418 bp, Zea mays
  Peptide Sequence Number=SeqID_10078
  Probeset Number=SeqID_18323
ttcgtctcgaggcacagcacgcaagagattgtctagcagctccagtccaaccgagcatcaaacaaaacatccgcagcatgatgagaggagaggaggatcaccggtcgcgaccaaattctcccagagacggtcggaaatgaggagccaagcgctgttcttcctcacgatcgcccttctcaccgtgctcgcgcgatccagcaacaggcaccaccaccaccacctctcccacgttcaaagcagaggtatgcaggaggcagcttcatgacgaggtcgagtaggggagctgacgagccgttgaaggacgacattcactcgcatagaccatcaccttgaaggtggagtcgtgtgacacattcgatactgtgataggccagatcctggacacggagggcattgcaccgcaccagcactgcctgat

SEQ ID NO: 3921 - DNA, 665 bp, Zea mays
  misc_feature (641)..(647): n is a, c, g, or t
  misc_feature (651)..(660): n is a, c, g, or t
  misc_feature (662)..(663): n is a, c, g, or t
  Probeset Number=SeqID_18324
ggcaaggttttcacatttataccatgtccactcctagagttaagtaagaaggctgagatggctatgttaccaagcaaacgtctacttctcattgcttttcttttgctttgtttcatcaccatgacagctggagctagaaatttgagagagactactactagggatggagttgagaagggtcaaagtagtagtctgtttaagcctaacgatgaaggggcacaagacagcagtggtgacttggacacaatggactacacacctgcaaaaaagaatcctccaatccataattaaaatagtgttttttcttcttggaaaatttttgatagcaaaagcaaagcaccaatccatggtgcttaattactctgcaattctatctatgaccttcaatgtatagatatcgttggaactttgagaaagcactagtctagctgctaccaaatcatatatttagaactcacgtgtaaatagtttttgaagttatgagaatgtgaggggagtgtactgagaggaggagttttcaaagtttgaaaagcagcaccagattaccaaaaacagatgcttaatatatccactttgtcttattcttatgcaaatgcaattattctacttgtggggtacatcttaagagactggagtttacnnnnnnnaaannnnnnnnnnannaa

SEQ ID NO: 3922 - DNA, 529 bp, Zea mays
  Peptide Sequence Number=SeqID_10079
  Probeset Number=SeqID_18325
taggcgtccacagccgcacggttctgccatcacacgattcctccgcccgcgattcccctccccgcgcccgcagcccccgccgccgtcctcgcggccgcagccgagcacagccgccgcgcccgcaaatcacgcgactcccgcttccgaggggcctggcggttcgctgccagacggggtccaccgcagcgcccttcctcaagacggaggaggcccccgcagctgcggcgggggcaaggaatgcccaagcggggttcaccttcatcatgaagttcggcggctcgtcgctcacgtcagccgagcggatgcaggaggtggccggcctcatccttagcttcctcgacgagacgcccgtcgtcatcctctctgccatggggaagaccaccaataacctccgcctagccggagagaaggcggtgagctgcggcggaggaggggcgtccgaaatccctgagctcactgtcatcagggagctgcatcttaggacaattgatgagctcggtttagataagtcgattgtttcaggtatgtt

SEQ ID NO: 3923 - DNA, 1114 bp, Zea mays
  misc_feature (1099)..(1101): n is a, c, g, or t
  misc_feature (1107)..(1108): n is a, c, g, or t
  Peptide Sequence Number=SeqID_10080
  Probeset Number=SeqID_18326
ggcagcatcacttcatatttcaactaaagtaaaacgctatggcttcctacaagttcaaaacccaaaactccttccttcttctcctatccatatcctttttcttcctcttgttactcaacaaggtgaattcgactggatccctctccttttctttccccaagttcaagcatagccaaccagatctgatcttccaaagtgatgcccttgtgacatcaaaaggggtgttacaactcaccacggtaaatgatggaagaccagtctatgactctattggtcgagttctatatgctgcccctttccaaatttgggatagcaccactggcaacgtggctagctttgtcacttccttctcctttatcatcaaagcacctaacgaaggcaaaacggcagatggtcttgtcttctttcttgcaccagttggtagtactcagcccctaaaaggaggacgactcctcggacttttcaaagatgaatcttacaataaatccaaccaaattgttgcagttgaatttgacacatttcggaatgttgcatgggatccaaatggaatacatatgggaatcgatgtcaactctattcaatccgtaagaactgtgcgatgggattgggcgaatggcgaagtagccaatgttttcataagctatgaagcttccaccaaatccttaactgcctctttggtttatccttcacttgaaaaaagttttatcttgagtgctattgtggatgtgaaggatgttcttccggagtgggtaagagttggtttctcagctaccacaggactagctgcaggctacgttcaaacaaatgatgttctctcctggtctttcgagtcaaacttgccaggtggtaacagtgctgcttcggtgaagaacgcgggtctttcaacctatgctgcatgatcccatgtggttatcggcgacagaagacaacgacaataagacctgcaacaatggttgttatcgtgttgtagcaactgtcacagtgcgcaactataaaatcctgtgtaatagttttattagtgactgttcctaaaataaataagatcggtcacttatgtttgtgtttgcgtatataaagtaacaataataataattttagnnncacaannattatt

SEQ ID NO: 3924 - DNA, 580 bp, Zea mays
  Peptide Sequence Number=SeqID_10081
  Probeset Number=SeqID_18327
catttgttttatctcttttcgaagcaagcaagcatggaaacatgccggcatcacacaattctgtagcagccgcaccggctgtaacagcgagacatgtcttacaaaagttttttgtcaaccatgggggtctcaaattgatgacagtaccataggtagttcaagtgatcatttccttgcctgttgccatgttcaagccgagcaaataacactataaggggaaagtaagacgccaatataggattattggaagcgttggttataagctgaccagagcaaacggacatcggacttggttgcacattgaacaaagcttctggagatactcactcgttcatcacaggctggttctcgttggccttgggcctctgctcctttggtctatgctcctccattttcctcatgtcggcgccgcccttctggctgaggaaggaacggaagaggggggagttcacgtcgtagatcatgttctactccatccgccagccgccgcagaaagctagggtatcgacctctcctgcgagcgcttgtgggcgattggtgtcggggcagaagactgccggccggcctcgaggtacccaat

SEQ ID NO: 3925 - DNA, 950 bp, Zea mays
  misc_feature (692)..(693): n is a, c, g, or t
  misc_feature (870)..(871): n is a, c, g, or t
  misc_feature (893)..(895): n is a, c, g, or t
  misc_feature (911)..(912): n is a, c, g, or t
  misc_feature (917)..(918): n is a, c, g, or t
  misc_feature (946)..(946): n is a, c, g, or t
  Peptide Sequence Number=SeqID_10082
  Probeset Number=SeqID_18328
ggaccttagccactctttaacctcgccggcacaacacgagaggaaaaaaaggaagagacagaagaaaccatggaggggaaggagcaagatgtgtcgttgggagctaacaagttcccggagaggcaaccacttggtattgcggctcagagccaagatgaaccaaaggactaccaggaaccaccaccggcgtccgctgtttgagccatcggagcttacttcatggtctttctacagagctgggatagctgaattcgtggccacttttctattcctctacataaccatcttaacagtcatgggtgtggtcagagctgacagcaaatgcaaaactgttggtattcaagggatagcatggtcttttggtggcatgatctttgcccttgtttactgcacagctggaatctcagggggtcacataaacccagctgtgacttttgggttgttcttggcgaggaaattatctttgactagggcactgttctacatggtgatgcagtgtctaggtgctatttgtggtgctggtgtggtgaaaggttttgagggaaaaacaaggtatggtgttttgaacggtggcgccaactttgttaaccctggttacaccaaagagtgatggtcttggtgctgagattgttggcactttcattcttgtctacaccgttttctcagccactgatgctaagcgtagcgcaagnnactctcacgtccccattttggcacctttgcctattgggttcgctgtgttcttggttcacttggctaccatccctatcactggaactggttttaaccctgctcgtagtcttggtgctgctatcatcttcaacaaggaccgtggctgggatgatcactggatcttctgggtgggaccanncattggagcagctcttgcagcnnnctaccaccaagtcgtnntcagnnccatgcccttcaagtccaagtgattgantcaa

SEQ ID NO: 3926 - DNA, 668 bp, Zea mays
  Peptide Sequence Number=SeqID_10083
  Probeset Number=SeqID_18329
ccggccgggtctttcatttctctccctcggatcctccatgctaaatcgggcgatctgaaggaggaggaggcggcggcactccaaactttagcgacatggcaatgcggttggcggctgcggccacgttcgtgcggcgcctggtgccggcgcggcccaccagtacgcatcctggcggcggcatctacggcgcaaagcgggagggcagtgacgtgcgggcgcggcaggacaatgcaaaccaagcgcgcggaaacggttcaagggctcccttcggcaacgcacgcacccgtacccacagaagaagattgaccgcatcaaggaccgcgtcgaggtgccccgccccccaccctgtcgcctcccctcctaagggtttactgcaacagttgctcccccccctccgtttccaattagctgcaaccttgcctgcaacagtggctgctacttgttaacttgtttctcactgcagtgctgctagatatgttctgtcgaactgctgtacttcaactttgacccattggatatcctttttgtactgagtaactgatgtagttcaactttgaaccatgcaatatccattttggatggaagtgaaatatgtttcttcccatcattttgttatgtatgcaaactggaaaataatttgttctttatccgcaaaaaaaaaaaaaaaa

SEQ ID NO: 3927 - DNA, 754 bp, Zea mays
  misc_feature (17)..(20): n is a, c, g, or t
  misc_feature (157)..(160): n is a, c, g, or t
  misc_feature (173)..(175): n is a, c, g, or t
  misc_feature (371)..(372): n is a, c, g, or t
  misc_feature (650)..(651): n is a, c, g, or t
  misc_feature (725)..(727): n is a, c, g, or t
  misc_feature (744)..(744): n is a, c, g, or t
  misc_feature (746)..(748): n is a, c, g, or t
  Peptide Sequence Number=SeqID_10084
  Probeset Number=SeqID_18330
tcacttcacattttaannnnagtaaaaggctatggcttcctacaacttcaaaacccaaaactccttccctcttctcctatccatatcctttttcttcctcttgttactcaacaaggtgaattcaactggatctctctccttttctttccccaagttnnnncctaaccaacctnnnctgatcttgcaaggtgatgcccttgtgacatcaacaggggtgttacaactcaccaacgtagttaacggggtaccatcccgtaaatctcttggtagagctctatatgctgcccctttccaaatctgggatagcaccacaggcaacgtggctagctttgtcacttccttctcctttatcattcaagcacctaacccanncacaacggcagatggtcttgccttctttcttgcaccagttgatactcagcccttagatcttggaggaatgctcggaattttcaaaaacggatatttcaataaatccaaccaacttgttgcagttgaattccacaccttttcaaatcgtcactgggatccaacaggtagacttttgggaatcaatgtcaactctatcgtgttcgtaaaaacagtgccgtggaattgggcaaatggcgaagtagccaatgttttcataagctatgaagcttccaccaaanncttaactgcctctttggtttatccttcacttgaaacaagtcttatcattcatgctattgcggatgcgaaggatnnnctttcggagtgggtctnannntggccc

SEQ ID NO: 3928 - DNA, 490 bp, Zea mays
  Peptide Sequence Number=SeqID_10085
  Probeset Number=SeqID_18331
atttgagatttgagggagatgcagagattgagatcttctcagttactaagaaggcctctgttggagagcaggaggcttggaggagggtattgcacgagctcctcctccgaaaagatcgtagcttcggtgcttttcgagagattacgcgttgtgattcccaaaccagatcctgctgtctacgcctttcaggagttcaaattcaattggcaacagcagtttcgccgtagatacccagatgagttcttggacattgctaagaacagagccaaaggtgaatatcaaatggactatgtacctgctcccagaatcactgaggctgacaagactaacgacaggaagtcattatacagagctcttgacaaaaagttgtatcttcttatcttcggcaagccctttggagctactagtgacaaacctgtctggcatttccctgagaaagtgtatgattctgagccaactcttcgcaagtgcgctgaatctgctttgaagt

SEQ ID NO: 3929 - DNA, 696 bp, Zea mays
  misc_feature (3)..(5): n is a, c, g, or t
  misc_feature (7)..(21): n is a, c, g, or t
  misc_feature (24)..(24): n is a, c, g, or t
  misc_feature (68)..(68): n is a, c, g, or t
  misc_feature (661)..(661): n is a, c, g, or t
  misc_feature (669)..(669): n is a, c, g, or t
  misc_feature (681)..(681): n is a, c, g, or t
  Peptide Sequence Number=SeqID_10086
  Probeset Number=SeqID_18332
agnnnannnnnnnnnnnnnnncantgggtaccgggccccccccacctggaagtcagcggcctgcagtngagtgtcaaggaagaccaggacggccactgggcgctgcaaggtttgccggtgcaggatgaccagccgttggacccgcagcagttgctcacgcgcatgcagatggtcaagcgcgtgtcgttgctcgacagccaggtgacattgcagccgttcgagcaagcgccgttgaccctgacctatgtgggcctgagcctgcataccggcaacacccgccaacgcctggatgcacgcctcaccctgccggacggccagcctttggcgctgagccttcgtagccgtattcgtgcaagcgcatggaaagagggcgaagtcgaagcctacctgagcctgcctcaaagtgactgggccaaatggattcccgccaggctgacccagcaatggaagctcactcagttcaaagccggtggcgagttctggctcaattggggcaaaggcaccgtccaaagtgccgtggtgcgcctcaactaccgcaagtaaagggcagttacgccgaccgcaaacctgtgcatatcgaaaacctcgcctgaccgctactgaacgcagtgacagtggccttaagggttgttcgattcatggcgatgacatcgcgatccgntgggaatncacctgcactgnaaaaacgtgggaccg

SEQ ID NO: 3930 - DNA, 863 bp, Zea mays
  misc_feature (826)..(826): n is a, c, g, or t
  Peptide Sequence Number=SeqID_10100
  Probeset Number=SeqID_18333
gtagggggcatacaagcatagaaaatccagggtccagaatgtatccacagataatgcagacgcggtgcaactacgcagcgatccgtgcactggtgtttatcatagcaagaggcagctcaagtcagatggatgtctctgtagcaatccttcaatacacttcgatcgtccgacatacgcctatgaagatgacagtattgcctacgacaggcgaacgttagcttggcgaccagacaatcgttccgcgcgcagatgaagaagttgaacatagcacagcggtcacttaaccaagaagaaggggctctcgtacccgtattcgatcagcggcgcaagcgtcgccggagtgagtagataatggtaccggaattgttgatcatgaggaacctgaacaagccggggccgcggcccggaacgctatatcaccgaccctgtcgccggacttgtccgcatcggcaccgtcgccggggccgagcgccagcacaacggcgtccagcgcgcccagggccaggttcccgagctgcttgaccccaagatcgttccctcccgacgacgggaccttgtcctagtcatcgccggacgccctgcacgagatcctcgacggcctcctcgcgtgcttgggcggcgtcgccgtggccgtgcacaccggtctgctgctgcccgtgaggaaacactggagaggcgccggcgccagagccattgatggccagtcgatttttgtcagctctctcgcttcttcctctgttcaacgctagcttctacttctctcgtgtggtgatggccgggcgggcagggggggcgcaacaagaggcgtgtaaccggtttgagaagngtcgggtagacagacgatcccggccggcctcgaggta

SEQ ID NO: 3931 - DNA, 1203 bp, Zea mays
  misc_feature (1203)..(1203): n is a, c, g, or t
  Probeset Number=SeqID_18334
cggccgctcgaggcggcgggcggggatctcattgctcctccgttcgctccctcttcctctttgtcgtcctcttcaccagcggtggtggtggtggcaggtgactgtgactagcaggagcgcggaggaggggtccttcggttgccgccatggctcagatcttgctccatggaaacctccacgtcaccatcttcgaggcctcgtcgctctcccaccccggccgcgccagcggcggcgcccccaagttcatccgcaagtttgtggaggggattgaggaaaccgttggtgttggcaaaggcagctccaagctatatgccaccattggtctcgagaaagctcgtgttgggcgtaccaggatgttgggcaatgagcctgtcaaccctcgctggtacgagtcgttccacatctactgtgcgcaccttgccgccgatgtgatcttcactatgaaggccgacaacgcgatcggggccacgctcattggaagggcgtacctgcctgtcgcagagctcctggaaggagaggagatcgacaggtggcttgaaatctgtgatgacaaacgggagcctgttggtgagagcaagatccatgtgaagcttcagtactttggcgttgacaaggaccgcaactgggcggggggtatccggagtgtcaagtttcctcaggtaccttacaccttcttttcccgacggcaacgatgcaatgctgcccgggtaccaagatgcccatgacacccgcacctttatcccgaggaacaagtcggattacctcccgcccatcctcaccacatagagtgcacactgcaggcagcgccatggctgctctcctctctggcctcaccttggtgtccctgtgtttgtgtttgagccactggaggttcagattgcagcgttgatactatacccactccgtcgacatgatttagtcgttttggacggagggagtagacgttattgagtcataataaaatccagtgtgcccggtgggagactgggaggatagaaattatagttgttttttacgactgcttactgcttactgcatccagattgtgttgtcccttgtctggtgtaacttctgttgcttgctgcgttgcagtgccggggcccggatgtgactccagatttcagaacttaaacatgattgcttgttcaaaaaaaaaaaaaaaaaaaaaaaaaaaaccaaaaaaaaaaaaaaaaaaggcccctn

SEQ ID NO: 3932 - DNA, 874 bp, Zea mays
  misc_feature (1)..(129): n is a, c, g, or t
  misc_feature (730)..(874): n is a, c, g, or t
  Peptide Sequence Number=SeqID_10101
  Probeset Number=SeqID_18335
nnnnnnnnnnnnnnnnnnnnnnnnnnnnnnnnnnnnnnnnnnnnnnnnnnnnnnnnnnnnnnnnnnnnnnnnnnnnnnnnnnnnnnnnnnnnnnnnnnnnnnnnnnnnnnnnnnnnnnnnnnnnnnnnngtcctgtaatattaataggaaaatgccttttagaatccagagagttcttttgtatcatctaagttaggtgcaaagagtaaacattattgaagccgatcgctcagagcttgctgcggctgctgctgtagcagatggactttttttctctctcagtgaaacactgtggagtctgcagcagcagcaaccttttctggctggcgaacaagctgtccatagggcttcacggccacttcgatgatgccgccggcgtacccatatctgacacatccgcatacaatggagttcccatgcgggccctgatggcttgtttgagacgaaggaccaccactgagccctgattagcacaccttcaggagctggtgcatgcttaaaagagttatatggttgtttcagtgattttcctttccccttgagacctatttgctgcaacaagaaataagaatgaccaaactcttgtattgacagtgaggttttaactgtgctagctgttaccggcttgtctatttttctttgccgtccacgccatatatggtcacctgtaagttggtcttgcccggtgtcaggaaacggcatcacaattatcaaaagctgttatcgtaannnnnnnnnnnnnnnnnnnnnnnnnnnnnnnnnnnnnnnnnnnnnnnnnnnnnnnnnnnnnnnnnnnnnnnnnnnnnnnnnnnnnnnnnnnnnnnnnnnnnnnnnnnnnnnnnnnnnnnnnnnnnnnnnnnnnnnnnnnnnnnnn

SEQ ID NO: 3933 - DNA, 540 bp, Zea mays
  Probeset Number=SeqID_18336
atactcagacccttcgaccaggagtcaaattgaccctgtcagctctaatcgatgggaagaaacttcagtgcaggagggcacaaggtcggcctgggatttgaactggaagcttaatgtggttttgaggaaagcatcagctttgtccctggaggtgaagagaaatgaacccactatgttttggccttaaaattcttctgtgaaatttcagaagtgtgaactttttattcttccaaagaattgtactcctccccacactgaagcctagggtcccggtccaccctaagggaggtgcttgaaggcttcccggaagctgtcacgttcgtgccacgtttcagttcagttccgcagtgttactttctgtgtgttcctcagcgacggtgtagtgtcatgttccgaggagatgacccgaccctccagttgtccatcgcgtcctgcatgtcccacaccacttttccatgaccttgtaatattggtctctgtacggtagtagaatccttggttttgcatcagagtaaaataaacccatcacatttggaacat

SEQ ID NO: 3934 - DNA, 466 bp, Zea mays
  Peptide Sequence Number=SeqID_10102
  Probeset Number=SeqID_18337
tcgagtcagctacgtaggccccccccccccccagtcccagcacactgtcgctagcttcgaccgcttctacatttgtcagacctagcatcactaaagctaagccccctaagaaggctcctatagtgcctcgtgccttgcaacttctaccgctgagtgatatgatgttctttgcattcgtcatatggacaatcacctccttggctgcttggaacatgtttagtcatctttaggtcaggcacaaacctctccatgaagcagtacctaggctcttattagtgcttttggtatctagtctcctattagtgcttttggtgattaataacgacacaaaacgtactattgtgatttttttcagaggtgtagttttaaaaacacattggtcctgacttttggcttttagttttttttgtttttaaaatagtgaaaataaagagttgcttaacagttcaaaaaaaaaaaaaaaaaa

SEQ ID NO: 3935 - DNA, 249 bp, Zea mays
  Probeset Number=SeqID_18338
tgaagcatgttatagatcactccctttaaatcctctgtcagggcaatagctaatatggatatcaagctagattttgttccaccatggttgatcaacttcatgtcaaggcaactaataggcagcgggcataagctgtatcaaaaggcagtcagtactgtggccagtcatgatggtgactacaggaaagctttgagaggatcactctacgccaggatccgtgaataccaggattctgataacaaggcgaag

SEQ ID NO: 3936 - DNA, 1201 bp, Zea mays
  Peptide Sequence Number=SeqID_10103
  Probeset Number=SeqID_18339
tcgagtcagctacgtaggccccccccccatctctataaccttctcaatcctcatcatatctttgtaggatatctaatttcaatttaagccattcattcattttgtgacacagttaataataatggctgcagaacatgttctgaggttgctagattccttctggtttgaggcttcaattctctctaacaaaaccctttcaaattcaatctctcatgatcacaataaggtggtggaggaagtgcttcctcttgatgatgcaaagcttctactagttccaactcctacccttgaagttaggtcctatagtgaccaaaacttggactccacaacatgtcttttgtgtgattattcccaatcaccaaattctgtgctcaccccacaaaggcttaggacaatcttttctgagagggaaatcagagaattctctagtggaaatcatggaaaagaagggatgagcattaagagaaaacaaaaaagctttggtcatggaagaagggcaaggaaagtgagaaccagcaggagcctatcagagcttgagtttaaggagctaaaagggtttatggatttggggtttgtgttctctgaggaggacaaggactcaaaattggcctctttgatacctggcttgcagagactgggaagagaagaagatgaagaagggcagggtgatgatcaaagtgtggtttctgataataataataagccttatttgtctgaggcttgggatgttttggaccaaagggagatgggaaatcctttgttgaattggagggtaccagctaggggtaatgaaattgacatgaaagacaatcttaggttctgggctcacactgtggcatccattgtaagataagtaggaaaaaatttagatgcaaatcttgagtactttttgagttttgacactgttttctgattagaattggagtttcacttggataatctatgttgatctttaatgtaaacctatgttatctagattactgatatgaaacttcaattttaattagaaaaaaatgctagtgaaatgacatataatttttgtccatattgtccaaataacaattagcaatagaaagaaaagcaaaaaaggttttcatgtcttctgcaaaacagtgattgtagatagtattagattaggttctagacttctagtctagctataaaaataaatgtacatattttgaaaaaaaaaaaaaaaaaa

SEQ ID NO: 3937 - DNA, 260 bp, Zea mays
  misc_feature (21)..(21): n is a, c, g, or t
  misc_feature (23)..(24): n is a, c, g, or t
  misc_feature (27)..(27): n is a, c, g, or t
  misc_feature (47)..(47): n is a, c, g, or t
  misc_feature (105)..(105): n is a, c, g, or t
  misc_feature (145)..(145): n is a, c, g, or t
  misc_feature (171)..(171): n is a, c, g, or t
  misc_feature (186)..(186): n is a, c, g, or t
  misc_feature (193)..(193): n is a, c, g, or t
  misc_feature (212)..(213): n is a, c, g, or t
  misc_feature (216)..(216): n is a, c, g, or t
  misc_feature (226)..(226): n is a, c, g, or t
  Peptide Sequence Number=SeqID_10104
  Probeset Number=SeqID_18340
ttttttttttttttttgagcngnnggngattttcctgggatttattngaataacttaattgggccaagcccataaatcctaacacatttcactatgtaccgaatngttaagcttcctcttctcccacaccaggcggaatcaccanagccggtccaggtagtagtccctggngacctcgtcgctcanctccganccctccacctccacgcggnnggnctcagagctnttgaggctgaacctgtccggcgcctgcagctcct

SEQ ID NO: 3938 - DNA, 467 bp, Zea mays
  Probeset Number=SeqID_18341
tcgagtcagctacgtaggcccccccccccttttatttcttcatggttcgggtttggacattacaggatgattgggcagtgcagttcagagtaggtagatacggttctctaccctgtcgagtttgcctcctcaagacacggcccaaattgtgtatgcttcctgcgttgtcaccatctcgttcaccgaatgattttcggttataattgctgttccattgctttgttaacacacatgtttcattcgtcgtctgaatcctgcgtcgtctataaacatgcccgcctgccaatgcaacacctcgctgaactcgtgtccccaaacaacaagaaaatgggatctggctgagggtgccaaacaagatgtcttctgatgaccgagtgaaagacatgacacccaaatgattgactcccagactgggtatgactagacaatgattgtcatgctcaagaactgttgtacctcaacgcctc

SEQ ID NO: 3939 - DNA, 328 bp, Zea mays
  misc_feature (319)..(319): n is a, c, g, or t
  Peptide Sequence Number=SeqID_10105
  Probeset Number=SeqID_18342
attccattccgatcaatacaaggcatcaagccatttcagtttcctcctagtaccaccgtgtgtgcttcaagcctcaagtgctgtgtactactactactgctactatgtgtgtgtgtgagaaacactagtgagtgtgtgagtagtacgtgtgtgtgagtagttctgggctaacaacgtcgtctcggcatcccacatggcgcggtcctcgcgggactgcacgaacccgtcgccggcggtccagctcgccgtggccgcgtggctgtggctgctcctgtcggccagtggcgtgctggcggacggcggcaaaggcacggtgtgnctgtgcatg

SEQ ID NO: 3940 - DNA, 425 bp, Zea mays
  Probeset Number=SeqID_18343
aaacactttactgcagtgtgcgagatgatggcgagctcagtgacgctgcttctatggagtcttcttcttctcggaactctaagcgcgattcaggctaagaagtccaaggaaaacttaaaggagatcactcacaaggtttattttgatgttgagattgatgggaaagaagctggtcgtattgtcatgggtctatttggaaagacagtccctaaaactgcagagaatttccgagctttgtgcacaggggagaaaggaataggtaagaaagggaaggctctacattacaaggggagctcattccatagaatcataccaagctttatgctccagggaggcgatttcacccatggcaatggtatgggaggagagtctatctatggtgagacgtttgctgatgagaacttcaaactcaagcatactggtcc

SEQ ID NO: 3941 - DNA, 1015 bp, Zea mays
  misc_feature (64)..(64): n is a, c, g, or t
  misc_feature (1003)..(1003): n is a, c, g, or t
  Peptide Sequence Number=SeqID_10106
  Probeset Number=SeqID_18344
ctcgaggccggccaggaccacttcaaaacactcataacacaaagcacaaagcaaagctcatccnttgagttaaaaaatggcagcagcttcttccatggctctctcatccccatccttggctggcaaggccgtgaagctgggcccatcagccccagaagtgggaagggtgagcatgaggaagaccgtcaccaagcaggtctcctcaggaagcccatggtacggcccagaccgcgtcaagtacttgggcccattctctggcgagcccccgtcctacctaaccggcgagttcccaggcgactacggctgggacactgctgggctttccgcagacccagaaaccttcgccaagaaccgtgagctcgaagtgatccactccaggtgggccatgctcggggccttgggctgcgtcttccccgaactgttgtcccgcaacggggtcaagtttggagaagctgtgtggttcaaggccgggtcccagaatcttcagcgagggtgggctcgactacttgggcaacccaagcctggtccacgcccagagcatcctcgccatctgggccacccaagttatcctaatgggtggccgttgagggttatcgtattgctggtggcccccctcggtgaggtcactgacccaatctaccctggtggcagcttcgacccattggggccttgctgatgacccagaggcttttgctgagcttaaggtgaaggaactcaagaacgggcgattggccatggttctctatgtttggcttctttgttcaggccattgtcaccggtaagggtccattggagaacctcgccgatcaccttgcggaccctgtcaaccacaacgcctgggcctacgccaccaacttcgtccccggcaagtgagcatgaaagaaaaggatgacttgtggacttttgagagtttttagatttgtgtttggtggagtatatgttatttgcatgtacttcagataatgtgaattatcttgtgtatcccatccccacttatggtacnttgcttttacaa

SEQ ID NO: 3942 - DNA, 708 bp, Zea mays
  misc_feature (3)..(3): n is a, c, g, or t
  misc_feature (14)..(14): n is a, c, g, or t
  misc_feature (21)..(21): n is a, c, g, or t
  misc_feature (75)..(75): n is a, c, g, or t
  misc_feature (86)..(86): n is a, c, g, or t
  misc_feature (110)..(110): n is a, c, g, or t
  misc_feature (127)..(127): n is a, c, g, or t
  misc_feature (139)..(139): n is a, c, g, or t
  misc_feature (141)..(141): n is a, c, g, or t
  misc_feature (153)..(153): n is a, c, g, or t
  misc_feature (192)..(192): n is a, c, g, or t
  misc_feature (706)..(706): n is a, c, g, or t
  misc_feature (708)..(708): n is a, c, g, or t
  Peptide Sequence Number=SeqID_10107
  Probeset Number=SeqID_18345
aanaacagttgcangattccnggccaagtttcagtttgagtcagaatccctcagaaacaacaacatgtcttgttntccgagtcgcnttcaaggtttgttgccaatcagtngtggacgcgtcactggncagtgagggatngntgatggcttcanaaagtcgtgcactggtacaccagtgcagctcagtattgnacgtatgcatcctcagctggagccttcacatccccgctgatgaagcctgggacttatacaatggtgctgtatcaaactgagtacaaggtcgccacggcgagtgtaactgttacccgcggaagcacggcaaccaagaatatcgcggcgacaacagaaacaaagcagagtctatggaagattggagagttcgatgggcaaccatttgagtttcgaaatggagacaagattctgcgcatgcacccttcagatactcgaatgagcagctggggtcgttccacctacaccgttggatcttcgaacttgcgagacttcccgcttgcgctgttcaaggatgtgaatcaaccccaaaccattcgattttctctcggctccgcgccaggagcagcaaccctccgcatcgcgacaacattgagtcatgccggtgctagacctcaggtcaccgtcaacggatggagtggtgccgtgccagctgcacccacaaagattgactcgagggggggcccggtacccaatngn

SEQ ID NO: 3943 - DNA, 659 bp, Zea mays
  Peptide Sequence Number=SeqID_10108
  Probeset Number=SeqID_18346
gacgcgtgtttcgacccactcgtgcgaattcagtgttggtatcagcctgattctttgcacaaaatagaatccttctgcatctgacacaatgctaatgttcatagcagatcactagtggttccatcatggacaagaaggcgaacattcgtaacatgtcagttattgcccatgtggaccacggcaaatctactttgactgactctctggtgtgcaaggctggtatcattgcttctgccagggctggtgagactcgttttacggacaccagaaaagatgaacaggagagatgcatcaccatcaaatcaactgccatctccctattctacgagctgtctgagaacgacttggcttttatcaagcaaagcaaagatggttctggctttcttataaacttgattgactcccctggccatgtggacttttcctctgaagtgactgctgctcttcgtgtcacagatggtgccttggttgtagtggactgtgtttctggcgtctgtgtgcagactggaacagtgcttcgtccagccattgctgagcgtatccgccccgtgttgatgatgaaacagatggatcgtgctcttttggagctgcagttggaacagaggagctctatcaaacttttcagcgcattgttgagaatgttaatggtgattattccc

SEQ ID NO: 3944 - DNA, 698 bp, Zea mays
  misc_feature (1)..(59): n is a, c, g, or t
  misc_feature (660)..(698): n is a, c, g, or t
  Peptide Sequence Number=SeqID_10109
  Probeset Number=SeqID_18347
nnnnnnnnnnnnnnnnnnnnnnnnnnnnnnnnnnnnnnnnnnnnnnnnnnnnnnnnnnnggttgacttttgcttgcaggaagaaaaacgtgtcgttgctgcttctcgtgacagtcttggcacctggtagcgggattctcacagctcactagccccccccccccccatttacaaaactgtgctttgccttactgtgttcctattacttgcttggtttttgagggggttgacttttgcttgcaggaagaaaaacgtatctttgctgcttctcgtgacagtcttgacagattgtatcgtgattctagcaactcactgaccatcttggagaggagtcaccactttactatggaagaattggacaatcaacgctgtaagctgcaggaatccgtggatgaagtgacccgtctcaaacagctgatatcagcgaaggatgctaccatcaaataactccgagcttccaagaaatccattgtccaggagttagaaactgctcgactggctgctaaggttgccgaagaaacttctgttactcttagagcccagcgcgacagagccatggacaaggctattcgggcggagcgaatcttgatgaggagacccgggtgtgggttgttcccgaagatataagggctgatgtgaatgctgccccctgattcctcannnnnnnnnnnnnnnnnnnnnnnnnnnnnnnnnnnnnnn

SEQ ID NO: 3945 - DNA, 434 bp, Zea mays
  Peptide Sequence Number=SeqID_10110
  Probeset Number=SeqID_18348
ccaggtatgtcgtatgccttcttacttgtatttgtaccaacaaattaatttgggatgggtgaccgaccggtaatttttctcgggtgcgatgagtgaggacaaagtgcgcacaaaagactcgtgttggtctgtggggacaatatatgatcctagagagctgccaggagtaagtatcgcgggtccgggagtggacaggtttcacaggcgtgtgtgggttaggggttcaagtatatggtgcatggcagctgtgggctcggagtggtcacatggcatggtatatgacgacactagacacatagacatggccaagaggggaggttcctggcttggggttgaacgacgaggacgtcagtcttctatgggggtggattgcgatatctcctggacccgggcgaagttgaggtacaggtttcgagcgagaagaggattctccc

SEQ ID NO: 3946 - DNA, 606 bp, Zea mays
  Peptide Sequence Number=SeqID_10111
  Probeset Number=SeqID_18349
aacattaacatccccttagtgagtggataatgaactgaggtctggtcatttaactacacgttcagaaagattacaagcttaacagaacagcaagtgataaaggaaaccgttcgattgtttctgcggcgttatacaaagcaaaccacagtaatgcgttttcacagaacttgtcacaacaacatagaaagatcttttgataggccttttttttgttttttttttttttttataattttaacaacccggagtttaaaagactaatgaacaccactctgggcaggtcactgtcaattcaaaaagatacgttatccaaacaatatttcaggtgataaaggaaaccgccaatttgttctccttcgcccaatacaaagcaaaccacagtaatgcgtttccgcagaacttggcacaacaacctataaagacctaaagattggcccacgatatgaaagggctaaaatatttaagggctcaaacaaagaaggtaaaattccatgtcaaacccaggggcaggggaccggaacaaaagctgggccacaagttacccattgccttttttgactcatgggtggatgcaatcaggaacctttttgccccttctcttttaaa

SEQ ID NO: 3947 - DNA, 442 bp, Zea mays
  misc_feature (15)..(15): n is a, c, g, or t
  misc_feature (21)..(21): n is a, c, g, or t
  misc_feature (24)..(24): n is a, c, g, or t
  misc_feature (41)..(41): n is a, c, g, or t
  misc_feature (53)..(53): n is a, c, g, or t
  misc_feature (58)..(58): n is a, c, g, or t
  misc_feature (70)..(70): n is a, c, g, or t
  misc_feature (77)..(78): n is a, c, g, or t
  misc_feature (81)..(81): n is a, c, g, or t
  misc_feature (87)..(88): n is a, c, g, or t
  misc_feature (102)..(102): n is a, c, g, or t
  misc_feature (398)..(398): n is a, c, g, or t
  misc_feature (401)..(401): n is a, c, g, or t
  misc_feature (405)..(408): n is a, c, g, or t
  misc_feature (420)..(420): n is a, c, g, or t
  Probeset Number=SeqID_18350
ctggaatttttcttnggcggncgnccggcagccccctaagnaaaaaagcgcangaagngaaggggggcancccaaannccnccgganngggagggcgcaccnctgtcgcagcacgggcgcctttcaacccataaggtgttcctggcctcacaaaccttggtcagaccagcgaggatctgtaggagtttctgcgttcaattttcatgtgttctcttcaggggggaagttatgtcagatctgagccgccatcgttccaaatgacctaaacctgagatacattgcgttttagatgactccaggttcacttaggttgtgcgcggctgtacaacgttgctttaaatcatttgtaattgattgccctgttttttcatgtaatggaagaggatatcatattcaanaanaaannnnaaaaaaaaaaanaaaaaaaaaaaggccgcccgcc

SEQ ID NO: 3948 - DNA, 226 bp, Zea mays
  Peptide Sequence Number=SeqID_10112
  Probeset Number=SeqID_18351
aatttacataatgttcattgactttataaatttactagtagaattagctagctaacaaatatctaactaactattaactaatttactaaaaaataactaataattaaactattagatatgttgtttaaatgtctccaactaattttaggctctaattattaactctagtgcattaaaataccctctaacagtctaaatagaaatagaaaaaaaatcgtcagtgtga

SEQ ID NO: 3949 - DNA, 575 bp, Zea mays
  misc_feature (34)..(34): n is a, c, g, or t
  misc_feature (534)..(534): n is a, c, g, or t
  misc_feature (572)..(572): n is a, c, g, or t
  misc_feature (575)..(575): n is a, c, g, or t
  Probeset Number=SeqID_18352
tggagctccccgcggtggcggccgctctagaacngtggatcccccgggctgcagggtgtctctcggggtgattttattaagcttctgtttgtacgccaagagttttcagctctgggtcatccttgcgtatgtgagccttctttcagcaacatggcttgagagctgaggtctggaactccagaggcgtcatcgctattccgtgctacccaaactcccccacaaagaggcgcccagcccgaagcatggatgcatcaacaaccccatacggcacatgctgccgatcccgtctcatccaatatgaccagtcgactgcaaaggttgacgaataacctcgtgggcgatttatttccgccaaacgaaaccccccccccccccccttcctcgttcaaaaaggcgggaaacggacatacgctcaatgttacccttcgcagcgccttgcatgatcccgacgtcacagggctatccctccctcccctcccaactcgccagggtgccaccctcctgccctcattctgggagcagcgtgaatgcaanaaaaagagcctcttcacttcgcccccatatggggttgnaan

SEQ ID NO: 3950 - DNA, 372 bp, Zea mays
  Peptide Sequence Number=SeqID_10113
  Probeset Number=SeqID_18353
cggcctggccggaagttcgccaaggccatggttaagatgggcaaggtccaggtgctcaccggcgacgagggagagatcagggagaagtgcttcgccgtcaacccacactactagtcgtcaagtttagctaattaccccgcgaattatgtttgtttatacgttccatacatcaacattatgtagagtgtttttcgttctcttcaagggtgtgaaatcaaacaagtttatcaagtaacattctttgtgtttcaagatttctacagcagtaggtaccatgcatatatcgactttaataccgccccttgggcccttgttctcaaatgctatgaattaagaacaaggcaacacaccagaaaaatattaaatgttgaa

SEQ ID NO: 3951 - DNA, 698 bp, Zea mays
  misc_feature (2)..(2): n is a, c, g, or t
  misc_feature (21)..(21): n is a, c, g, or t
  misc_feature (40)..(40): n is a, c, g, or t
  misc_feature (46)..(46): n is a, c, g, or t
  misc_feature (50)..(51): n is a, c, g, or t
  misc_feature (64)..(64): n is a, c, g, or t
  misc_feature (132)..(132): n is a, c, g, or t
  misc_feature (679)..(691): n is a, c, g, or t
  misc_feature (693)..(696): n is a, c, g, or t
  Peptide Sequence Number=SeqID_10114
  Probeset Number=SeqID_18354
gncgggccttgccgttggtgngggtccattggtttggcgntgttantatnnacgctggcgctgnccggcggccatggggcattactcggcgtcgcgcttggggcgccaaagtggccaacggcttgggtgtgnacgtgccagttgggcgttctgcaaatgccggcaatgccaaagccctgcagcgcccgtgtgggaagacatcacccagcgtgatggacatcggcatcgttctcggcgcgctgttggccgcgggcctggccgggcgttttgccccaagcctgaaaatcccggcacgttcgctggtggccgcagtgatcggtggtttgctgctgggctatggctcgcgcctggcctacggctgcaacatcggcgcgtacttcagcggcatcgcctccggcagcctgcatggctgggtgtggttggtggcagcgtttatcggtaacagcgtcggtgtgcgcctgcggccgttcttcttcgcaggcgagcgaccgcaggtggccttgagcggttgctgaaccccaacgacctataaggcaggcccatgatcagagaactgagaaccttcgtaagcgccgcccgccgtggcactttcgccgccgccgggcagcaggtggggctgacgcaatcggcggtgagtgcgcagatcaaacacctcgagggggggcccggtacccaatgnnnnnnnnnnnnnannnnct

(The sequence listing continues in the following parts.)
